United States Patent Application Publication US 2008/0050393 A1 - sequence listing, part 40

SEQ ID NO: 135184 - DNA, 6999 bp, Homo sapiens
  misc_feature (1)...(6999): n = a,t,c or g
gacagcctgggcataccatatatctcctgccaactgtggtaatctgcaacttgctaccctgtgaacttgatttttatgttaaaggaatgccaattaatgggacgctgaaacctggcaaggaggcagctctccatacagctgatacatcccagaacattgagctgggggtatcactggagaatttccccctctgtaaagaattgctcattccacctggaacccaaaactatatggtgagaatgcgactctatgacgtcaaccgtcggcagctgaacctcaccatccggattgtgtgtcgagcagaaggatccttaaagatcttcatttctgctccatattggctgattaacaaaacagggttgccactgatcttcagacaggacaatgccaagacagatgctgcaggccagtttgaggagcatgagctggcccgtagcctgagtcctctcttattctgctatgctgacaaagagcagccaaacctctgcacgatgagaatcggaagggggattcatccagaaggcatgccgggctggtgtcagggcttctccctggatggtggtagtggtgtccgagctttgaaagtcatccagcaaggaaaccgcccagggctgatctataacattggtattgatgtcaagaaaggccgaggtcgatacattgatacctgcatggtcatctttgccccccgttacctgttagataataaatcatctcacaagcttgcatttgcacagagggaatttgccaggggacagggaacagccaatcccgaaggttacatttccacccttcctggttccagtgtggtgttccactggcctcggaatgactatgatcagctattgtgtgtcagactgatggacgttcccaattgtatttggtctggaggctttgaagtcaacaagaataattccttccatatcaacatgagggattctcttgggaaaatgcttcttcctacgagtggaaattactctccgaggagctacgtataggatctcatttagtgacacagatcagttacctcctcctttccgaattgacaacttttctaaagtcccggttgtctttactcagcatggcgtagctgaacccaggctccggactgaagtgaagcccatgacttcattggattatgcctgggacgaacccaccttgccaccttttatcactctgactgttaaaggggcagggtcctctgagatcaactgcaacatgaatgatttccaggataatcggcagctttattatgaaaatttcatttacattgctgctacatatacattctctggcttgcaggagggaacaggcaggcctgtggcttccaacaaggccattacctgtgcggagctcgttttggatgtctcacccaagacacaaagagtcattttaaaaaagaaggaaccaggaaagcgttctcagctgtggaggatgacaggaacaggaatgctggcccatgagggctcctcagttcctcacaatcccaataagccctcagccgcccgctccaccgaggggtctgccatcttagatattgctggtctcgctgcagtgactgacaacagatacgagccactgatgctgagaaagcctgaccgcaggcgaagcacaactcagacgtggagtttccgagaaggaaaactgacctgtgggttacatgggttggtcgtccaggccaaaggaggactttctggtttgtttgatggagctgaagttgttcttggtcctgacacttccatggagcttttggggccagttccacctgaacaacaatttattaatcaaaaaatgagacctggttctggaatgttatccatcagagtcatcccagatggaccaactagagcactccagataacagatttctgccaccggaaaagcagccgttcatatgaagtggatgaacttcctgtcaccgaacaagagctgcagaaattaaagaatccagatacagagcaggaattggaagtgcttgtgaggttagaaggtggaattgggttgtccttaattaataaagtcccagaagaactggtctttgcaagtcttacaggaatcaatgtgcactatacacagctggcaaccagtcacatgcttgaactcagcatacaggatgtacaggtggacaatcagctcattggtaccacgcagcccttcatgctctatgtgactcccctgagcaatgagaatgaggtcatcgagaccggcccagctgtgcaagtcaacgcagtgaagttccccagtaagagtgcactgaccaacatctacaagcatctgatgatcacagctcagagattcacagtgcaaattgaggagaaactgctcctcaagctgctaagtttctttggctacgatcaagcagaatcagaggtggaaaaatatgatgaaaacctccatgaaaagacagctgaccaaggtggaacaccaattcgatactactttgaaaatctcaaaatcagcattcctcagatcaagctaagtgtgttcacctccaacaagctcccattggatcttaaggccctaaaaagcaccttggggtttcctttgatacggtttgaagacgctgtgattaatctagatccattcactcgggtacatccctatgagaccaaggagttcatcatcaatgatatcctcaaacatttccaggaggaactcctcagccaggcagctcgaatcctgggatcagtggattttcttggcaatcctatggggcttttgaatgatgtttctgaaggggttactggactgataaaatatggaaatgtcgggggcctcatcagaaatgttacacacggagtatcaaactctgctgccaagtttgctggaacattatcagatggcttagggaagacgatggacaatcggcatcagtcagagcgggagtacatcaggtaccatgcagccacaagtggtgaacaccttgtagccggcatccatgggcctgggctcatgggtatcattgggtgggcttgaccagtgttataacttcgaccagtggaagggtgtgaaaacagaaagggggtgtcagcggtttcatatctggccttggaaaagggcttgttggcactgtaaccaagccagtggcaggcgccctggattttgcatcagaaacagcccaggcggtgagagacacagccacactcagcggccccaggactcaagcacagagggttcggaaaccgcgttgctgcacggggccccaggggctgcttccccgatattctgagagccaggcggaaggacaggagcagctcttcaaactcacagacaacatacaggacgaattcttcatcgctgtggagaacattgacagctactgcgtggcttcatctcctccaaagctgtttacttcctgaaaagtgggagactacgtgggatcgagaagccattttcctaggaagttcaaatacgatgacctctaccactgccttgtctccaaagaccatgggaaggtgtatgtgcaggtgaccaagaaagccgtgagcacgagcagtggagtgtccatccccggcccctcccaccagaagcccatggtccatgtgaaatctgaggtccttgctgtcaagttgtcacaagaaataaactacgcaaagagcctctactatgaaccagcagcttatgttaagactcagcgaaaaccgagagccgctggagctggactcctgaagccccgctgctgagatgggcgctcccgacacagcgcagacccaccaggaggaaagaaggcccagctctcagctgacgatggaggcagaaccggagtcgggtttggggaagttgtcaaggaatgagggaaagtaaatcctcatgaggaaaaagtacaaatggaaatcgtattaatttgtgaggcagggagttattttagattatgggaaataatttttaaaggtattggttaaataacgtttaaaaacatgtactgagatgaatctaatttttagattgccctgcattttggtaaacatgtatatatgtacaaacaggggggtttggaaatattatagggaacggtttctgaacagggtctgtgctatgtgtaaaggtttgttaactgtaaagtaatataaagttatattggatcttctattgcactaattctagatgtctaattcaggatactgtctatagaaaggcattcttaaaagttaaagaatgttacgtcttagttttggagactaaagtattcccagtaaagtgggttgaggtgagggctgtggtcctgaaagggacgcctttgacatcgtggctgtccagttgggctgtgagctgtggcacccaggactggcgctggcccttcagaaggatctaggagagggggcttgggagcccacttttaatttctcacccccattttacaaagagtgcttagattcttacaaattatgatgtaagttatccatttggctttttcctaactagtcttaccaaacttagggggaaacctgtgctccattaccacatgggtgcaagtcagcattgtaagttttctcaggttattattattagagaggttggaaacattggtaaactctgttgattgagaaggaaaaaaaaaagtccccattgaactgttgcaacaaattcagaaatccaccataaaagtgctctccctgcctgggcagcaacaacccaagaacaaagccccgggactgttttctttttaataataccacaggcagggcatcgtagctccacagcccgaggggacacaggatgggaaaccccagggntgagaagggagcaggggagagttcccagaaagggggatgaaatagggagtttttaaaaagcctgccgttggtaagtttttcatggaaccaagatttgacaaaggcatctcttatccttggttttaaattcctgctgggagcaaggcctggtatgagcgccctgggtcttgtttttggtgtttcgcttttctgtaaggattaagcagatagggagaagggaaaaggggcctcactttagaatgaatgagtcaccttgtgatttttaaatttttattttaataaagctaatcaatttctacaaccttgtcacatgtagctgagtctgggatgactcagtggatcagtggatgcgtggaaggttttggtgtttataactcatgacccaaatccttccaagacacaaatgaagctaatcttcttcccctccctttcctctcccacttcccctctgtgtctgtgtctgtgtgtgtgtgtgtgtgtgtgtgtgtgcgcgcgcgcgcgtgcatgcagagaggaaggaagggagctttagcacaagtagctacatagtgttcaaggatcagctttcttgaactccgaggcttggttgcctttgctgaactccaagttagtggattgcagaatggaaacttggcttttgcggcactgggtgagttttagtttgtgtgtgtcttgctggggggtggtgatgattgtctcagcactcacgcactgcacaagatggcagcaggatacagcactgcacaagatggcagctcctctgcagcttcctcctcagcctccctcgcttgcacccccacaggtttggcttgtggtttttgtcatcagtaacctactgcctgagatcatgatctcttaaaagatgagactctcggaagggttgattgtatgcgtcagtgagccttctatcaccttctggaacaaagtcacttgaaatctcttgatgagattaaggagtttagtgttactaagaccatctgctttgggccgcagcagtgctgggtgttctcagacctgactgaggaagttagctgcgggctgccctgtgggctggtgcttcaggaggaatccagagaagtgttcagatgccccccttgggctcctttctaattttaatcagctctttaaatagctgcccatctcctgtgattgcacaaccaagcactttgacatttgcaccttaggagaggcagatgttaaaatggaatccaaagaccacctagggcggggctgggtgggagatgggagggccaactgcgagctgctccacttctcagctctcccctgccctgcagccctgggccagacaaggccagaaggtttcaggggcatttgacatcccctcctggttctcaccaggaaaacatccaaagctttggaggaaacaggccctgcccctggctccttaaatgccccgtctctttgtaaactgatattcagccagcaatgcctaagactttgttaagatcatttctactgcttttctttctgcttcaaacacacagttcgtctctgaggaaagtaaaataaatggaataagagtaaatttgggtaaggagatatccaaaagctacccaagtcccttgaccccagcacaagttggccgacccgtgtcaactcccctgggctgtcgctgcttctctgtgctcacttgaagggtgaagccaggccagtgcttcccccaggccctgggcgctggtcactacacagtggaaaacagacaagcggccccttccccaaatcccaaaagtgttcttgctgcttggtgggtgctcatcgcaatgttctgaagggtggcagggccactttgtttgtaggtatgatctgggcctcaaaataccatagtagctgcttgataaaattctaaaaatatctggttctctattatgtaaacacttattacagtcaccaagtgtgtgaagactcttgagtctggttctcatatcagagtcatcatttttcttcctgtggagataaaatgccttaatggacttcccacnnnnnnnnnnnnnnnnnngggggggcgcttttaaggttcccttgggggggccaaactttacgcgggcttggcaaggaaatagttttttccttatggggggcggaattaaaacctacttgggaatttttggaaagaacctttctttttggggggggacttattgggccaaccttccctacaaaatttaaaggctttagggnnnnnnnnnnnttttaaggggaaaagggggtaaaacaacctccaaatccttgctgttgaaaaagtggg

SEQ ID NO: 135185 - DNA, 451 bp, Homo sapiens
  misc_feature (1)...(451): n = a,t,c or g
tgcagtcctggcagccgccgcgggaggctgaatccctgcagcccatgacggtggtgggtacagactacgtgttccacaatgacaccaaggtcgtcttcctgtccccggctgtgcctgaggagccagaggcctacaacctcacggtgctgatcgagatggacgggcaccgtgccctgctcagaacagaggccggggccttcgagtacgtgcctgaccccacctttgagaacttcacaggtggcgtcaagaagcaggtcaacaagctcatccacgcccggggcaccaatctgaacaaggcgatgacgctgcaggaggccgaggccttcgtgggtgccgagcgctgcaccatgaagacgctgacggagaccgacctgtactgtgagcccccggaggtgcagcccccgcccaagcggcagcagttccaagaccaccccacccctttttgtaaatn

SEQ ID NO: 135186 - DNA, 281 bp, Homo sapiens
gctggagggcctggaggagagcgtcgggaccgctgcaagaaggaattcacagacctgatgatcgagatggactcacggctgctgggccccacgtcaaaggtcaagtgagacgtaggtcaagtcctacgtcggggcccagacatcctggggtcctggtctgtcagacaggctgccctagagccccaacagtccggggggactgggagcagttccaagaccaccccacccctttttgtaaatcttgttcattgtaaatcaaatacagcgtctttttcactctg

SEQ ID NO: 135187 - DNA, 602 bp, Homo sapiens
  misc_feature (1)...(602): n = a,t,c or g
gccgggcatccccgtgctggctacagaacctacaccgacggctttttctccctgccctccaaggacggcgacaaggacgtaatgatcaccggcaagctggacatcctgaagccgcagaaccagcatcgggtgttcactgtcgagtctcgagtgatttganaatgtgccttacgctgccacgctgggggcagctggcctccgcctccgcccacgcaccagcagccgcctccatgccntaggttgggcccctgggggatctgagggcctgtggcccccagggcaagttcccagatcctatgtctgtctgtccaccacgagatgggaggaggagaaaaagcggtacgatgccttcctgacctcaccggcctccccaagggtgccggcactctgggtggactcacggctgctgggccccacgtcaaaggtcaagtgagacgtaggtcaagtcctacgtcggggcccagacatcctggggtcctggtctgtcagacaggctgccctagagccccacccagtccggggggactgggagcagttccaagaccaccccacccctttttgtaaatcttgttcattgtaaatcaaatacagcgtctttttca

SEQ ID NO: 135188 - DNA, 6561 bp, Homo sapiens
  misc_feature (1)...(6561): n = a,t,c or g
tttcgtgcggcggacgtgcagagaatctcgatgctggcctggagcagaaactgagctggaccactggagcctcggtgagggggtgcggggggcaatggcactgcagctctgggccctgaccctgctgggcctgctgggcgcaggtgccagcctgaggccccgcaagctggacttcttccgcagcgagaaagagctgaaccacctggctgtggatgaggcctcaggcgtggtgtacctgggggcggtgaatgccctctaccagctggatgcgaagctgcagctggagcagcaggtggccacgggcccggccctggacaacaagaagtgcacgccgcccatcgaggccagcccagtgccatgaggctgagatgactgacaatgtcaacccactgctgctggtcgaccctcccaggaaacgcctggtggagtgcgggcagcttcttaagggcatcctgcgctctgcgcgccctgagcaacatctccctccgcctgttctacgaggacggcagcggggagaagtctttcgtggccagcaatgatgagggcgtggccacagtggggctggtgagctccacgggtcctggtggtgaccgcgtgctgtttgtgggcaaaggcaatgggccacacgacaacggcatcatcgtgagcactcggctgttggaccggactgacagcagggaggcctttgaagcctacacggaccacgccacctacaaggccggctacctgtccaccaacacacagcagttcgtggcggccttcgaggacggcccctacgtcttctttgtcttcaaccagcaggacaagcacccggcccggaaccgcacgctgctggcacgcatgtgcagagaagaccccaactactactcctacctggagatggacctgcagtgccgggaccccgacatccacgccgctgcctttggcacctgcctggccgcctccgtggctgcgcctggctctggcagggtgctatatgctgtcttcagcagagacagccggagcagtggggggcccggtgcgggcctctgcctgttcccgctggacaaggtgcacgccaagatggaggccaaccgcaacgcctgttacacaggcacccgggaggcccgtgacatcttctacaagcccttccacggcgatatccagtgcggcggccacgcgccgggctccagcaagagcttcccatgtggctcggagcacctgccctacccgctgggcagccgcgacgggctcagaggcacagccgtgctgcagcgtggaggcctgaacctcacggccgtgacggtcgccgccgagaacaaccacactgttgcttttctgggcacctctgatggccggatcctcaaggtgtacctcaccccagatggcacctcctcagagtacgactctatccttgtggagataaacaagagagtcaagcgcgacctggtactgtctggagacctgggcagcctgtacgccatgacccaggacaaggtgttccggctgccggtgcaggagtgcctgagctacccgacctgcacccagtgccgcgactcccaggacccctactgcggctggtgcgtcgtcgagggacgatgcacccggaaggccgagtgtccgcgggccgaggaggccagccactggctgtggagccgaagcaagtcctgcgtggccgtcaccagcgcccagccacagaacatgagccggcgggcccagggggaggtgcagctgaccgtcagccccctccctgccctgagcgaggaggacgagttgctgtgcctttttggggagtcgccgccacaccccgcccgcgtggagggcgaggccgtcatctgcaactccccaagcagcatccccgtcacaccgccaggccaggaccacgtggccgtgaccatccagctcctccttagacgaggcaacatcttcctcacgtcctaccagtaccccttctacgactgccgccaggccatgagcctggaggagaacctgccgtgcatctcctgcgtgagcaaccgctggacctgccagtgggacctgcgctaccacgagtgccgggaggcttcgcccaaccctgaggacggcatcgtccgtgcccacatggaggacagctgtccccagttcctgggacccagccccctggtgatccccatgaaccacgagacagatgtgaacttccagggcaagaacctggacaccgtgaagggttcctccctgcacgtgggcagtgacttgctcaagttcatggagccggtgaccatgcaggaatctgggaccttcgcctttcggaccccaaagctgtcccacgatgccaacgagacgctgcccctgcacctctacgtcaagtcttacggcaagaatatcgacagcaagctccatgtgaccctctacaactgctcctttggccgcagcgactgcagcctgtgccgggccgctaaccccgactacaggtgtgcgtggtgcgggggccagagcaggtgcgtgtatgaggccctgtgcaacaccacctccgagtgcccgccgcccgtcatcaccaggatccagcctgagacgggccccctgggtgggggcatccgcatcaccatcctggggtccaatttgggcgtccaagcaggggacatccagaggatctctgtggccggccggaactgctcctttcagccggaacgttactccgtgtccacccggatcgtgtgtgtgatcgaggctgcggagacgcctttcacggggggtgtcgaggtggacgtcttcgggaaactgggccgttcgcctcccaatgtccagttcaccttccaacagcccaagcctctcagtgtggagccgcagcagggaccgcaggcgggcggcaccacactgaccatccacggcacccacctggacacgggctcccaggaggacgtgcgggtgaccctcaacggcgtcccgtgtaaagtgacgaagtttggggcgcagctccagtgtgtcactggcccccaggcgacacggggccagatgcttctggaggtctcctacggggggtcccccgtgcccaaccccggcatcttcttcacctaccgcgaaaaccccgtactgcgagccttcgagccgctacgaagctttgccagtggtggccgcagcatcaacgtcacgggtcagggcttcagcctgatccagaggtttgccatggtggtcatcgcggagcccctgcagtcctggcagccgccgcgggaggctgaatccctgcagcccatgacggtggtgggtacagactacgtgttccacaatgacaccaaggtcgtcttcctgtccccggctgtgcctgaggagccagaggcctacaacctcacggtgctgatcgagatggacgggcaccgtgccctgctcagaacagaggccggggccttcgagtacgtgcctgaccccacctttgagaacttcacaggtggcgtcaagaagcaggtcaacaagctcatccgcgcccggggcaccaatctgaacaaggcgatgacgctgcaggaggccgaggccttcgtgggtgccgagcgctgcaccatgaagacgctgacggagaacgacctgtactgtgagcccccggaagttgcagcccccgcccaagcggcggcagaaacgagacaccacacacaaccctgcccgagttcattgtgaagttcggctctcgcgagtgggtgctgggccgcgtggagtacgacacacgggtgaagcgacgtgccgctcaagcctcctcttgccgctggtcatcgtgcccatggtggtcgtcatcgcggtgtctgtctactgctactggaggaagagccagcaggccgaacgagagtatgagaagatcaagtcccagctggagggcctggaggagagcgtgcgggaccgctgcaagaaggaattcacagacctgatgatcgagatggaggaccagaccaacgacgtgcacgaggccggcatccccgtgctggactacaagacctacaccgaccgcgtcttcttcctgccctccaaggacggcgacaaggacgtgatgatcaccggcaagctggacatccctgagccgcggcggccggtggtggagcaggccctctaccagttctccaacctgctgaacagcaagtctttcctcatcaatttcatccacaccctgggagaaccagccggagttctcggcccgcgccaaggtctacttcgcgtccctgctgacggtggcgctgcacgggaaactggagtactacacggacatcatgcacacgctcttcctggagctcctggagcagtacgtcgtggccaagaaccccaagctgatgctgcgcaggtctgttatctgtgttggagaggatgctgtccaactggatgtccatctgcctgtaccagtacctcaaggacagtgccggggagcccctgtacaagctcttcaaggccatcaaacatcaggtggaaaagggcccggtggatgcggtacagaagaaggccaagtacactctcaacgacacggggctgctgggggatgatgtggagtacgcacccctgacggtgagcgtgatcgtgcaggacgagggagtggacgccatcccggtgaaggtcctcaactgtgacaccatctcccaggtcaaggagaagatcattgaccaggtgtaccgtgggcagccctgctcctgctggcccaggccagacagcgtggtcctggagtggcgtccgggctccacagcgcagatcctgtcggacctggacctgacgtcacagcgggagggccggtggaagcgcgtcaacacccttatgcactacaatgtccgggatggagccaccctcatcctgtccaaggtgggggtctcccagcagccggaggacagccagcaagaacctgccctggggagcgccatgccctcctggaggaggagaaccgggtgtggcacctggtgcggccgaccgacgaggtggacgagggcaagtccaagagaggcagcgtgaaagagaaggagcggacgaaggccatcaccgagatctacctgacgcggctgctctcaagtcaagggcacactgcagcagtttgtggacaacttcttccagagcgtgctggcgcctgggcacgcggtgccacctgcagtcaagtacttcttcgacttcctggacgagcaggcagagaagcacaacatccaggatgaagacaccatccacatctggaagacgaacagcttaccgctccggttctgggtgaacatcctcaagaacccccacttcatctttgacgtgcatgtcgcacgaggtggtggacgcctcgctgtcagtcatcgcgcagaccttcatggatgcctgcacgcgcacggagcataagctgagccgcgattctcccagcaacaagctgctgtacgccaaggagatctccacctacaagaagatggtgggaggattacttacaaggggatccgggcagatggtgcaggtcagcgaccagggacattgaacacacaccttggcagagattttcccgggcggcacacggactccttgaacaccctcgtggcactccaccagctctaccaatacacgcagaagtactatgacgagatcatcaatgccttggaggaggatcctgccgcccagaagatgcagcttggccttccgcctgcagcagattgccgctgcactggagaacaaggtcactgacctctgacctacaatctccagtgctgccttgggacataggtacctgaggtacctgagagcccctcaggggaggaggccgagtggctgtggctgagggcccccaccctcccctgggaacgcgccccaagccggagtgggtgcagccggaacccgcccagcgtctagactgtagcatcttcctctgagcaataccgccgggcaccgcaccagcaccagccccagccccagctccctccggccgcagaaccagcatcgggtgttcactgtcagagtctcgagtgatttgaaaatgtgccttacgctgccacgctgggggcagctggccttccggcctccgcccacgcaaccagcagccgcctcccatgccctaaggtttgggcccccctggggggaatcctgaagggcctgtggccccccagggcaaagttcccaagatcctatgtctgtctgtccacccacgagatgggaggaggagaaaaaaggcggtacgatgctttacctgacctcaccggcctccccaagggttgccggcactctggatgggactcacggctggctgggggccccacgttcaaaggttcaaanttgagacgtaggtcaaagtcctaacgttcgggggcccagacaatcctgggggtcctggtctgtcagacaggctggccctagagacccactacagtccggggggaattgaaggcagtttcaaagaccaccccaccccctttttgtaaatcttgttcattgtaaatcaaatacagccgtctttttcactctgnnnnnnnnnnnnnnnnnnnngggggggcccgtttaaagggatcaagttttatttcccggggttggcgaggaaaaattttttttatggggcccccaaaataaaatcccggggccgggttttaacaccgcggggaggggaaaaccccgggggtaccccaatta

SEQ ID NO: 135189 - DNA, 6886 bp, Homo sapiens
  misc_feature (1)...(6886): n = a,t,c or g
ccttcttttaaggagtttgccgcgagcgcgtctccttcattcgcaggctgggcgcgttcgcagtcggctggcggcgaaggaaggcgctctcgggacctcacgggcgcgcgtcttttggctcttgcccctgtccctgcggcttggggaaagcgtaacccggcggctaggcgcgggagaagtgcggaggagccatgggcgccgggagctccaccgagcagcgcagcccggagcagccgcccgaggggagctccacgccggctgagcccgagcccagcggcggcggcccctcggccgaggcggcgccagacaccaccgcggaccccgccatcgctgcctcggaccccgccaccaagctcctacagaagaatggtcagctgtccaccatcaatggcgtagctgagcaagatgagctcagcctccaggagggtgacctaaatggccagaaaggagccctgaacggtcaaggagccctaaacagccaggaggaagaagaagtcattgtccggcaggttgatcacatagactctgaagatgtgagcgacagagactccgatacagagatgactactaagtcagcggtagttcacgacatcacagatgatgggcaggaggagacacccgatataatcgaacagattccttcttcagaaagcaatttagaagagctaacacaacccactgagtcccaggctaatgatattggatttaagaaggtgtttaagtttgttggctttaaattcactgtgaaaaaggataagacagagaagcctgacactgtccagctactcactgtgaagaaagatgaaggggagggagcagcaggggctggcgaccaccaggaccccagccttggggctggagaagcagcatccaaagaaagcgaacccaaacaatctacagagaaacccgaagagaccctgaagcgtgagcaaagccacgcagaaatttctcccccaagcggaatctggccaagcagtggaggaatgcaaagaggaaggagaagagaaacaagaaaaagaacctagcaagtctgcagaatctccgactagtcccgtgaccagtgaaacaggatcaaccttcaaaaaattcttcactcaaggttgggccggctggcgcaaaaagaccagtttcaggaagccgaaggaggatgaagtggaagcttcagagaagaaaaaggaacaagagccagaaaaagtagacacagaagaagacggaaaggcagaggttgcctccgagaaactgaccgcctccgagcaagcccacccacaggagccggcagaaagtgcccacgagccccggttatcagctgaatatgagaaagttgagctgccctcagaggagcaagtcagtggctcgcagggaccttctgaagagaaacctgctccgttggcgacagaagtgtttgatgagaaaatagaagtccaccaagaagaggttgtggccgaagtccacgtcagcaccgtggaggagagaaccgaagagcagaaaacggaggtggaagaaacagcagggtctgtgccagctgaagaattggttggaatggatgcagaacctcaggaagccgaacctgccaaggagctggtgaagctcaaagaaacgtgtgtttccggagaggaccctacacagggagctgacctcagtcctgatgagaaggtgctgtccaaaccccccgaaggcgttgtgagtgaggtggaaatgctgtcatcacaggagagaatgaaggtgcagggaagtccactaaagaagctttttaccagcactggcttaaaaaagctttctggaaagaaacagaaagggaaaagaggaggaggagacgaggaatcaggggagcacactcaggttccagccgattctccggacagccaggaggagcaaaagggcgagagctctgcctcatcccctgaggagcccgaggagatcacgtgtctggaaaagggcttagccgaggtgcagcaggatggggaagctgaagaaggagctacttccgatggagagaaaaaaagagaaggtgtcactccctgggcatcattcaaaaagatggtgacgcccaagaagcgtgttagacggccttcggaaagtgataaagaagatgagctggacaaggtcaagagcgctaccttgtcttccaccgagagcacagcctctgaaatgcaagaagaaatgaaagggagcgtggaagagccaaagccggaagaaccaaagcgcaaggtggatacctcagtatcttgggaagctttaatttgtgtgggatcatccaagaaaagagcaaggagagggtcctcttctgatgaggaagggggaccaaaagcaatgggaggagaccaccagaaagctgatgaggccggaaaagacaaagagacggggacagacgggatccttgctggttcccaagaacatgatccagggcagggaagttcctccccggagcaagctggaagccctaccgaaggggagggcgtttccacctgggagtcatttaaaaggttagtcacgccaggaaaaaaatcaaagtccaagctggaagagaaaagcgaagactccctagctgggtctggtgtagaacattccactccagacactgaacccggtaaagaagaatcctgggtctcaatcaagaagtttattcctggactaaggaagaaaaggccagatgggaaacaagaacaagcccctgttgaagacgcagggccaacaggggccaacgaagatgactctgatgtcccggccgtggtccctctgtctgagtatgatgctgtagaaagggagaaaatggaggcccagcaagcccaaaaaaagcgcagagcagcccgagcagaaggcagccactgaggtgtccaaggagctcagcgagagtcaggttcatatgatggcagcagctgtcgctgacgggacgagggcagctaccattattgaagaaaggtctccttcttggatatctgcttcagtgacagaacctcttgaacaagtagaagctgaagccgcactgttaactgaggaggtattggaaagagaagtaattgcagaagaagaaccccccacggttactgaacctctgccagagaacagagaggcccggggcgacacggtcgttagtgaggcggaattgacccccgaagctgtgacagctgcagaaactgcagggccattgggtgccgaagaaggaaccgaagcatctgctgctgaagagaccacagaaatggtgtcagcagtctcccagttaaccgactccccagacaccacagaggaggccactccggtgcaggaggtggaaggtggcgtacctgacatagaagagcaagagaggcggactcaagaggtcctccaggcagtggcagaaaaagtgaaagaggaatcccagctgcctggcaccggtgggccagaagatgtgcttcagcctgtgcagagagcagaggcagaaagaccagaagagcaggctgaagcgtcgggtctgaagaaagagacggatgtagtgttgaaagtagatgctcaggaggcaaaaactgagccttttacacaagggaaggtggtggggcagaccaccccagaaagctttgaaaaagctcctcaagtcacagagagcatagagtccagtgagcttgtaaccacttgtcaagccgaaaccttagctggggtaaaatcacaggagatggtgatggaacaggctatcccccctgactcggtggaaacccctacagacagtgagactgatggaagcacccccgtagccgactttgacgcaccaggcacaacccagaaagacgagattgtggaaatccatgaggagaatgaggtcgcatctggtacccagtcagggggcacagaagcagaggcagttcctgcacagaaagagaggcctccagcaccttccagttttgtgttccaggaagaaactaaagaacaatcaaagatggaagacactctagagcatacagataaagaggtgtcagtggaaactgtatccattctgtcaaagactgaggggactcaagaggctgaccagtatgctgatgagaaaaccaaagacgtaccatttttcgaaggacttgaggggtctatagacacaggcataacagtcagtcgggaaaaggtcactgaagttgcccttaaaggtgaagggacagaagaagctgaatgtaaaaaggatgatgctcttgaactgcagagtcacgctaagtctcctccatcccccgtggagagagagatggtagttcaagtcgaaagggaggaataccagtagcagagcccaacccatgtgaatgaagagaagcttgagcacgaaacagctgttaccgtatctgaagaggtcagtaagcagctcctccagacagtgaatgtgcccatcatagatggggcaaaggaagtcagcagtttggaaggaagccctcctccctgcctaggtcaagaggaggcagtatgcaccaaaattcaagttcagagctctgaggcatcattcactctaacagcggctgcagaggaggaaaaggtcttaggagaaactgccaacattttagaaacaggtgaaacgttggagcctgcaggtgcacatttagttctggaagagaaatcctctgaaaaaaatgaagactttgccgctcatccaggggaagatgctgtgcccacagggcccgactgtcaggcaaaatcgacaccagtgatagtatctgctactaccaagaaaggcttaagttccgacctggaaggagagaaaaccacatcactgaagtggaagtcagatgaagtcgatgagcaggttgcttgccaggaggtcaaagtgagtgtagcaattgaggaggatttagagcctgaaaatgggattttggaacttgagaccaaaagcagtaaaacttgtccaaaacatcatccagacagccgttgaccagttttgtacgtacagaagaaacagccaccgaaatgttgacgtctgagttacagacacaagcttcacgtgataaaagctgacagccaggacgctgggacaggaaacggagaaagaaggagaggaccctcaggcctctgcacaggatgaaacaccaattacttcagccaaagaggagtcagagtcaaccgcagtgggacaagcacattctgatatttccaaagacatgagtgaagcctcagaaaagaccatgactgttgaggtagaagggttccactgtaaatgatcagcagctggaagaggtcgtcctcccatctgaggaagagggaggtggagctggaacaaagtctgtgccagaagatgatggtcatgccttgttagcagaaagaatagagaagtcactagttgaaccgaaatgaagatgaaaaaggtgatgatgttgatgaccctgaaaaccagaacttcagccctggccgcataactgatgcctcagggaggctttaaccaaaggagtccccagatacaaatggaccaaaacaaaaagagaaggaggatgtcccagggaagtagtaattgtcaggaaggaaaagtgtcacagtgaatcagataaagtcgatcacaccccaagtcacaggaggagttacagaaacaagagagagaatctgcaaagtcagaacttacagaatcttaaaacatcatgcagttaaactcattgtctgtttggaagaccagaatgtgaagacaagtagtagaagaaaatgaatgctgctgctgagactgaagaccagtatttcagaactttgagaattggagagcaggcacatcaactgatctcatttctaagagagcccctgacaatcctgaggcttcatcaggagctatgagccatttaacatttcctctttccaagaccaaccctacaattttccccttgataaaccatataaattctgatttaagggtcctaaattcttaacctgggaactggagttggcaatacctagttctgcttctgaaactggagtatcattctttacatatttatatgtatgttttaaagtagtcctcctgtatctattgtatatttttttcttaaaggtttaagggaaatgtggcagggatactacatgcctttttgtatcaccacagtatatggatggggggcatgtgccatagtnccaggcttgggggagcttttaaggcctcagttattattaaccccacgaaaaaacagagcctcctaggatgttaacattcctggatccagggtacaatttcttttaaaattcactaatggattgaggtcccatatttagtggtactctgaaagtgtcacgtttcctagggacgctgagtgtgcctaaaactaaaaagcattttgaaacataccagaatgttctattgtccattgggaaatttttctttctaacccagtggaggttaagaaagaagttatattccggggtagcaaattaacctttaccatccctttttccccacctgttatggttgtttgggacccgataagtgtgtgctttaatccctgagggcaaagtagtgaatatggttttatatggttatgaagaaaagaattgttggtaagtttttgattctactctctatatgctggactgcatctcacacatgtgcatgaaataagtccagtttctttaacaatggtattttgatagattacggattgtgtttggggccatattgttgccattctgttaagaacaatggtggcaacacattcatttgggataggttgtgatttgacgactgatttaaataaaatatttgcttcacttagatttgctggttttattagataccaggaagcctgggacatatgtgtaccacattagaattctaaagataatgattgataagctagaactttttgatgtagtcattacatgaaaccccttgtcactggtttgtgtgttcagaggaagccatggccgagatagctttcctgaaataaaccagtagcttaacagattgaaa

SEQ ID NO: 135190 - DNA, 1377 bp, Homo sapiens
atggtgaagaaggtgagtgctggaatcaaactgcctgcgctccgtagggctctgcccatgacctctgcacccgggttttcccgtatgtcaactggttgtaatagcaataacccctacccgggtgacaaaagtcttcctaatgagaaataccagagggttaaaattgcctggagccctcgccagtttctgccgattggcacctgtagccactgtgatgctgctgcatccactttggaggtgtcggtgctacctctcctgctggtacagacaccgccagtgctggtgccaccaccaccacgattcgtctgttcttacaactttgaactctatgtggatgttgtctatcaggatcttcagtcctcccttttctctgggataccaatgctactcaagctctacacatctaacacccaatgcatcatatcgcctccatcaaaaccagatgacgcactgatcctatttccgttaactatcacagaattctacaagcagaggaagtatctagaactgaggacgcacactaagttctgtaatcgcatgatacctggcaggtacaatgaagccaggaaggcacttcggattgaaaagggcaaggacataggcagcattctggagagggaacggagaaaagacagagcagcgagcgcaaataccatcctagctccaataaaagggaacgacttttaccgcaggaagaacctaggcctggaagccacgcgagatctgggggtcgggatcacgttgcgttgcctagcgacagcagggacgctcgtgggaccccaggctaaaccccgctgtagccttaaatctcctaccatggaggaagaaggcggcggccgcagctgtgggaccactagggagctgcagaagctgaagcagcaggcgatggagtactaccgggagaacgacgttccgcgcaggctggaagagctgctcaactccaccttctacctccagcctgccgacgtctacgggcacctggtagggacctgggacaagcgctctcctcccgccaacccctctccccccgccccgcgctgcggcaacgccttgcgcctgcgcctgcgcctcagaatctcgcatgccagccgcccgggccctgggcctgcgtgtgcggaggagacttctggagggaaggagcgggaaggacacccaggggtgaagggatctccccagagaaagtggcagaaaggaggcagctggaggaaagagggcgctaggcgtatttgacctgcagcggcagcccaggggctggcaggcttcctcgctgcctaagaggcctctccgtttgtgggccggcccaccgcccatgcttgccaattgtcatttttaacacataccttaatgccctcagctcagctcaccgaccttaagcag

SEQ ID NO: 135191 - DNA, 562 bp, Homo sapiens
gagaaactgtataattgtaaggaatgtgggaagagctttagtcgggccccatgtcttttgaaacatgagagactccacagtggagaaaaaccattccaatgtgaagagtgtgggaagagatttactcaaaattcacatcttcattcccatcagagagttcacactggagaaaagccatacaaatgtgagaagtgtggaaagggctacaatagtaagtttaatcttgatatgcaccagaaggtccacacaggagagagaccatacaatcacagtggagaaaaaccattcaaatgtgaagaatgtgggaaaggattttacacaaattcacaatgctattcccgccagagatcccatagtggagaaaaaccatacaaatgtgtggagtgtgggaagggctacaaaaggaggttggatcttgactttcaccagcgcgtccatacaggagagaaactgtataattgtaaggaatgtgggaagagctttagtcgggccccatgtcttttgaaacatgagagactccacagtggagaaaaaccattccaatgtgaagagtgtgggaaga

SEQ ID NO: 135192 - DNA, 489 bp, Homo sapiens
  misc_feature (1)...(489): n = a,t,c or g
gagaaactgtataattgtaaggaatgtgggaagagctttagtcgggccccatgtcttttgaaacatgagagactccacagtggagaaaaaccattccaatgtgaagagtgtgggaagagatttactcaaaattcacatcttcattcccatcagagagttcacactggagaaaagccatacaaatgtgagaagtgtggaaagggctacaatagtaagtttaatcttgatatgcaccagaaggtccacacaggagagagaccatacaattgtaaggaatgtgggaagagttttggctgggcctcgtgtcttttganacatcagagactgcacagtggagaaaaaccattcaaatgtgaagagtgtgggaaaagatttacttgtaaggaatgtgggaagagttttggctgggcctcgtgtcttttganacatcagagactgcacagtggagaaaaaccattcaaatgtgaagagtgtgggaaaagatttact

SEQ ID NO: 135193 - DNA, 2920 bp, Homo sapiens
atgaccacgttcaaggaggcaatgaccttcaaggacgtggctgtggtcttcactgaggaagagctggggctgctggaccttgctcagaggaagctgtatcgagatgtgatgctggagaacttcaggaacctgctctcagtgggacatcaagcattccacagggatactttccacttcctaagggaagaaaagatttggatgatgaagacagcaatccaaagggaagggaattcaggagacaagatccaaactgagatggagactgtttcagaagcaggaacacatcaagagtggtccttccagcaaatctgggaaaaaattgcaagtgatttaaccaggtctcaagacttggtgataaatagctctcagttctccaaagaaggtgatttcccctgccagactgaggcaggactatctgtaattcacacaagacagaaatcttcccagggcaatggatataaaccatccttcagtgatgtctcccactttgattttcatcaacaattacactcaggagagaaatctcatacgtgtgatgagtgtggaaagaacttttgttacatctcagcccttcgtattcatcagagagtccacatgggagagaaatgctataagtgtgacgtgtgtggtaaggaattcagtcagagttcacatctgcaaactcatcagagagtccacactggagagaaaccgttcaaatgtgtggaatgtgggaaaggcttcagtcgtagatcagcacttaatgttcatcacaaattacacacaggagagaaaccttataattgtgaggaatgcgggaaggccttcattcacgattcccagcttcaagaacatcagagaatccatacgggggagaagccattcaaatgtgatatatgtggtaagagcttctgtggtagatcaagacttaataggcattccatggttcacacggcagagaaaccattccgatgtgatacgtgtgataagagctttcgtcagagatcagcacttaatagtcatcgcatgatccacacaggagagaaaccatacaaattgtgagaagtgtggaaaaggctttatttgtaggcgagatctttatacgcatcatatggtccacacgggagaaaagccatataattgtaaagagtgtgggaagagcttcagatgggcctcgtgtcttttgaaacatcagcgagtccacagtggagaaaaaccattcaaatgtgaagaatgtgggaaaggattttacacaaattcacaatgctattcccaccagagatcccatagtggagaaaaaccatacaaatgtgtggagtgtgggaagggctacaaaaggaggttggatcttgactttcaccagcgcgtccatacaggagagaaactgtataattgtaaggaatgtgggaagagctttagtcgggcctcatgtcttttgaaacatgagagactccacagtggagaaaaaccattcaaatgtgaagagtgtgggaaaagatttactcagaattcacatcttcattctcatcaaagagtgcacactggagaaaagccatacaaatgtgatgagtgtgggaagggcttcagatggtcctcaactcgtctgacccatcagagacgccacagcagagaaacacctctcaaatgtgagcagcatgggaagaacattgtacagaattcattctctaaagtgcaagaaaaagttcacagtgtagaaaagccatacaaatgtgaggactgtgggaagggctacaacaggcgcttgaatcttgatatgcatcagagggtccacatgggagagaaaacatggaagtgtagggagtgtgatatgtgctttagtcaggcctcaagccttcgacttcatcagaatgttcatgttggagaaaaaccttagcaagaacatcagagaatccatacgggggagaagccattcaaatgtgatatatgtggtaagagcttctgtggtagatcaagacttaataggcattccatggttcacacggcagagaaaccattccgatgtgatacgtgtgataagagctttcgtcagagatcagcacttaatagtcatcgcatgatccacacaggagagaaaccatacaaatgtgaggagtgtggaaaaggctttatttgtaggcgagatctttatacgcatcatatggtccacacgggagaaaagccatataattgtaaagagtgtgggaagagcttcagatgggcctcgtgtcttttgaaacatcagcgagtccacagtggagaaaaaccattcaaatgtgaagaatgtgggaaaggattttacacaaattcacaatgctattcccaccagagatcccatagtggagaaaaaccatacaaatgtgtggagtgtgggaagggctacaaaaggaggttggatcttgactttcaccagcgcgtccatacaggagagaaactgtataattgtaaggaatgtgggaagagctttagtcgggcctcatgtcttttgaaacatgagagactccacagtggagaaaaaccattcaaatgtgaagagtgtgggaaaagatttactcagaattcacatcttcattctcatcaaagagtgcacactggagaaaagccatacaaatgtgatgagtgtgggaagggcttcagatggtcctcaactcgtctgacccatcagagacgccacagcagagaaacacctctcaaatgtgagcagcatgggaagaacattgtacagaattcattctctaaagtgcaagaaaaagttcacagtgtagaaaagccatacaaatgtgaggactgtgggaagggctacaacaggcgcttgaatcttgatatgcatcagagggtccacatgggagagaaaacatggaagtgtagggagtgtgatatgtgctttagtcaggcctcaagccttcgacttcatcagaatgttcatgttggagaaaaaccttag

SEQ ID NO: 135194 - DNA, 3189 bp, Homo sapiens
ttttttttttatattacttttgtttaaaattggttttgattcatattttattatatacacaatttattagcttcataatttaccatgcaagattttagactgattaggaaattcactaggaagagtagcaggtataatgtttgtatcatattaattttattattgtcttttatttttattaaaaattttatttcagtagtctttttttattttattaaagtatatactggtttttggttacatggatgaattgtctaatggtgaagtctgagattttagtgtacccatcacctgagtagtgtacattgtacccaaacttgtaggctttttatcccttaccctaccttccaccctccccattttgagtctgcatagtccattatatcactctgtatgcctttgcatacccatagcttaactcccacttataagtgaaaacacggtatttggttttccattcctgagttacttcacttaggaataatagcctccagctccatccaagttgctgcaaaagacattatttcatttttttatggctgaataggtattccctggtgaatatataccatattttctttatccactcattggttgatgggcacttaggttggttccatatctttgaaattgtgaattgtgctgtaataaatataggcatgcaggtgtccttttgatgtaaggacttcttttcctttgggtagatagtagtgggattgctggatcaaatggtagatccacttttagttctttagagaatctccatactgtatttcatagaggttgtactaatttaccttcacaccagcagtgtataggcgtttcttttcaccacacccatgtcaacatctattgtttttcgtcttttatttctatcaagtattttacatatgatacttggtttagttcgaaattggcctcatccaaaccaaagattatggtgcacttgaaaaatacaaactgaatgttgtctatactcatgagagtttcctgccatggcctaagtgaaatcttgataacactgaacaaaggcttcacttgtcctcatcttttaattctgtattctgataggagacaagatccaaactgagatggagactgtttcagaagcaggaacacatcaagagtggtccttccagcaaatctgggaaaaaattgcaagtgatttaaccaggtctcaagacttggtgataaatagctctcagttctccaaagaaggtgatttcccctgccagactgaggcaaggactatctgtaattcacacaagacagaaatcttcccaagggcaattggatataaaccatccttcagtgatgtctccctctttgattttcatcaacaattacactcaggagagaaatctcatacgtgtgatgagtgtggaaagaacttttgttacatctcagcccttcatattccatcaaagagtccacatgggagagaaatgctataagtgtgacgtgtgtggtaaggaatttagtcagagctcacatcttcaaactcatcagagagtccacactgtagagaaaccattcaaatgtgtggaatgtgggaaaggcttcagtcgtagatcagcacttaatgttcatcacaaattacacacaggagagaaaccttataattgtgaggaatgcgggaaggccttcattcacgactcccagcttcaagaacatcagagaatccatacgggggagaagccattcaaatgtgatatatgtggtaagagcttctgtggtagatcaagacttaataggcattccatggttcacacggcagagaaaccattccgatgtgatacgtgtgataagagctttcgtcagagatcagcacttaatagtcatcgcatgatccacacaggagagaaaccatacaaatgtgaggagtgtggaaaaggctttatttgtaggcgagatctttatacgcatcatatggtccacacgggagagaagccatataattgtaaagagtgtgggaagagcttcagatgggcctcgtgtcttttgaaaacatccagcgagtcccacagtggcagaaaaaccattcaaatgtgcaagaatgtgggaaaggattttacacaatttcacaatgctattccccaccagagatcccatagtggagaaaaaccatacaaatgtgtggagtgtgggaagggctacaaaaggaggttggatcttgactttcaccagcgcgtccatacaggagagaaactgtataattgtaaggaatgtgggaagagctttagtcgggccccatgtcttttgaaacatgagagactccacagtggagaaaaaccattccaatgtgaagagtgtgggaagagatttactcaaaattcacatcttcattcccatcagagaggttcacactggagaaaagccatacaaatgtgagaagtgtggaaagggctacaatagtaagtttattctttatatgcaccaggagggtccacacaggagagagaccatacaattgtaaggaatgtgggaagagttttggctgggcctcgtgtcttttgaaacatcagagactgcacagtggggaaaaccctttcaaatgtgaagagtgtgggaaaagatttactcagaattcacagcttcattctcatcaaagagtgcacactggagaaaagccatacaaatgtgatgagtgtgggaagggcttcagctggtcctcaactccgtctgacccatcagagaccgccaccagcagagaaacacctctcaaatgtgagcagcatggggaagaacattgtaccagaattccttctctggaagttgccagaaaaagttcaccagtgttagaaaaagccatacaaatgtgaggacctgttgggaagggctacaacaggcgcctttgaatcctttgatatgcatcagaggggtccacatgggagagaaaacatggaagtgtagggagtgtgatatgtgcttttagtcaggcctcaaagccttcgacttcatcagaatgttcatgttggagaaaaaccttagtgatgtgatggtgcaataaagtcttcactcaggtcttcatgaatgcagtctcatctgaaagttcacaaaggagagacacattaaaatatgaggcacatagtaagcacttccctttgagtattttatctctgaatccatgctggtgataaatttcacccattcttggaagagggaaaacatttgtttaagataacatca

SEQ ID NO: 135195 - DNA, 1933 bp, Homo sapiens
cacagagctccctcccaggcccgcgaacttggccattcagccgccgctgtccccgctgcgcgccctcgcgcctctgcctgagaagccaggcgctgttcccccaccccagaagaggatggcaaaggtggctaaggacctcaacccaggagttaaaaagatggtgatcacatgggatatacatataaagtaatcgagcgaatactggagattggtgcatttcgaccgcatatgtccctgggccagctgcagtcagcaagaggtgtggcatgtttgggatgcaaggggacgtgttcgggcttcgagccacattcatggaggaaaatatgcaagtcttgcaaatgcagccaagaggaccactgcctaacatctgacctagaagaacgatcggaaattgggccgctggctgagggactccaagtattccaccctgcacttgctcgggtgaaaggcggggacggcatccggattttacaagaggaacccggatgatcattgaccaaccctattgctactgggaaagatcccacttttgacaccatcacctacgagtggggctccccctgggagttcacccaggaaactggggactgcagttacatgggagctcattccccaagggaggaaggcagccagttgacagggcaccagcggggggccttttaccgcgccgcccgcccagctcatgcaccagggctccccatctatgacccaggatcccctcgcgctgcccgtggacttttggagaaatgagttgaaaactgaatggaaagaatttgtcaagcaaatataagagcgaaggcccttcggcgttgggagaagtggccctcccggggcaggggtggcttgccccaaggaaggaaggggaagcagcaggaaaaagccagaagggggcagaagaccactgctgctaccaccaacggcagtctcagtgacccgtccaaagaagtggaatacgtctgcgagctctgcaagggagcggcccctcctgacagccccgtggtctacttcggacagggcaggctacaacaagcagtggcaccccacctgctttgtgtgtgccaagtgctccgagccgctggtggaatctcatctacttctggaaggatggtgcaccctggtgcggccgccattactgcgagagtctgcggccccgggtgctccggcttgcgatgagatatatattcgctgaggactaccagcgtgtggaagatctggcctggcaccgaaagcactttgtctgtgagggttgtgagcagctgctgagcggcctgggcgtacatcgtcacccaggggtccagcttcttgtgccccaacttgcagcaagtcccaaacgctccctgaagggctgccccaccccacagccagaatcaccagggatccccaccgagaaggataagccagggtgtgcccgagacccatccctaagggtcccggatgtgaccagcaagccaagtgaaataaaccaatgattttgctttttcagtgaggaatatatatatggaggatatatattaggatattattatttctagggtttggggtgggttggtaggatcctttgaggggttcagtagttttccaaaacccaaaattattcttaaggaagtcttagggatgggagtttcctttttctgttgttgtttgtttgttttcccagcttacaaccaacttaaaggacacaaatggcgttctggcaaggggactctgggaggagttttccgagaatgcaattcccgagtggagcaaagtcgcatagctgtaagaatgtgcgtgcttttttgtggacacaggaagctcctccaggagcaggctgggatcccaactatcgcttgttgcctctttttcaagtggaattttaaattttaaataaacaactttttttggcatgataaacagatcaataaaagttttgtgaattccacataaaaaaaaa

SEQ ID NO: 135196 - DNA, 1335 bp, Homo sapiens; identical to SEQ ID NO: 126332

SEQ ID NO: 135197 - DNA, 434 bp, Homo sapiens
tttgtgtgtggaaatgtttaatgcccacagctaaagtagtgaggcagtggactgaaccctgctgaagatagtacctaatacggaggccagatgatgactggacccaaatccgacttcagtgttcttgggctcagtatactcctgagatgttcctgatccatgaagccgccttcaggaattctttctgcagcctttcaccactctcctggccttggctgactgagccaggggtgggccctggattcaagccaggcccgtcagtctttccctgaggtctttgaggtctttcaagcttcttcagtttcttgcgggccccactgtggttcccctgcgccaggtctgctcctcccaggagccggtatgtctctgccacctcgggactgaaatcgccaaatgcttccactttggcttccagggactctctcaggatcgag

SEQ ID NO: 135198 - DNA, 374 bp, Homo sapiens
atctggaaaagccactgttcagtgggttcctgctgctgagttgaaaacttaggggaggcagctgctgctgtgataaacacgagagccaccgtcgccgggtggtgcttagctctaggaactgctggcttcacagagctgaatgctaaatatggcatttgagaaactccagtcagcagcagatgtgaaaagcatgtttcaagtccccatttgtgccctggtattcacagagcagtcagcctgtcctcacataggtacatgtgggaggagttggagatcagaacttcacggaccacagtcaacaaacctttcaggaaatacggagttgccccttcattttctctttggagcctggcaaacaggtgtctttaagatgc

SEQ ID NO: 135199 - DNA, 6891 bp, Homo sapiens
agctgggtgcgcagcagcgcgagctgcaggaggcgctgggcgctcgcgccgccctcgaggcgctgctgggccggctgcaggccgagcgccgaggcctcgacgcggcccacgaacgcgacgtgagggagctgcgcgcgcgcgccgccagccttaccatgcatttccgcgcccgcgccaccggccccgccgcgccgccgccacgcctgcgggaggtgcacgacagctacgcactgctggtggccgagtcgtggcgggagacggtgcagctgtacgaggacgaggtgcgcgagctggaggaggcgctgcggcgcggccaggagagcagactccaggcggaggaagagacgcggctgtgcgcgcaggaggcagaagcgctgcggcgcgaggcgctcgggttggagcagctgcgcgcgcggctggaggacgcgctgctgcggatgcgcgaggagtacgggatacaggccgaggagcggcagagagcgattgactgcctggaggatgagaaggcaaccctcaccttggccatggctgactggctgcgggactatcaggacctcctgcaggtgaagaccggcctcagtctggaggtggcgacctaccgggccttattggaaggagaaagtaatcccgaaatagtgatctgggctgagcacgttgaaaacatgccgtcagaattcagaaacaaatactatcactataccgactcactactacagagggaaaatgaatggaatctattttcaaggcagaaagcacctttggcaagtttcaatcacagctcggcactgtattctaacctgtcagggcaccgtggatctcagacgggcacatctattggaggtgatgccagaagaggcttcttgggctcgggatattcttcctcggccactacccagcaggaaaactcatacggaaaagccgtcagcagtcaaaccaacgtcagaactttctctccaacctatggccttttaagaaatactgaggctcaagtgaaaacattccctgacagaccaaaagccggagatacaagggaggtccccgtttacataagtgaagattccacaattgcccgcgagtcgtaccgggatcgccgagacaaggtggcagcaggtgcttcggaaagcacacggtcaaatgagaggaccgtcattctgggaaagaaaacagaagtgaaagccacgagggagcaagaaagaaacagaccagaaaccatccgaacaaagccagaagagaaaatgttcgattctaaagagaaggcttctgaggagagaaacctaagatgggaagaattgacaaagttagataaggaagcgagacagagagaaagccagcagatgaaggagaaggctaaggagaaggactcaccgaaggagaagagtgtgcgagagagagaggtgccgattagtctagaagtatcccaggacagaagagcagaggtgtccccgaaaggtttgcagacgcctgtgtaaggatgctggtggtgggaccggtagagaggcagaagcaagagagctacggttcaggttgggcaccagtgatgccactggttctctgcaaggcgattccatgacagaaaccgtagcagaaaacatcgttaccagtatcctgaagcagttcactcagtctccagagacagaagcatctgctgattcttttccagacacaaaagtcacttacgtggacaggaaagagcttcctggggaaaggaaaacaaagactgaaatagttgtggagtcttaaactgactgaggatgttgatgtttccgatgaagctggcctggactaccttttaagcaaggatattaaggaagtggggctgaaaggcaagtcagccgagcagatgataggagacatcatcaacctcggcctgaaagggagggaggggagagcaaaggtcgtcaacgtggagatcgtggaggagcccgtgagttatgtcagcggggagaagccggaggagttttccgtcccattcaaagtggaggaggtcgaagatgtgtcgccaggcccctgggggttggttaaggaggaggaaggttatggagaaagcgatgtcacattctcagttaatcagcatcgaaggaccaagcagccccaggagaacacgactcacgtggaagaagtgacagaggcaggtgattcagagggcgagcagagttattttgtgtccactccagatgaacaccccggggggcacgacagagatgacggctcggtgtacgggcagatccacatcgaggaggaatccaccatcaggtactcttggcaggatgaaatcgtgcaggggactcgaaggaggacacagaaggacggtgcagtgggcgagaaggttgtgaagcccttggatgtcccagcgccctctctggagggggacctgggttccactcactggaaagaacaagctagaagcggtgaatttcatgccgaacccacagtcattgaaaaagaaattaaaataccccacgaattccacacctccatgaagggcatctcctccaaggagccccggcagcagctggtggaggtcatcgggcagctggaggaaacccttcccgagcgcatgagggaggagctgtccgccctcaccagagaggggcagggtgggccggggagcgtttccgtggatgtcaagaaggtccagggtgctggtggcagttccgtgaccctggttgctgaagtcaacgtctcacaaactgtggatgccgatcggttagacctggaggagctgagcaaagatgaggccagtgagatggagaaggctgtggagtcggtggttcgggagagcctgagcaggcaacgcagcccagcgcctggcagcccagatgaggaaggtggagcggaggccccggctgctggcattcgcttcaggcgttgggccacccgggagctgtacatcccttcaggcgagagcgaggttgctggtggggcctctcacagctcgggacagcgcactccccagggcccagtgtcggccactgtggaggtcagcagccccacaggctttgcccagtcacaggtgctggaggatgtgagccaggctgcaaggcacataaaactcggcccctctgaagtctggaggactgagcgaatgtcatatgaaggacccactgcagaagtggtggaggtaagtgcgggaggtgacctaagtcaggcagcgagcccgaccggagccagccggtctgtgaggcatgtcacgctgggtcccggtcaaagtccactgtccagagaagtcatcttcctaggccctgcccctgcctgtccagaggcatggggctcgccagaacctggcccagcagagtcttctgcagatatggacggatcagggaggcacagcacatttggctgcagacaatttcatgctgaaaaggagattatttttcagggccccatttctgctgcagggaaggttggtgattattttgcaacagaagagtcagtgggtacccagacttctgtcaggcaactccagttaggccctaaagaagggttcagtgggcaaatccagttcacagctccactttcagacaaggtggagttgggtgtcataggagattctgtacacatggaagggttgccagggagcagcacatccatcaggcacatcagcattgggcctcagaggcatcagaccacccagcagatagtttaccatgggctggttccccaactgggggaatctggtgactcagagagcactgtgcacggagagggctcagcagatgtgcaccaggccactcacagtcatacctcgggtagacaaaccgttatgactgaaaagagcaccttccaaagtgtcgtttctgaatctccccaggaggatagtgcaggggacacatcaggggcagaaatgacatcgggtgttagcagatcctttaggcacattcgactaggtcctacagaaacggaaacctctgaacacattgccatccgtggacccgtgtccagaacatttgtgcttgctggttcagcggactcccctgagctaggcaagttagcagacagcagcagaacgctaaggcacattgcaccagggcccaaagaaacttcgtttacctttcagatggatgtgagtaacgtagaggcgatccgcagccggacacaggaagcgggagctctcggtgtgtctgaccgtggttcctggagagacgcggacagtaggaatgaccaggcagttggtgtgagctttaaggcctctgctggggaaggagaccaggcccacagagaacagggcaaggagcaggccatgtttgataagaaggtgcagctccagagaatggtagaccaaaggtcggtgatttcagatgaaaagaaagttgccctcctctatctagacaatgaggaggaggagaatgatgggcattggttttaataagcagaaacattttgttttaatggcagcctgttggcgacgtgccaacatccaaaggccttaacttattttaagaggccgagggagtctatgaaaatctccccttttttacttttttaaagagtactcccggcatggtcaatttcctttatagttaatccgtaaaggtttccagttaattcatgccttaaaaggcactgcaattttatttttgagttgggacttttacaaaacacttttttccctggagtcttctctccacttctggagatgaatttctatgttttgcacctggtcacagacatggcttgcatctgtttgaaactacaattaattatagatgtcaaaacattaaccagattaaagtaatatatttaagagtaaattttgcttgcatgtgctaatatgaaataacagactaacattttaggggaaaaataaatacaatttagactctaaaaagtcttttcaaaaagaaatgggaaataggcagactgtttatgttaaaaaaattcttgctaaatgatttcatctttaggaaaaaattacttgccatatagagctaaattcatcttaagacttgaatgaattgctttctatgtacagaactttaaacaatatagtatttatggcgaggacagctgtagtctgttgtgatatttcacattctatttgcacaggttccctggcactggtagggtagatgattattgggaatcgcttacagtaccatttcattttttggcactaggtcattaagtagcacacagtctgaatgcccttttctggagtggccagttcctatcagactgtgcagacttgcgcttctctgcaccttatcccttagcacccaaacatttaatttcactggtgggaggtagaccttgaagacaatgaagagaatgccgatactcagactgcagctggaccggcaagctggctgtgtacaggaaaattggaagcacacagtggactgtgcctcttaaagatgcctttcccaaccctccattcatgggatgcaggtctttctgagctcaagggtgaaagatgaatacaataacaaccatgaacccacctcacggaagctttttttgcactttgaacagaagtcattgcagttggggtgttttgtccagggaaacagtttattaaatagaaggatgttttggggaaggaactggatatctctcctgcagcccagcaccgagatacccaggacgggcctggggggcgagaaaggcccccatgctcatgggccgcggagtgtggacctgtagataggcaccaccgagtttaagatactgggatgagcatgcttcattggattcattttattttacacgtcagtattgttttaaagtttctgtctgtaaagtgtagcatcatatataaaaagagtttcgctagcagcgcattttttttagttcaggctagcttctttcacataatgctgtctcagctgtatttccagtaacacagcatcatcacactgactgtggcgcactggggaataacagtctgagctagcaccaccctcagccaggctacaacgacagcactggagggtcttccctctcagattcacctggaggccctcagacccccagggtgcacgtctccccaggtcctgggagtggctaccgcaggtagtttctggagagcacgttttcttcattgataagtggaggagaaatgcagcacagctttcaagatactattttaaaaacaccatgaatcagatagggaaagaaagttgattggaatggcaagtttaaacctttgttgtccatctgccaaatgaactagtgattgtcagactggtatggaggtgactgctttgtaaggttttgtcgtttctaatacagacagagatgtgctgattttgttttagctgtaacaggtaatggtttttggatagatgattgactggtgagaatttggtcaaggtgacagcctcctgtctgatgacaggacagactggtggtgaggagtctaagtgggctcagtttgatgtcagtgtctgggctcatgacttgtaaatggaagctgatgtgaacaggtaattaatattatgacccacttctatttactttgggaaatatcttggatcttaattatcatctgcaagtttcaagaagtattctgccaaaagtatttacaagtatggactcatgagctattgttggttgctaaatgtgaatcacgcgggagtgagtgtgcccttcacactgtgacattgtgacattgtgacaagctccatgtcctttaaaatcagtcactctgcacacaagagaaatcaacttcgtggttggatggggccggaacacaaccagtctttttgtatttattgttactgagacaaaacagtactcactgagtgtttttcagtttcctactggtggttttgatattgtttgtttaagatgtatatttagaatgacatcatctaagaagctgattttgctaaactcctgttccctacaatgggaaatgtcacaagaatgtgcaaaaataaaaatctgagg

SEQ ID NO: 135200 - DNA, 4620 bp, Homo sapiens
agagtgattgactgcctggaggatgagaaggcaaccctcaccttggccatggctgactggctgcgggactatcaggacctcctgcaggtgaagaccggcctcagtctggaggtggcgacctaccggattgtggaacatgtggcagtggagggtgtgagcaagctgtggaaaccgctttggcagaagagtcaaagtctggtcatctccagtggtgtctccttcacaggtggcagattaaacctggagaggttaagaaggggaccaactcccctggctagcacagagtcggtaaagcaggtgcttgtgaataatcggatgataattgatgatgagatggtgaaaaccctagcaatgtccagaacctgcagcgccccaaaccctctcactgccgatgtgaagacctggtccagatcctacagaagcgaggatgcagccacaggccctgtgttgggggtggcttcgacggtggccttattggaaggagaaagtaatccagagatagtgatctgggctgagcacgttgaaaacatgccgtcagaattcagaaacaaatcctatcactataccgactcactactacagagggaaaaatgaaaggaatctattttcaaaggcagaaagcacctttggcaagtttcaatcacagctcggcactgtattctaacctgtcagggcaccgtggatctcagacgggcacatctattggaggtgatgccagaagaggcttcttgggctcgggatattcttcctcggccactacccagcaggaaaactcatacggaaaagccgtcagcagtcaaaccaacgtcagaactttctctccaacctatggccttttaagaaatactgaggctcaagtgaaaacattccctgacagaccaaaagccggagatacaagggaggtccccgtttacataggtgaagattccacaattgcccgcgagtcgtaccgggatcgccgagacaaggtggcagcaggtgcttcggaaagcacacggtcaaatgagaggaccgtcattctgggaaaataaacagaagtgaaagccacgagggagcaagaaagaaacagaccagaaaccatccgaacaaagccagaagagaaaatgttcgattctaaagagaaggcttccgaggagagaaacctaagatgggaagaattgacaaagttagataaggaagcgagacagagagaaagccagcagatgaaggagaaggctaaggagaaggactcaccgaaggagaagagcgtgcgagagagagaggtgccgattagtctagaagtatcccaggacagaagagcagaggtgtccccgaaaggtttgcagacgcctgtgaaggatgctggtggtgggaccggtagagaggcagaagcaagagagctacggttcaggttgggcaccagtgatgccactggttctctgcaaggcgattccatgacagaaaccgtagcagaaaacatcgttaccagtatcctgaagcagttcacccagtctccagagacagaagcatctgctgattcttttccagacacaaaagtcacttacgtggacaggaaagagcttcctggggaaaggaaaacaaagactgaaatagttgtggagtctaaactgactgaggatgttgatgtttccgatgaagctggcctggactaccttttaagcaaggatattaaggaagtggggctgaaaggcaagtcagccgagcagatgataggagacatcatcaacctcggcctgaaagggagggaggggagagcaaaggtcgtcaacgtggagatcgtggaggagcccgtgagttatgtcagcggggagaagccggaggagttttccgtcccattcaaagtggaggaggtcgaagatgtgtcgccaggcccctgggggttggttaaggaggaggaaggttatggagaaagcgatgtcacattctcagttaatcagcatcgaaggaccaagcagccccaggagaacacgactcacgtggaagaagtgacagaggcaggtgattcagagggcgagcagagttattttgtgtccactccagatgaacaccccggggggcacgacagagatgacggctcggtgtacgggcagatccacatcgaggaggaatccaccatcaggtactcttggcaggatgaaatcgtgcaggggactcgaaggaggacacagaaggacggtgcagtgggcgagaaggttgtgaagcccttggatgtcccagcgccctctctggagggggacctgggttccactcactggaaagaacaagctagaagcggtgaatttcatgccgaacccacagtcattgaaaaagaaattaaaataccccacgaattccacacctccatgaagggcatctcctccaaggagccccggcagcagctggtggaggtcatcgggcagctggaggaaacccttcccgagcgcatgagggaggagctgtccgccctcaccagagaggggcagggtgggccggggaaccgtttccggggatgtcaagaaggtccagggtgctggtggcagttccgtgaccctggttgctgaagtcaacgtctcacaaactgtggatgccgatcggttagacctggaggagctgagcaaagatgaggccagtgagatggagaaggctgtggagtcggtggttcgggagagcctgagcaggcaacgcagcccagcgcctggcagcccagatgaggaaggtggagcggaggccccggctgctggcattcgcttcaggcgttgggccacccgggagctgtacatcccttcaggcgagagcgaggttgctggtggggcctctcacagctcgggacagcgcactccccagggcccagtgtcggccactgtggaggtcagcagccccacaggctttgcccagtcacaggtgctggaggatgtgagccaggctgcaaggcacataaaactcggcccctctgaagtctggaggactgagcgaatgtcatatgaaggacccactgcagaagtggtggaggtaagtgcgggaggtgacctaagtcaggcagcgagcccgaccggagccagccggtctgtgaggcatgtcacgctgggtcccggtcaaagtccactgtccagagaagtcatcttcctaggccctgcccctgcctgtccagaggcatggggctcgccagaacctggcccagcagagtcttctgcagatatgggacggatcagggaggcacagcacatttggctgcagacaattttcattgctgaaaaggagattatttttcagggccccatttctgctgcagggaaggttggtgattattttgcaacagaagagtcagtgggtacccagacttctgtcaggcaactccagttaggccctaaagaagggttcagtgggcaaatccagttcacagctccactttcagacaaggtggagttgggtgtcataggagattctgtacacatggaagggttgccagggagcagcacatccatcaggcacatcagcattgggcctcagaggcatcagaccacccagcagatagtttaccatgggctggttccccaactgggggaatctggtgactcagagagcactgtgcacggagagggctcagcagatgtgcaccaggccactcacagtcatacctcgggtagacaaaccgttatgactgaaaagagcaccttccaaagtgtcgtttctgaatctccccaggaggatagtgcagaggacacatcaggggcagaaatgacatcgggtgttagcagatcctttaggcacattcgactaggtcctacagaaacggaaacctctgaacacattgccatccgtggacccgtgtccagaacatttgtgcttgctggttcagcggactcccctgagctaggcaagttagcagacagcagcagaacgctaaggcacattgcaccagggcccaaagaaacttcgtttacctttcagatggatgtgagtaacgtagaggcgatccgcagccggacacaggaagcgggagctctcggtgtgtctgaccgtggttcctggagagacgcggacagtaggaatgaccaggcagttggtgtgagctttaaggcctctgctggggaaggagaccaggcccacagagaacagggcaaggagcaggccatgtttgataagaaggtgcagctccagagaatggtagaccaaagaagacaaggggagtgctcaggtcagaataatgggagagcaacctcgatcctgagagagtccctggaagccaaagtggaagcatttggcgatttcagtcccgaggtggcagagacataccggctcctgggaggagcagacctggcgcaggggaaccacagtggggcccgcaagaaactgaagaagcttgaaagacctcaaagacctcagggaaagactgacgggcctggcttgaatccagggcccacccctggctcagtcagccaaggccaggagagtgcattcagctctgtgaagccagcagttcctagagctaagcaccacccggcgacggtggctctcgtgtttatcacagcagcagctgcctcccctaagttttcaactcagcagcaggaacccactgaacagtggcttttccagatgtaccctcctgcactgaatggtccaggcatggacccacaggcctga

SEQ ID NO: 135201 - DNA, 455 bp, Homo sapiens
  misc_feature (1)...(455): n = a,t,c or g
ttatgtgggggttgaggctcagagcaagcgggggatcctaactctcaattaccctattgaacacggcatcatcaccaactgggatgacatggagaagatctggcaccactccttctacaatgagctgcgtgtagcacctgaagagcaccccaccctgctcacagaggctcccctaaatcccaaggccaacagggagaagatgacccagatcatgtttgaaaccttcaatgtccctgccatgtacgtcgccattcaagctgtgctctccctctactcctctggccgcacgacaggcatcgtcctggattcaggtgatggcgtcacccacaatgtccccatctatgaagtgcttctaaagtcagaacaggttctccaaggatcccctcgagactactctgttaccagtcatgaaacattaaaacctacaagccttnnnnnnnnnnnnnnnnnnnnnn

SEQ ID NO: 135202 - DNA, 1236 bp, Homo sapiens
atgtgtgaagaggagaccaccgcgctcgtgtgtgacaatggctctggcctgtgcaaggcaggcttcgcaggagatgatgccccccgggctgtcttcccctccattgtgggccgccctcgccaccagggtgtgatggtgggaatgggccagaaagacagctatgtgggggatgaggctcagagcaagcgagggatcctaactctcaaataccccattgaacacggcatcatcaccaactgggatgacatggagaagaagaaggaagcagaggaattggcccggaacatggccatccagcaagagctggaaaaggaaaaacagagggtagcacaacagaagcagcagcaattggaacaggaacagttccatgccttcgaggagatgatccggaaccaggagctagaaaaagagcgactgaaaattgtacaggagtttgggaaggtagaccctggcctaggtggcccgctagtgcctgacttggagaagccctccttagatgtgttccccaccttaacagtctcatccatacagccttcagactgtcacacaactgtaaggccagctaagccacctgtggtggacaggtccttgaaacctggagcactgagcaactcagaaagtattcccacaatcgatggattgcgccatgtggtggtgcctgggcggctgtgcccacagtttctccagttagccagtgccaacactgcccggggagtggagacatgtggaattctctgtggaaaactgatgaggaatgaatttaccattacccatgttctcatccccaagcaaagtgctgggtctgattactgcaacacagagaacgaagaagaacttttcctcatacaggatcagcagggcctcatcacactgggctggattcatgtaagcaattctgagctgtccgagagcatggagtccgctggaattcatgagacaacctacaattccatcatgaagtgtgacattgacatccgtaaggacttatatgccaacaatgtcctctctgggggcaccaccatgtaccctggcattgctgacaggatgcagaaggagatcacagccctggcccccagcaccatgaagatcaagattattgctcccccagagcggaagtactcagtctggatcgggggctctatcctggcctctctctccaccttccagcagatgtggatcagcaagcctgagtatgatgaggcagggccctccattgtccacaggaagtgcttctaa

SEQ ID NO: 135203 - DNA, 1375 bp, Homo sapiens
cccacgcgtccgcccacgcgtccgcccacgcgtccggtcactgggagaagaacctctcataccctcggtgctccggtccccagctcactcagccacacacaccatgtgtgaagaggagaccaccgcgctcgtgtgtgacaatggctctggcctgtgcaaggcaggcttcgcaggagatgatgccccccgggctgtcttcccctccattgtgggccgccctcgccaccagggtgtgatggtgggaatgggccagaaagacagctatgtgggggatgaggctcagagcaagcgagggatcctaactctcaaataccccattggaacacgggcatcatcaccaactgggatgacatggagaagatctgggcaccactccttcttacaatggagctgcgtgttagcacctggaagaggcaccccaccctgctcacagaggctcccctaaatcccaaggccaacagggaaaagatgacccagatcatgtttgaaaccttcaatgtccctgccatgtacgtcgccattcaagctgtgctctccctctatgcctctggccgcacgacaggcatcgtcctggattcagggtgatggcgtcacccacaatgtccccatctatgaaggctatgccctgccccatgccatcatgcgcctggacttggctgggccgtgacctcacggactacctcatgaagatcctcccaagagaggaggctattcctttgtgaccacagctgagagagaaattgtgcgagacatcaaggagaagctgtgctatgtggccctggattttgagaaatgagatggccacagcagcttcctcttcctccctggaagaagagctatgagctgccagatggggcagggttatcacccattggcaaatggacgctcccgtgaccctgagacccttttccaaccttactttattagcaatggagttccgctggaattcaatgacgacaaccttacaattccatccatgaaagtgtgacattgacatcccgtaaggacttatatgcccaacaatgttcctctctgggggcaccacacatgtaccctgggcattgctggacaggattcagaaagagaatcccagccctgggcccccaggcaccatgaagatcaagatttattgctcccccagagcgggaagttacttcagtctgggatcggggggctctatcctggcctctctctccaccttccaagcagatgtggatcagcaagcctgagtatgatgacgcagggccctccattgtccacaggaagtgcttctaaagtcagaacaggttctccaaggatcccactcgagacctactctgttaccagtcatgaaacattaaaacctacaagccttaagaaaaaaaaaaaaaaaaaa

SEQ ID NO: 135204 - DNA, 676 bp, Homo sapiens
aaccctcttctgttccaagcactgtgtgagaccctgccttggataagtcaaatgcatgagcttaggaaagtagagtaactgctacaaataataaaaaacagatacatctgcagtcaagacagtcaccaccgaagagtacctggtgaaccctgtgggcatgaaccgctacagcgtggacacctccgcctccacctttaaccacaggggctccttgcacccctcctcctcgctgtactgcaagaggcagaactctggagacagccaccttgggggtggtcctgcttgcaccgctggtggtccccgcactagccccatgtcttctggtggcccctcggcacctgggctgaggcctccagcctccagccccaagagaaacacgacctctcttgaaggaaacagatgtgcctcaagcccttctcaggatgcgcaggatgccaggcggccacggagcaggaacccctccgcctggactgtggaggacgtggtgtggtttgtgaaggacgccgacccacaggctctggggcctcacgtggagctcttcagaaagcacgagattgatggcaacgctctgctgttgctgaagagtgacatggtcatgaagtacctgggcctgaagctgggacctgcactgaaactctgctaccacattgacaaactgaagcaagccaagttctga

SEQ ID NO: 135205 - DNA, 1539 bp, Homo sapiens
atggggggtggggagcaagggacactgaggacagctgagaaccaggggctgcaggtctgccctggggaggcaggcagctctcttggttttagtggaaacactcccaccaatggccttcctgccagaggagatcagacatcctacagagacttctggtctggtcctcagttccccgacacctccctgagaactgcagcacctggagcccgagagcaatgtggaacccacgggggagaaggttctactctggaggggagccgtccagatgtcccccaagacctcttttccccaactctaggattctacggttctacatatcctgagctggagcaagggatgcttgggggacatgtagaagcttccagagagtaccagatgttgtcccatgtggggaatccagactacccccatgcccttgctacagagcaggccaccagcccctctactgagagtggctcagccggctttaaaggtgtagctttagctatgctttctaaaattacaatgtgtgtgaggattggaattcttgtcttccaacaggaccaagggtctatgtgcaaagccttttctactacgggaatgggactagtcacatacctacttacgtgccgcgcctggtcaaggctgcagtgtggagcctcttacagggcccatgatgtgaatgtgcttccaggatgtagtggccctgcagccttgctgctaggagactggttctcacttcattcgagtgatgctgtgctccccgcgcaagggcaagggatgttaagtcagggggaagctgatgcatgcattacattaccacatctgtttccttcaagagaggtcgtgtttctcttggggctggaggctggaggcctcatcccaggtgccgaggggccaccagaagacatggggctagtgcggggaccaccagcggtggcagcaggaccacccccaaggtggctgtctccagagttctgcctcttgcagtacagcgaggaggaggggtgcaaggagcccctgtggttaaaggtggaggcggaggtgtccacgctgtaccggttcatgcccacagggttcaccagaggcccgtttaacatagagcacagagagtgggggaacaccacagccacgtggactagaatgatttccaatcacaataaacactcccaaagagggaggaagatgacagcgcggctgccatgtggaggggctcctcacttctcagaccgaacggatgacaaatggaggcgctcctcacttctcacacggagcggctgccagacagagaggctcctcacttctcaaacggaaccactgccggccggagggtctcctcacttctcaaacggagagaccgggcagagacgctcctcacctccccaacggggttgcgaccggccacaggcgctcctcacatccaagacggagcaacagcgcaaaagcgcttcccacatctcatacgatgagcggccaggcaaagacgctcctcacttcctagatgggatggtggccggaaaaaggcgctcctcactttccagactgggcagccaggcatag

SEQ ID NO: 135206 - DNA, 2337 bp, Homo sapiens
atgggcagaagctcaggggacagacggacaaaaacatcagaatgggctgcaaacacagggattgaggcactggaggactgctactgcctgaaggctaaggagatggcaacattcaaggcaagcaatgtgctgcaagcacacaggatggagactcacacggctggcacgggctgcaggaccaagaaatggagacttctgacagggggcataaagtgcaggcagaggacagaccaggtgacaatacacaagggcagacgtgggcttcagtcattacgggatggtgatactggagagaagatacaggcttcaggcacaaggatggagacacacgcgtggctgacactaagtacactcaccaggcccgagacgttgggagaatggagaagcgcttgcgagccaaaagtcctccaggagcacctgaaggaagcttcgcctgcacctgggacacccttccctgatgctggcctcaaggcaggcgcgccgcacacgcttccggtccatgacgaccacagctcagaagagcacgcgaacccagcctccacgaagagaaaatggcggaatgggccttcgcctcccttttataacggctgtactcaaccgctgtatcttggaagcttggttttgattgggctggccactcagtattccttgtccctggcctcgcagcccacccgggaagccacagtgaccagccaccagccccacctcaagggccatggcacagccatcagctccagctgccagcatgctactgccatgccccgagtgtccatctgggccccggttcatgacctgttgtctttctgtatctactttctgcagcccctcactgaggaggcctcctggctccatcaagggctcctccggcctggggggcggcgtcgtcccgcacctcctgccggctgtctggcggccttgggtgccggctcctgcaggctgggatctgctggcggcctgggcagcaccctcgggggtaagcagctactccagctgctacagctttggctctggtggtggctatggcagcagctttggggggtgttgatgggctgctggcttggaggtgagaaggccaaccatgcacaaccttattgacttttctggcctcctacctggacaaggtgccgtgcccttggaaggaggccaacactgagctggaggtcgaagatccgtgactaggtaccagaggcagggccccggggcccgcccgtgactacagccagtactacaggacaattgaggagctgcagaacaagatcctcacagccaccgtggacaatgccaacatcctgctacagattgacaatgcccgtctggcctgcctgatgacttccgcaccaaggtttgatgacagagcaggccctgcgcctgaggtgtggaggccgacatcaatggccttgcgcagggtgctgggatgagctgaccctggccagagccgaccttggagatgcagattgagaacctcaaggaggaagcttggcctaccttgaaagaaagaaccaccgaaggaaggagattgaacgcccttcgaggccaggtgggttggtgaagatcaatgttggagatggacgctgccccaggcgtggacctgagccgcatcctcaacgagatgccaagctgcgtggaccacagggtcacacgctgcatcaacagacctggagctgagctcaagctgggatctggggggtggacagaggaactgaaacgcgaggtggctaccaacagcgaactggtccagagcggcaagagcaagatttcggagctcccggcgcaccatgcaggccttggagatagagctgcagtcccagctcagcatgaaagccatccctggagggcaacctaggcggagacagagcaaccgcctactgcgtgcagctgtccccagatccaggggcttgattggcagcggggaggaccagctggtcccagcttcggctgcgtagatggagcagcagaaaccaggattacaaaatcctgctggatgtgaagacgcggctggagcaggagattgccacctaccgccgcctgctggaaggaagaggatgcccacctgacttcagtgcaagaaagaaccggtgaccacccgtcaagtggcgtaccattgtgggaaagaggtccagggattggcaaggtcatcttgcttccgcggagcaggttccaccagaccacccgctgaggaattaggtaaccccgggccggacaccccagaaggcagggaggcagccgccccagtctgccccacagtcttccggcctgtccagccttagcccccttgttcaattcctttccccatgcttccttgcctgatgacaataaagcttgttgactcagctatga

SEQ ID NO: 135207 - DNA, 252 bp, Homo sapiens
  misc_feature (1)...(252): n = a,t,c or g
catggtcagaatcctgttgtaactccatgcaataaacagttcctgagtcaatttgaaatgcagtccaggaaaactacacaatcaggacaaatgtntggggaaggtaaagctggtcctcctctagctgggcctcctaatcgaggagatcgccctccaccaccagttctttttcctggacaaccttttgggcagcctccattgggtccacttcctcctggccctccacctncagttccaggctacggnccccct

SEQ ID NO: 135208 - DNA, 297 bp, Homo sapiens
aagacgtgaacgatcaagagagagggaccatagtagatcacgagaaaagagtcgacgtcataaatcccgtagtagagaccgtcatgacgattattacagagagagaagcagagaacgagagaggcaccgggatcgtgaccgagaccgtgaccgagagcgtgaccgagagcgcgaatatcgtcatcgttagaagaaattttgacaattccgatttgatgctgcaattacttgctgtttttattgatcttatggtttatttcttaagccatagtcagtgtaaatacagccctgcagcag

SEQ ID NO: 135209 - DNA, 432 bp, Homo sapiens
gaagatggcggacggcgtggaccacatagacatttacgcggatgtcggcgaagagttcaaccaggaagctgaatatggtgggcatgatcagatagatttgtatgacgatgtcatatctccatctgcaaataatggagatgccccagaagaccgagattacatggatactccacctccagttccaggctacggcccccctcctggcccaccacctccacaacagggaccacctccacctccaggcccctttccacctcgtccacccggtccacttgggccaccccttgacacttagctcctcctccgcatcttcctgggaccaccttccaggtggccccaccgccagcttccgcatgtggaacccagctttcttttccttccaccaattaacagtgggcatggcttacattcagataggccgaggttccacca

SEQ ID NO: 135210 - DNA, 1077 bp, Homo sapiens
atgggaggaatcggagcccgagcggcagcggcggggaaggggcggcggcggcgggcacgcgccccgccagggcttcctcctccgaccagcgacgggggagggggcgcggcggcggccagttctctccgccgcttacacgcggccccaccgcccgggcctagcgcggcgggaagcgccagccgggtgccgccaacaatagggagcgaggcagcgccggcgagggaggaccggcggcagctgcacagcggccgcgtccgcgcatccgggtctccgcgacttacgcgcccgcggcccgtgaaacgacgcggtagaacgaggggcgggggggcgccacgccaggggtcggcggcgcggcccagaggcggcaagggcgcacactctgcagtcgcttcggctcgcgccgcagcgggccccgggtcagcttcccggccgcatggcgccgcgtcggcggcggggacctgggctctcacgtacctggttgaactcttcgccgacatccgcgtaaatgtctatgtggtccacgccgtccgccatcttccttcagcctgcgccgccgccgccgccgccgcctcctgcaggtttgcccttgttggtgttggatctgaagcatcttcaaaaaagttaatggatctgttacctaaaagagaacttcatggtcagaatcctgttgtaactccatgcaataaacagttcctgagtcaatttgaaatgcagtccaggaaaactacacaatcaggacaaatgtctggggaaggtaaagctggtcctccaggaggcagttcccgagcagcatttccacaaggtggtagaggacggggccgttttccaggggctgttcctggtggggacagatttcctgggccagcaggaccaggagggccacccccacctttccaggacccatcagtaaacagtgacccggtttgtggaaccttcgggggcattagccgccaggataccaaacgccctcaaacctctccgttcggccaatggcgaagcctaagcccgaaggcacggacctttcaaggtcccgggaaggtttcttcaaatctcgattcgctccgaattagatattaa

SEQ ID NO: 135211 - DNA, 3815 bp, Homo sapiens
  misc_feature (1)...(3815): n = a,t,c or g
acgctgctgccgcggcggncatacctgcatgattttgcggtgtcggcggcggccgatgctgaatgaagatggcgggcggtgtgaaccacatagacatttacgcggatgtcggcgaatagttcaaccaggaagctgatatatggcgggcatgatcagatagatgtgcatgacgatgccatatctccatctgcaaataatggagatgccccagaagaccgagattacatggatactctcccaccaactgttggtgatgatgtgggtaaaggagcagcaccaaatgttgtctatacatatactggaaagagaattgcattatatattggaaatctaacatggtggacaacagatgaagacttaactgaagcagttcattctttgggagtaaatgatattttggaagataaaattttttgaaaatcgggcaaatggccagtcaaaggggtttgcccttgttggtgttggatctgaagcatcttcaaaaaagttaatggatctgttacctaaaagagaacttcatggtcagaatcctgttgtaactccatgcaataaacagttcctgagtcaatttgaaatgcagtccaggaaaactacacaatcaggacaaatgtctggggaaggtaaagctggtcctccaggaggcagttcccgtgcagcatttccacaaggtggtagaggacggggccgttttccaggggctgttcctggtggggacagatttcctgggccagcaggaccaggagggccacccccaccttttccagctggacagactccaccacgtccacccttaggttccttccagggcccacctggttccaccaggtcctccacctcctggtcaggttctgcctcctcctctagctgggcctcctaatcgaggagatcgccctccaccaccagttctttttcctggacaaccttttgggcagcctccattgggtccacttcctcctggccctccacctccagttccaggctacggcccccctcctggcccaccacctccacaacagggaccacctccacctccaggcccctttccaacctcgtccaaccgggtccaacttgggccaccccttaacactagctcctccctccgcatccttccctggaccaacctcccaggtgccccaccgcccagtccgcatgtgaacccagctttctttcctccaccaactaacagtggcatgcctacatcagatagccgaggtccaccaccaacagatccatatgggcgacctccaccatatgataggggtgactatggcccccctggaagggaaatggatactgcaagaacgccattgagtgaagctgaatttgaagaaatcatgaatagaaatagggcaatctcaagcagtgctatttcgagagctgtgtctgatgccagtgctgggtggattatgggagtgctattgagacactggtaactgcaatttctttaattaaaacaatcccaaagtatcctgctgatgatcgtgcacaaagttccttattagttctttgcaagattgccttcatggaattgagtccaagtcttatggttctggatcaagaagacgtgaacgatcaagagagagggaccatagtagatcacgagaaaagagtcgacgtcataaatcccgtagtagagaccgtcatgacgattattacagagagagaagcagagaacgagagagggcaccgggatcgtgaccgagacccgtgaccgagagcgtgaccgagagcgcgaatatcgtcatcgttagaaggctgaagggaaggagggatcaccttcccaagactaaaacagtcttccatgggggggaaaaatggacgctttgtccagccagttttgctttctttgtggattggaactggaacctgttaagggatttcatgggttaaaatgaacagggattagatctgaataaaggcaaatctgcataaatggtaaccagtagctctacttttattttttatgttgcttaactgttttatttgaaggaaacctgtgtgatttaaaaagttatagctctttgccaactttattactggttatatacatttggccacttatgaatgtgcaaagccaattggaaaaaaaagtcaaagtaaatagcttgtttttgtagtagtgttgttctttgttaaaaatgtttatatgaataatgtctgtaaacagcactcactttgtattacaatagatgtagtgttgtaataaactgtttaatggggctgatgtgtaaagctgttcaagttatttgatgtttacgacctcagggaaagtcttgtgttcagcaatatctaaagataatgttactatgacaacatttttactgtcctttaaagcattgcaatagcgtttttggatatgcctcgaatctaatcttgcgttcagtgaattaaacatagtaattaagtgtcttttgcccttgattttgatattagaataggtgattacatggatatttaatatttctatattctgcttttctagctgtttttacctagttagcttgtgactttgctgaatggtatgtaaacttgtaaaaatagagatttgacagacatagcaatctagtcaatgtgtaaggggtcaaaaaaaacagaggttttaacacataagtaaaaacccgtacatatttgatgtgtaatgcaggttaattacaacacagatgtaccgaaacacttaattgtgaaccgctaacattgaagaaattttgacaattccgatttgatgctgcaattacttgctgtttttattgatcttatggtttatttcttaagccatagtcagtgtaaatacagccctgcagcaggtaaatgtgagtaaagagagccttatattttccaattggtataaaatttttgaaggatgtgatgttcattaacattcggttgtattccccagtatttgtaatgggaaattacagataaaccgtgtctgcacagtttaaggaatactatgtatattcatgcaccgtattgattcatgctatagttacttaatcaaagatttttttcaaacctgccttacatataggcccactttaaaagcacctgactagcatgtgttcttgattgcaaaattggcagaggcagggtgtcaacttgattaggtgtttttatgggaatgtaatttgaaatcactacttcagaaatttgacttaaaattcttgagcacgttaatatgtttttaagatctgattatctttgagagatcttctgttaatacacattggttgttaaagagtacccaaattctaggacaatgcttaaagtgttaaaataccctagatactgtgttatgtgcaactgtagaaaccctccagaaatttccactgctgttcttcactttcatcttgtctgctatcaaaccacttctgacaaaattagctgttttgaattacccatatcactgccagttttattttaaaatattttgtgtttgaagtatctgtgcatgggatcgttgatgtttatcagaactgttcactttcagaaatgattttttaaagcattttgttgaaaatgcggttgcttttttaacattattttagagttgtatcaaaattttcctgttttctgtatattgttgtgtcatttcttggctttttaatattttgactacaatgccctaatgcgaagaagtatggacatataaatattacaagagaaattagttaatagtaaagggttaaaaggtaagtaaaatgtccatgaaaataaaattttctttgaacagtttaaaaatggaatcacaaaaatctaactgcacttgaaatgaaactggaaattttatactaattaaatcctttatttaccttttc

SEQ ID NO: 135212 - DNA, 1117 bp, Homo sapiens
  misc_feature (1)...(1117): n = a,t,c or g
ccatggaatagatgatgagttggtcctctgcagagaagggacccgaagggcacaggcgaagggagtggccaatgccagtgggaagatgagccatgaaaccagaatggggagtccagaaaaaaagagagaaaagagaaaagaagaaaagagacatgagaggagaggagaggtgagaaaagagagaagagagaaaagaaaaggagaagggagggaaggatgtccatatcttttgcgaggaggtacagcatactctagagcacgggtccccagtccccaggccacgaaccggtacagctctgaagcaataactgccctccaactgtttaatgagactcaagctcttatgcaagctatagaattgtccaaaggcctccggagagaagaaaccagatgcatgcagtctggtaccaacacagcatccaatgcaacactgttatactgtgcatcagatcttgtgactcttgtggcagacattaccacttgccatggatatccaagttcccaatccttgcaggaactctgggaaaaagcatcaccctcaaatgtggacaagataatgagggccacagagaacacagatgtgctgggtgctccaaaagtatgtgtgtttgtgattcagaatatacacaatgggccaggagcagtggcttacgctggtaatcagagctttgggaagcgaagtttatccccacataatttaaggagtaatgctctcctggcagtggactcagaacctaaattcccccttcttaagccacttgagttttgccctggagtaagcatgacatcagggtgcttgctgcttcctccagtggcccgagctctgtgtgcctttgttgaacaaggttttcgtggagctgaggtgactctcatgaacagagaatacctgtccttcatacagagaagcacccaaatgcaaacatctactttttctggtgttcaaccnagaattcttggaggaggtagactgcaggggatgggctggttgacgattgacttttctcctcaagcatctaaacgtgccctaacgtcttccattatggagctggggccaggtgtcagcaaactggttcagtggcagctggagaacctaaaaaggcattgtgggcctctgtag

SEQ ID NO: 135213 - DNA, 483 bp, Homo sapiens
accaatttcaaatctggtcttctcggcttagcggctgaagactgacactgcccgatcgcctcggaagccccctagaccatcacggatgccgagctttagtataagaagacaggaatgtcaggcctctgagcccaagctaagccatcatatcccctgtgacctgcacatacacatccacatggccggttcctgccttaactgatgacattccaccacaaaagaagtgaaaatggcctgttcctgccttaactgttgacattatcttgtgaaattccttctcctagctcatcctggctcaaaagctcccctactgagcaccttgtgacccctactcctgcccgccagagaacaacccccctttttcctttacctacccaaatcctataaaacagccccacccttatctcccttcactgactttcttttcggactcagcccacctgcacccaggtgaaataaacagctttattgctcacaaaaaaa

SEQ ID NO: 135214 - DNA, 1059 bp, Homo sapiens; identical to SEQ ID NO: 114869

SEQ ID NO: 135215 - DNA, 408 bp, Homo sapiens; identical to SEQ ID NO: 114871

SEQ ID NO: 135216 - DNA, 505 bp, Homo sapiens
caattttaaatcccgtaagtggcctctttttattctcttctccactatccctcaacctctcctcactatccctcaacctctttctcctttcaatcttggcgccacacttcaatctctccattctcttaatttcaattcctttcattttcccactggaaatcgaactgtccaactcgcccggcagccactcccagagcccctggaactctggcccaaggctctctgactccttcccagatcttcttggcttagcagctgaagagtgacactgcccgatcgcctcggaagctttttcccaaacatatcgagcatatctctctctctctctctctctctctctctctcctgagccacctacagctggggatggagtgacacaagcagccctgtggcctccaccactatcactgtgctgggtcagacctgaagccagcacagtgctggcccttgcccaaggtctgttgtcaccactccctgacttctgactatgttcacccaaggccat

SEQ ID NO: 135217 - DNA, 420 bp, Homo sapiens; identical to SEQ ID NO: 134558

SEQ ID NO: 135218 - DNA, 480 bp, Homo sapiens
ctataacaaaatatcataaactgggtggatttcaaacaacagaaattgatttctcacagttctggaggctgggaagtccaagatcaaggtgccagcagattccgagtctggtgagggccccttttttgggtcaatagatgacgtcttcttgctgcatcctggcagccactcccagagcccctggaactctggcccaaggctctctgactccttcccagatgttcttggcttagcggctgaagaccgatgctgcccgatcgccttggaagccccctcaatgcgttctccaaatgcatgaattacaaccaggaaaaaaagaaggttttgatatcctgaactctttgctggtttaacatgtatgtttctgtcacatgtttcaggtgggacagggacagtacccgtgtaacgcagaagaggagcaccaggatggagaaactctagcctcaccgactgtttaggttgtgagagcacacggggcat

SEQ ID NO: 135219 - DNA, 433 bp, Homo sapiens
tcagtgggatggatggggagctagaaaggggatggagtgggaagatgatcttcctctggaatttggccgtcccacagccagtctcctctccgatcgtccccagccaaactcctctcgaggttcagatgttccctttcttctctccttctctgccttgccactcttctgcttgtctggcagccactcccagagcccctggaactctggcccaaggctctctgactgactccttcccagatcttctgggcttagcggctgaagactgactgcccgatcccctcggaagccccctagaccctcacggacgccgagcttcgggtaactctcacagtggaaggtaagtccatcccctttggtgctggcaaggaggtaacattggaaagttactgggtttctttgaccctcagtttcctcatttgttatatgattatac

SEQ ID NO: 135220 - DNA, 411 bp, Homo sapiens
  misc_feature (1)...(411): n = a,t,c or g
acgtcatccatgtcacaactcattgtgttttctttatatagataactttgctcactttagcacaaatatggaagtcaagtacaagcatatactcatttgcatagcaaattttaaagggggcattgaaatagtaaccaattgataaaggtatnnnnnnnnnnnnnnnnnnnnnnnnnnnnnnnnnnnnnnnnnnnnnnnnnnnnnnnnnnnnnnnnnnnnnnnnnnnnnnnnnnnnnnnnnnnnnnnnnnnnnnncagnnnnnnnnnnnnnnnnnnnnnnnttgtgatttgttcctgccccaccctaactgatcaatgtactttgtaatctcccccacccccaagaaggttctttgtaattctccccacacttgaaaatgtactttgtgagatccacccctgcccaccagag

SEQ ID NO: 135221 - DNA, 1190 bp, Homo sapiens
atggacacatatagaggaacaacagacactggggcctacctgaagacacgcatgaaatttggtgccgtgactcagatcgggggacctcccttgggagatcaatcccctgtcctcctgctctttgtttcgtgaggaagatccacctacgacctctggtcctcagaccaaccagcccaaggaacatctcaccaattttaaatccgcggctgaagactgacgctgccagttcgcctcagaagccccctaaaccatcacggacgccaagcttcgggtatctctcacagcagaaggtctgctggcaactttgttccttaacccaaagcctgaatactaataatgtgaaaagtctaatgttattcaggccacataactgctttcctcctgaaataccaccttgtaaagatagagaaaatgactgtatagaggtgggaaggccaaaccaaggaattatgtctgacagaagggaagaaatgaccgtggtggccttgtcagaccctgtaggaaaggcctctacccatctagtgaaagtgtctacccagactaagaggcttctgaggcgatcgggcagtgtcagtcttcagctgctaagccgagaagatctgggaaggattcagtcagagagccttgggccagagttccaggggctctgggagtggctgccaggtgagttggacagtccgatttccagtggggtcccgcacagatgggacgcagcttaggaggaatcccgggctgcaggcattccttggcctggtggccagatttctggcacttgtagcaagctccttccagaaaagcgggaaaggggttgggtcgtggaaataaggggttggggtgcagagataagaggtcggggcatggaaataagggattggggcacagagatataagaggttggggtgcagaaataagggattgggccacagagataagaggtcggggcgtggaaataagggactggggcacagagatacgaggttggggtacttgctcctctagaaaagcggacttgccactcagggtgaaggagaaggggttgggtgtttcttgccccccagaaaggcggagaaggggtagagacacagagagaaggggttggggtacttgccccttccccagaaaagcgggacttgccgctaagggtgaaggaccaaggcaggcgtccctgcgtggtctgacacctctgaaac

SEQ ID NO: 135222 - DNA, 1268 bp, Homo sapiens
tcatgggcctctggattggtcatgtggcatcccaaccactagactgagtggggatagctgccacagcaagccccaaccagactggtccttgtgcccatgtgtgggtatgtgagcatttggctgctttactactggagtgggcagagttactgacagtgatgggcccttgtacactggtccttgggcccctggcagccactcccagagcccctggaactctggcccaaggctctctgactccttcccagatcttctcggcttagcggctgaagactgacactgcccgatcgcctcggaagcccccttcctaactctgattttcctcctgtgtgtaatacagtgatctgatattcggtgctgttcagttcttcaaagcgcgccagacgtgctttacctttcgactgacggcctttagtaccttgacgtacccattccagctctttctcaatcgacttacgacgcgccgcttcttgtgaagcttcattaaaaggcccatgaattgaaggaaaacgtttcaaccgtaaccgattttgccaggttacgcggctgcaggcatgcaagctttggcgcttcccagacgctgcgttataccccgagaggtccagaaatcccggaattcctaggacgataaagcgtttaccccgcatccggcattcagcgcaaatgccagatgcgacgctgacgcgtcttatctggcctactttaatgtaatttgttgaaataatgggaatcgtaggccggataaggcgtttacgccgcatccggcaatcggtgcaaatgccagataagacactaacgcgtcttatctggcttaaggtcactgaagagagataattcagcagggcgatatcgttctcgacacccagcttcatcatcgcagatttcttctggctactgatggttttaatactgcggttcagctttttagcgatctcggtcaccaggaagccttccgcaaacaggcgcagaacttcactctcttttggcgagagacgcttgtcaccgtaaccaccagcactgattttttccaacaggcgagaaacgctttccggggtaaatttcttccctttctgcagcgcggcgagagctttcggcagatcggtcggtgcaccttgtttcagcacgatcccttcgatatccagatccaataccgcactaagaatcgccgggttgttgttcatagtcagaacaatgatcgacaggcttgggaaatggcgcttgatgtacttgattaaggtaatgccatcgccgtacttatcgccaggcat

SEQ ID NO: 135223 - DNA, 656 bp, Homo sapiens
ccctcttgctcacccttgacttggaaaaaccagtttctcttttattaggcgggctttcaccatgttgcccagactggtcttgaactcctgagcttaagcaatccacctgcctcggcctcccaaagtgttgggatcacaggcgtgacaggcgcatccggcctcatgttctttttcattaaagagagaaatcaactattcaggaccggcccccacctttccctcaggagtcatttcctgttccgcaacaggccctgctgaactgggtgcctttatataggatttcagtggagtgaaagttcaggaggccatggagctgacaacccatgaggcctcggcagcccaccgcccacccaccgccgccgccaccaccgtaacaacagcagcagcagcagcagcagcagcagcagcagcagcagcagcagcaagagttaactctgatttagggattagagacagccagagagaaatgtgatcaatgaaggagacatctggagtgtgcgtgcttcttcaaagggacgggtgatgggcagattggaaaaagccccgcagatgggaaccttaatctttcttttctaaaattgatgctatgaaaatttgcgttttctgtaacttgtaaaaactaaaagttgcttgtctactgaaaaaaaaaaaaaaaa

SEQ ID NO: 135224 - DNA, 724 bp, Homo sapiens
  misc_feature (1)...(724): n = a,t,c or g
atttttggtcagcctcatgctgcctccagcagtggtgatgttaaaccattgctattcattgatttttacaaatgctctggtgaaaaggttgtttgcatggaacatgctctcagagcttgctacatgtgccggaaatctggccactgggccaaggaatgcccgcagcccgggattcctcctaagctgtgtcccatctgtgcgggaccccactggaaatcagactgttcaactcacctggcagccactcccagagcccctggaactctggcccaaggctctctgactgactccttcccagatcttctcggcttagcgactgaagactgacacagcccgatcgcctcggaagccccctgggccatcatggacgccgagcttcgggtaactcttacagtggaggacaggaannnnnnnnnnnnnnnnnnnnnnnnnnnnnnnnnnnnnnnnnnnnnnnnnnnnnnnnnnnnnnnnnnnnnnnnnnnnnnnnnnnnnnnnnnnnnnnnnnnnnagnnnnnnnnnnnnnnnnnnnnnnnttgtgatttgtttctgccccaccctaactgatcaatgtactttgtaatctcccccacccttaagaaggttctttataatgtcacccacccttaagaagtttctttgtaattctccccacccttgagaatgtactttgtgagatccatcccctgcccccaaaacattgctcttaactctactgcctatccca

SEQ ID NO: 135225 - DNA, 723 bp, Homo sapiens
tagacgctcctttttattaggccccagtctcattccagacaccagaccaacttagactgtggcccaaaaaacttgtcatccctactatcttctgtctagtcatactcctattcaccgttctcaactactcatacatgccctgctcttgtttacactgccggtttacactgtttctccaagccaatcacagctgatatctcctggtgctatccccaaaccgcccaccactcttaactccctcttaaagtaaataaataatctttactggcagggctatgctgaacctccttgggcactcatctaatcagatatcctgagtcgtcccaattcttagaccttttatacctgtttttctcctcttattcggaccttgtgtcttccgtttagtttttcaattcatccaaaaccggtatccaggccatcaccaatcattctatatgacaaatgtttcttcttacatccccacaatatcaccctttaccacaagacctcccttcagcttaatctctcccactctaggttcccacgctgcccctaatcccacttgaagcagccctgagaaacatcgcccattctctctccctaccacccctcaaaaattttcaccaccccaacacttcaacactattttgttttatttttcttatgtaatataagaaggcaggaatgtcaggcctctgaggcccaagccaagccatcgcatcccctgtggacttgcgcgta

SEQ ID NO: 135226 - DNA, 2187 bp, Homo sapiens
  misc_feature (1)...(2187): n = a,t,c or g
tcaacaagtggcctgacccttgaagggtttcttcaccgtgtctggtaaagtttccaaattagttacaggaaactcaatacctcgcacataagcccattccttcttctttgtttggtttattccataggcaatggagcccccaatttgtttttcaactggcacagagtcgatgctcatggaatgatacgtgatggggagagtgagtaagtgaatgaatgaatgaatgctattcctgtagcgagcccatgcatggtttgttctctgatcgtgcatgtgcttggctctagacccatgtaaccatggtgaaggccaccaaccagatttcagtggagtgaagttcaggaggcatggagctgacaaccatgaggcctcggcagccaccgccaccaccgccgccgccaccaccgtagcagcagcagcagcagcagcagcagcagcagcagcagcaagagtaactctgactggcagccacttccagagcccctggaactctggcccaaggctctctgactccttcccagatcttctcagcttagcgactgaagattgacgctgcccgatcgcctcggaagtcccctggaccatcacagaagccgagcttcgggtaactctcacagtggagggtaagtccatcccctgtttaatcgatacgggggctacccactccacgttgccttcttttcaagggcctgtttcccttgcccccataactgttgtggggtattgacggccaagcttcaaaacccctggaaaactcccccactctgggtgccaattgggacaacactcttttatgcactcttttttagttattccccacctggncccattttccttattaggggccgaaatattttaaccaaattatctggcttccctgactattccggggagtacagctaacatctcattggtggccttttttcccaatccaaagcctcctttgtgtcctctaacatccccacaatatcaccccttaccacaagacctcccttcagcttaatctctcccactctaggttcccacgccgcccctaatcccacttgaagcagccctgagaaacatcgcccattctctctccataccaccccccaaaaattttcgccgctccaacacttcaacactattttgttttatttgtcttattaatatcagaaggcaggaatgtcaaggcctctgaagccccaggccagggccatcgcatccccctgtggacttggcacgtgtaacatccaggatgggcctggaagttaactggaaggttccacaaaaggaaggtaaaaacagcctttaacttgatggacatttccaccattgtggatttgttttcctggccccaccctaactgattcaatgtactttgtaatctccccccacccttaaggaaggttctttgtcattctccccacccttgagaatgtactttgtgagatccatcccctgcccaccagagaacaaaccccctttgattgtaattttttattaccttcccaaatcctataaaacagccccacccctatcttccttcactgactctcttttcggactcagcccaccggcacccaggtgaaataaacattttttattgctcacacaaagcctgttcggtggtctcttcacacagacgcgcatgaaatttggtgccgtgactcagatcggcggacctcccttgggagatcaatcccctgtcctcctgttctttgctccatgagaaagatccacctacaagctcaggtcctcagaccgaccagcccaaggaacatctcaccaattttaaatcggagaaaaaggagacacgttttatccgtggacccaaaactccggcaccggtcatggactagggaaggcagccttcccttggtgtttaacctttgcagggatgcctctctgattattcacccaggtttcagaggtgtcagaccacgcagggacacctgccttggtccttcacccttagcagcaagtcccacttttctgggggaaggggcaagagcttgctacaagtgccagaaatctggccaccaggccaaggaatgcctgcagcccaggattcctcctaagctgtgtcccatctgtgcgggaccccgctggaaatcggactgtccaactcacctggcagccactcccaaagcccctggaactctggcccaaggttctctgactccttcccagatcttcttggcttag

SEQ ID NO: 135227 - DNA, 288 bp, Homo sapiens
  misc_feature (1)...(288): n = a,t,c or g
cctgacagccctgctcaggaagtctctggatcctaggctcatctccacaggggagaacacacagacagcagagaccatgggacccctctcagcccctccctgcactcagcacatcacctgggaaggggctcctgctcacagcggagactcccaagccctccatctccagcagcaacttaaaccccaggggaggtcatgggaggctgtgcgctttaatcttgttgatccttgaggactccggattncaagcttaccttgtgggtttgcttgaatggntcaggaaccttc

SEQ ID NO: 135228 - DNA, 324 bp, Homo sapiens
atcattccttgcactctgctctatctttagaggtcactggttcaacgaagctgcccaagccctacatcaccatcaacaacttaaaccccagggagaataaggatgtcttaaacttcacctgtgaacctaagagtgagaactacacctacatttggtggctaaatggtcagagcctcccggtcagtcccagggtaaagcgacccattgaaaacaggatcctcattctacccagtgtcacgagaaatgaaacaggaccctatcaatgtgaaatacgggaccgatatggtggcatccgcagtgacccagtcaccctgaatgtcctct

SEQ ID NO: 135229 - DNA, 552 bp, Homo sapiens
catcacttttaaacttctggaacctgcctatcactgctcaagtcacgattgaagccctgccacccaaagtttccgaggggaaggatgttcttctacttgtccacaatttgcctcagaatcttgctggctacatctggtacaaaggacaactgatggacctctaccattacattacatcatatgtagtagacggtcaaataaatatatatgggcctgcatacactggacgagaaacagtatattccaatgcatccctgctgatccagaatgtcacccgggaagacgcaggatcctacaccttacacatcataaagcgaggtgataggactagaggagtaactggatatttcaccttcaacttataccacacaagctacctgtggtggatgaatggtcagagcctccctatgactcacaggttgcagctgtccaaaaccaacaggaccctctttatatttggtgtcacaaagtatattgcaggaccctatgaatgtgaaatacggaacccagtgagtgccagccacagtgacccagtcaccctgaatctcctcc

SEQ ID NO: 135230 - DNA, 435 bp, Homo sapiens; identical to SEQ ID NO: 132668

SEQ ID NO: 135231 - DNA, 1952 bp, Homo sapiens
ggggggccgtgcggacctggggaagaggattccaaacagaaaaatgccaagcatcacttttaaacttctggaacccgcctaccactgcccaagtcacgattgaagccgagccaaccaaagtttccaaggggaaggacgttcttctacttgtccacaatttgccccagaatcttgctggctacatctggtacaaagggcaaatgaaggacctctaccattacattacatcatacgtagtagatggtcaaataattatatatgggcctgcatacagtggacgagaaacagtatattccaatgcatccctgctgatccagaatgtcacccgggaggacgcaggatcctacaccttacacatcgtaaagcgaggtgatgggactagaggagaaactggacatttcaccttcaccttataccgtcattccttggactctgctctatctttagaggtcactggctcaagtcagccactatgagacacctgggaaaactgccccaccttgtggctccactgcctgatgactgaactgacctccggacttgactctgttctcccctgtgttatttctgctgaagtacccagtcccaggtcaggctttccagtatccaaagggtttaaagacaattggaagttccatcacccatctctaggatgtccttggcaagggaagctgcagagaaaacatacctcgggcggcaaagtaagactgaaactaagaagattccagcactgcatgctccaagtgaggaccacaagtggagactcccaagccctccatctccagcagcaacttataccccagggaggacatggaggctgtgagcttaacctgtgatcctgagactccggacgcaagctacctgtggtggatgaatggtcagagcctccctatgactcacagcttgcagttgtccaaaaacaaaaggaccctctttctatttggtgtcacaaagtacactgcaggaccctatgaatgtgaaatacggaacccagtgagtgccagccgcagtgacccagtcaccctgaatctcctcccgaagctgcccaagccctacatcaccatcaacaacttaaaccccagggagaataaggatgtcttagccttcacctgtgaacctaagagtgagaactacacctacatttggtggctaaatggtcagagcctcccggtcagtcccagggtaaagcgacccattgaaaacaggatcctcattcttacccagtgttcacgagaaatgaaacagggaccctattcaatgtgaaatacagggaccgatatggtgggcatccgcagttacccagtcaccctggaatgtcctctattactacaaagcatagcgggctctatgcttgctctgttcgtaactcagccactggcatggaaagctccaaatccatgacagtcaaagtctctgctccttcaggaacaggacatcttcctggccttaatccattatagcagccgtgatgtcatttctgtatttcaggaagactggcagacagtggctttcattcttcctcaaagtatttacccatcagctacagtccaaaattgctttttgttcaaggagatttatgaaaagactctgacaaggactcttgaatacaagttccctgataacttcaagatcataccactggactaagaactttcaaaattttaatgaacaggctgatacttcatgaaattcaagacaaagaaaaaaacccaattttattggactaaatagtcaaaacaatgttttcataattttctatttgaaaatgtgctgattctttgaatgttttattctcccagatttatgcacttttttttcttcagcaattggtaaagtatacttttgtaaacaaaaattgaaacatttgcttttgctccctaagtgccccagaattgggaaactattcaggagtattcatatgtttatggtaataaagttatctgcacaagttc

SEQ ID NO: 135232 - DNA, 2321 bp, Homo sapiens
gaattcgggctgaccctgcccatgagcttgagaattgctcctgccctgggaagaggctcagcacagaaagaggaaggacagcacagctgacagccgtgctcagagagtttctggatcctaggcttatctccacagaggagaacacacaagcagcagagaccatgggaaccctctcagcccctccctgcacacagcgcatcaaatggaaggggctactgctcacagcatcacttttaaacttctggaacctgcccaccactgcccaagtcacgattgaagcccagccacccaaagtttccgaggggaaggatgttcttctacttgtccacaatttgccccagaatcttaccggctacatctggtacaaagggcaaatgagggacctctaccattacattacatcatatgtagtagacggtgaaataattatatatgggcctgcatatagtggacgagaaacagcatattccaatgcatccctgctgatccagaatgtcacccgggaggacgcaggatcctacaccttacacatcataaagggagatgatgggactagaggagtaactggacgtttcaccttcaccttacacctggagactcctaagccctccatctccagcagcaacttaaatcccagggagaccatggaggctgtgagcttaacctgtgaccctgagactccagacgcaagctacctgtggtggatgaatggtcagagcctccctatgactcacagcttgaagctgtccgaaaccaacaggaccctctttctattgggtgtcacaaagtatactgcaggaccctatgaatgtgaaatacggaacccagtgagtgccagccgcagtgacccagtcaccctgaatctcctcccgaagctgcccaagccctacatcaccatcaacaacttaaaccccagggagaataaggatgtcttaaacttcacctgtgaacctaagagtgagaactacacctacatttggtggctaaatggtcagagcctcccggtcagtcccagggtaaagcgacccattgaaaacaggatcctcattctacccagtgtcacaagaaatgaaacaggaccctatcaatgtgaaatacgggaccgatatggtggcgtccgcagtgacccagtcaccctgaatgtcctctatggtccagacctccccagaatttacccttcattcacctattaccgttcaggagaagtcctctacttgtcctgttctgcggactctaacccaccggcacagtattcttgggacaattaatgagaagtttcagctaccagggacaaaagctctttattccgccatattactacaaagcatagcgggctctatgttttgctctgttcgtaactcagccactggcaaggaaagctccaaatccatgacagtcgaagtctctggtaagtggatcccagcatcgttggcaatagggttttaggtggagtctatctggcattcagagaagagtcaggaaaacaattgtattcccagcctgtgtcccatgggcacaagcaaatcccaaattctcctcctgaaccctccaaatttgtctaagaacttcgaaaactttaacaaacaggctgatatcttcataatattcccagcctagaccaagcaggaagaacattgatttcattgaaataattgataataatgaagataatgtttttatgatttttatttgaaaatttgctgattctttaaatggtttgttttctacattgatggaatttttctcttaattaatctatctacagcttatagcagttcaataaactatacttctgggaaccgtaattgaaacatttacttttgctttctacctgactgccccagaattgggcaactattcatgagaattgatatgtttatggtaatacacatatttgcacaagtacagtaacaatctgctttctttgtaacatgacacatttgaaatcattggttatattaccaatgctttgattcggatgttatattaaaaacatagatagaatgaatgaaccaatatgaactgcaggcaaagtctgaagtcagccttggtttggcttcctattctcaagaggtttgtgaagatttaatctcagattccttataaaaacttagagaaaagaaaattttagaagacagcctacatggtccattgctactcttgctgcacttatgtaaacaatcagaccacatttgaagaaactccacctattttgcaaacaaacttattctactgaaattatcattggtaaaagtagagatgcccatagagggaaaaattatgtggaaaataaaaactgtagtatacctgtacccgaattc

SEQ ID NO: 135233 - DNA, 1888 bp, Homo sapiens
ggacagcacagctgacagccgtgctcagagagtttctggatcctaggcttatctccacagaggagaacacacaagcagcagagaccatgggaaccctctcagcccctccctgcacacagcgcatcaaatggaaggggctcctgctcacagcatcacttttaaacttctggaacctgcccaccactgcccaagtcacgattgaagccgagccaaccaaagtttccgaggggaaggatgttcttctacttgtccacaatttgccccagaatcttaccggctacatctggtacaaagggcaaatgagggacctctaccattacattacatcatatgtagtagacggtgaaataattatatatgggcctgcatatagtggacgagaaacagcatattccaatgcatccctgctgatccagaatgtcacccgggaggacgcaggatcctacaccttacacatcataaagggagatgatgggactagaggagtaactggacgtttcaccttcaccttacacctggagactcctaagccctccatctccagcagcaacttaaatcccagggagaccatggaggctgtgagcttaacctgtgaccctgagactccagacgcaagctacctgtggtggatgaatggtcagagcctccctatgactcacagcttgaagctgtccgaaaccaacaggaccctctttctattgggtgtcacaaagtatactgcaggaccctatgaatgtgaaatacggaacccagtgagtgccagccgcagtgacccagtcaccctgaatctcctcccgaagctgcccaagccctacatcaccatcaacaacttaaaccccagggagaataaggatgtcttaaacttcacctgtgaacctaagagtgagaactacacctacatttggtggctaaatggtcagagcctcccggtcagtcccagggtaaagcgacccattgaaaacaggatcctcattctacccagtgtcacgagaaatgaaacaggaccctatcaatgtgaaatacgggaccgatatggtggcatccgcagtgacccagtcaccctgaatgtcctctatggtccagacctccccagaatttacccttcattcacctattaccgttcaggaggaagtcctcttacttgtcctgttctgcgggactcttaacccaccgggcacagtattcttggacaattaatgaaaagtttcagctaccaggacaaaagctctttatccgccatattactacaaagcatagcggggctctatgtttgctctgttcgtaactcagccactggcaaggaaagctccaaatccatgacagtcgaagtctctgcttatagcagttcaataaactatacttctgggaaccgtaattgaaacatttacttttgctttctacctgactgccccagaattgggcaactattcatgagaattgatatgtttatggtaatacacatatttgcacaagtacagtaacaatctgctttctttgtaacatgacacatttgaaatcattggttatattaccaatgctttgattcggatgttatattaaaaacatagatagaatgaaccaatatgaactgcaggcaaagtctgaagtcagccttggtttggcttcctattctcaagaggtttgtgaagatttaatctcagattccttataaaaacttagagaaaagaaaattttagaagacagcctacatggtccattgctactcttgctgcacttatgtaaacaatcagaccacatttgaagaaactccacctattttgcaaacaaacttattctactgaaattatcattggtaaaagtagagatgcccatagagggaaaaattatgtggaaaataaaaactgtagtatacctgttatgagactgc

SEQ ID NO: 135234 - DNA, 1713 bp, Homo sapiens
cacagaaggaggaaggacagcacagctgacagccatgctcagacagcttctggatcctaggctcatctccacagaggagaacacgcaggcagcagagaccatggggcccctcccagccccttcctgcacacagcgcatcacctggaaggggctcctgctcacagcatcacttttaaacttctggaacccgcccaccactgccgaagtcacgattgaagcccagccacccaaagtttctgaggggaaggatgttcttctacttgtccacaatttgccccagaatcttcctggctacttctggtacaaaggggaaatgacggacctctaccattacattatatcgtatatagttgatggtaaaataattatatatgggcctgcatacagtggaagagaaacagtatattccaacgcatccctgctgatccagaatgtcacccggaaggatgtcaggaaccttacaccttacacatcatcaaagcgaggtgatgagactagagaagaaattcgacatttcaccttcaccttatacttggagactcccaagccctacatctccagcagcaacttaaaccccagggaggccatggaggctgtgcgcttaatctgtgatcctgagactctggacgcaagctacctatggtggatgaatggtcagagcctccctgtgactcacaggttgcagctgtccaaaaccaacaggaccctctatctatttggtgtcacaaagtatattgcaggaccctatgaatgtgaaatacggaacccagtgagtgccagtcgcagtgacccagtcaccctgaatctcctcccgaagctgcccatcccctacatcaccatcaacaacttaaaccccagggagaataaggatgtcttagccttcacctgtgaacctaagagtgagaactacacctacatttggtggctaaacggtcagagcctccccgtcagtcccggggtaaagcgacccattgaaaacaggatactcattctacccagtgtcacgagaaatgaaacaggacccctatcaatgtgaaatacgggaccgatatggtggcatccgcagttacccagtcaccctgaatgtcctctatggtccagacctccccagaatttacccttcattcacctattaccgttcaggagaaaacctcgacttgtcctgcttcacggaatctaacccaccggcagagtatttttggccaatttatgggaaagtttcagcaatcaggacaaaagctctttatcccccaaattactagaaatcatagcgggctctatgcttgctctgttcataactcagccgctggcaaggaaatctccgtgagtcttttcaggcattaatgagcgtgcacatagagatagcggtcgcgagtatcaggcatgactgcgcctcctgagacactgagaaaacgcccaggctgataccttcatgaaattcaagacaaagaagaaaaaaactcaatgttattggactaaataatcaaaaggataatgttttcataattttttattggaaaatgtgctgattctttgaatgttttattctccagatttatgaactttttttcttcagcaattggtaaagtatacttttgtaaacaaaaattgaaatatttgcttttgctgtctatctgaatgccccagaattgtgaaactattcatgagtattcataggtttatggtaataaagttatttgcacatgttccgta

SEQ ID NO: 135235 - DNA, 2212 bp, Homo sapiens
  misc_feature (1)...(2212): n = a,t,c or g
atgacccagttccctatggataaacgtcagggtcgttcccgatctgtggccatcaccaacactgccgtgactagtctagaatgggtgccatttcatgcatttgcaattcccagaagtacactggttagtcagcagaggctcagcacagaaagaggaaggacagcacagctgacagccgtgctcagagagtttctggatcctaggcttatctccacagaggagaacacacaagcagcagagaccatgggaaccctctcagcccctccctgcacacagcgcatcaaatggaaggggctcctgctcacagcatcacttttaaacttctggaacctgcccaccactgcccaagtcacgattgaagccgagccaaccaaagtttccgaggggaaggatgttcttctacttgtccacaatttgccccagaatcttaccggctacatctgggtacaaaggggcaatgaggggacctctaccattatgttacatcatatgtagtagacggtcaaataattaaatatggggcctgcatatagtggacgagaaacagcatattccaatgcatccctgctgatccagaatgttcacccgggaggaccgcaggatcctacaccttacacatcataaagggagatgatgggactagaggagtaactggacgtttcaccttcaccttacacctggagactcctaagccctccatctccagcagcaacttaaatcccagggagaccatggaggctgtgagcttaacctgtgaccctgagactccagacgcaagctacctgtggtggatgaatggtcagagcctccctatgactcacagcttgaagctgtccgaaaccaacaggaccctctttctattgggtgtcacaaagtatactgcaggaccctatgaatgtgaaatacggaacccagtgagtgccagccgcagtgacccagtcaccctgaatctcctcccgaagctgcccaagccctacatcaccatcaacaacttaaaccccagggagaataaggatgtcttaaacttcacctgtgaacctaagagtgagaactacacctacatttggtggctaaatggtcagaagcctccgggtcaagtcccagggtaaagcgaccccattgaaaaacaggatccctcattcctaccccagtgttcacgagaaatgaaacaggacccctatcaatgtgaaatacgggcccgcatatggtgggcatccgcagtgacccagtcaccctgaatgtcctctatggtccagacctcccccagaatttacccttcattcacctattaccgttcagggagnaagtcctcttacttgtcctgtttctgcgggacttctaacccaccgggcacagtattcttgggacaattaattgaaaagttttcagcttaccagggacaaaagctctttattcccgccatattactacaaagcatagcgggctctatgtttgctctgttcgtaactcagccactggcaaggaaagctccaaatccatgacagtcgaagtctctgactggacagttccctgaattctactagtacctccaattccattttctcccatggaatcactaagagcaagacccactctgttccagaagccctataagctggaggtggacaactcaatgtaaatttcatgggaaaacccttgtacgtgaagcatgagccactcagaactcaccaaaatattcgacaccataacaacagatgctcaaactgtaaaccaggacaacaagtggatgacttcacactgtggacagtttttcccaagatgtcagaacaagactccccatcatgatgaggctctcccccctcttaactgtccttgctcatgcctgcctctttcacttggcaggataatgcagtcattagaatttcacatgtagtataggagcttctgagggtaacaacagagtgtcagatatgtcatctcaacctcaaacttttacataacatctcaggaggaaatgtggctctctccatcttgcatacagggctcccaatagaaatgaacacagagatattgcctgtgtgtttgcagagaagatggtttgtatgaagacgtaggaaagctgaaattataatagagtcccctttaaatccacattgtgtggatggctcttgccgtttcctaagagatacattgtaaaacgtgacagtaagactgattctagcagaataaaacatgtactacatttgctaaa

SEQ ID NO: 135236 - DNA, 30274 bp, Homo sapiens
gaattcgggaggtggtacatgttttattctgctagaatgtcttactgtcacgttttacaatgtatctcttaggaaacggcaagagccatccacacaatgtggatttaaaggggactctattataatttcagctttcctacgtcttcatacaaaccatcttctctgcaaacacacaggcaatatctctgtgttcatttctattgggagccctgtatgcaaggtggagagagccacatttccccctgagatgttatgtaaaagtttgaggttgagatgacatatctgacactctgttgttactctcagaagctactacatgtgaaattctaatgactgcattatcctgccaagtgaaagaggcaggcatgagcaaggacagttaagaggggggagagcctcatcatgatggggagtcttgttctgacatcttgggaaaaactgtccacagtgtgaagtcatccacttgttgtcctggtttacagtttgagcatctgttgttatggtgtcgaatattttggtgagttctgagtggctcatgcttcaggtacaagggttttcccatgaaatttacattgagttgtccacctccagcttatagggcttcagagacttcgactgtcatggatttggagctttccttgccagtggctgagttacgaacagagcaaacatagagcccgctatgctttgtagtaatatggcggataaagagcttttgtcctggtagctgaaacttttcattaattgtccaagaatactgtgccggtgggttagagtccgcagaacaggacaagtagaggacttctcctgaacggtaataggtgaatgaagggtaaattctggggaggtctggaccatagaggacattcagggtgactgggtcactgcggacgccaccatatcggtcccgtatttcacattgatagggtcctgtttcatttcttgtgacactgggtagaatgaggatcctgttttcaatgggtcgctttaccctgggactgaccgggaggctctgaccatttagccaccaaatgtaggtgtagttctcactcttaggttcacaggtgaagtttaagacatccttattctccctggggtttaagttgttgatggtgatgtagggcttgggcagcttcgggaggagattcagggtgactgggtcactgcggctggcactcactgggttccgtatttcacattcatagggtcctgcagtatactttgtgacacccaatagaaagagggtcctgttggtttcggacagcttcaagctgtgagtcatagggaggctctgaccattcatccaccacaggtagcttgcgtctggagtctcagggtcacaggttaagctcacagcctccatggtctccctgggatttaagttgctgctggagatggagggcttaggagtctccaggtgtaaggtgaaggtgaaacgtccagttactcctctagtcccatcatctccctttatgatgtgtaaggtgtaggatcctgcgtcctcccgggtgacattctggatcagcagggatgcattggaatatgctgtttctcgtccactatatgcaggcccatatataattatttcaccgtctactacatatgatgtaatgtaatggtagaggtccctcatttgccctttgtaccagatgtagccggtaagattctggggcaaattgtggacaagtagaagaacatccttcccctcggaaactttgggtggctgggcttcaatcgtgacttgggcagtggtgggcaggttccagaagtttaaaagtgatgctgtgagcaggagccccttccaggtgatgcgctgtgtgcagggaggggctgagaggagccccatggtctctgctgtctgtgtgttctcctctgtggagatgagctttttgatggggttgtttgtttttttcttgtaaatttgtttgagttcattgtagattctggatattagccctttgtcagatgagtaggttgtgaaaattttctcccattttgtaggttgcctgttcactctgatggtagtttcttttgctgtgcagaagctctttagtttaattagatcccatttgtcaattttggcttttgttgccattgcttttggtgttttagacatgaagtccttgcccatgcctatgtcctgaatggtaatgcctaggttttcttctagggtttttatggttttaggtctaacatttaagtctttaatccatcttgaattgatttttgtataaggtgtaaggaagggatccagtttcagctttctacatatggctagccagttttcccagcaccatttattaaatagggaatcctttccccattgcttgtttttctcaggtttgtcaaagatcagatagttgtagatatgcggcgttatttctgagggctctgttctgttccattgatctatatctctgttttggtaccagtaccatgctgttttggttactgtagccttgtagtatagtttgaagtcaggtagcatgatgcctccggctttgttcttttggcttagaattgacttggcgatgcgggctcttttttggttccatatgaactttaaagtagctttttccaattctgtgaagaaagtcattggtagcttgatggggatggcattgaatcttcaggacatcccgggggcctcctggctggtgtggggatacaggagtctctcgggaggctccatgatgcagtccttcagaacctccgctgcttccctggagggcaggatgggtggcttctgggtcctgggctcctccacatagagggctcccatctcctccttcctgagcctggcgcttgcaggggagcgggctggcacctgggcacaggtgtagacatggctgaaacgccggcctgaggaggtcaggtaccagtgctggatggcgggctgggggtcgtactccgtgacggccacgccgttcacagctgtcatcatgagcatgttgagcacctcgttggagagcttggtcctctcatcggtcctgattcggttcatggccttgaacccccgctcacagcaagaggtggagatgggcacacagaccaccacggccatgagcttgcttagcagggggaagcggcagtgctgggccagggcgtttttgcagagcatggagaacgggaggtgctgggcaatggttttcaggcccagccactcctccagcagagcttcctcactgtatcctgttgggagggagcactcgaaatacctggccaggttgagaatgtcatcattcccaaaactggcaagttcaatcccacttggccaggccatggtgtcaaacacctccatgttcttcagctgtgggggtcggtctgcgtcaaacctctgctggaggtactcaatccccgtcaggactgtcctctccctatccgcctggaaccgctgttccgctacctccagtttgtccaagcagatgccgtggagccgcccatccttgaagctggcgttgaattcttcctctttgggccctgcctggtgacggaggctctccagtgccacgtaggcgcggcccagcgtggcgttcacctctgtaatcagcacgatctccttctggcacacctcggacagaggcctgtagatgctcaggaagtccaacaggaagtggcagaacttgacaaagtggaagccgcgcatgagcttcagcatccctttggcccggtgcccaatctggcccccagcctctgccaccctctggaggtgcctggccagggcgggccagctcacgagcagcgcgtgcagcgtgcgcctcctgctggccacccagcggaccgcattcagatccttcaggcggatgatctcctgctccagaggcgccgcaccttcctgcagctcgttcagcctcttgtttgaggactgataaaacttgaagacggtgcggatgtgccggtcacacttcttcaccagatcgatgctcccgcaggcgtccaccacagccaggtgcagccggtgggccacgcagtggacaggcagcagctgcgggatgacctcctggaacttttccacaaggcctcctctgcagctcaacatggctgagccatccgtccccagccccaccacccagccaggcttccggaaggggatgtccagctcatccagggcagaaacgatggtctcgaagtacccatctgctgtctcactgtagagaggggccagagtgatgtaggactctttcacctccatctgcttgaagtagcggatgtaaatccccacgcaggcctgctcggaggcgtcggtggagctgtccagcagcacgctcacacagggcgagttccgcacgtcctccaggatctccctcttcagggtctctgagatgtacttgatgaactgagtgcacgccgtgcgattgcggtacttgcctaatatcacggtccccgtgctttggaggagctgcaggatcttctcaaagtcattcaggggccttgagtggtatgcaatggagtaggcggcattgaaaaagtgctccatgttggccatgaggtcgctggagatctctggaacgagggcagtgtgaggggtgtcttccttgatttcaaccgtgttgacacagagcctgtgcgctttgctgacttcatggtattttaaagtctccactttaaaaggccccgtgtaacctctgactaaccgagatgatttatcatggagattaggtctttctatgcaggctgagcagaagagtttggtctctttggggtcaattactaaccatgggaactgcccaaaccatgacctctgaatggaacggggcctgtatgtcctcttgattctcctaggtccatctccttcctcacaaatgctggaactgcagcaggaggcacgggcctccacgggagagcctggaggacgacctttcccccactttggcccatttgggtccttgatccagggtgcagccctccgctccagtttggagatcaagtctggcttggcagcggcaggtcccaaggatgccaacagctcgtagttcatccgcatcacgtctctgtacagctccttctgccgcttgtctagcatgccccactcctcccgggtgaaatacactgccacatcctcgaacaccaccggcagctcctcaaacaccacaggaacctcctccgacagcccctctgcagaagggtcctgaatgcaggattctactgcatcattatataaaatattaatgtctgaggagctgtggatgccatcagtgatttctttttgcctcaaatctgaaatgcagtctagatacattgcaggaattgctccatcccccccagggtcctctagttcagctcttgaacttggcaggagctcagccatgctatcaaatcctcccagaggccctggggggtagaatatggggcaatctgcagtgaagagcggctccgggctggccagaacatctccaggtgggtctctgatgctccggaaccgggctgcccagatggggtccctcgctgccaaggcattgacacagaacatgtgggccttgctcttcgcgtggtatttgagagtctccaccttgaatggtcctgtataaccttctattagtcttgaccgtttgtccctgatggaggggtattctcggcaagcagagcagaacagagccgtctgctcctcattcatgatcagccacggaaactgcacaaaccacgacttctggatggaccggggcttcagaagtttcctgtttcttccggcccagtctccctcgatgtgtccactgcctgtactgaggtgggaaaggtaggctttcttctgaggcgggagggactgtccactctccctggtgggaccttgcacctccatttctcccatgtagcccatctgtttttttcctgggtgatgctccagaaggctcctctggccctggacgctgccaagccatggctctggccctcgtccgaacttgcggaacagctcaggattggcaacagttggtcccagtggtgccaccagcttgttggaaccacagagctccttctgttgctggctcagcagcacccattcctcctggagtaagtacacagtgatgtcatcaaacgtcacaggagccttccccgactctctgggctccatggccccgctttcggaggcccgtgccgccccctccccccgcggcctggcctgaggatgcagccgccgcgaccgccccggggacccaggctcccggagggggagggcacccaggtagggagggagcgcggcccaagaacttcgctctctcacgtcggggggcggtagcgccggtggacccaggataagcgcgctgagctgagacttgcgtcgcaccgagcgaacagctttacggtcactgcccagccccaggcggcggggcgtgacgggaagtgtagtccgctctaggtgagcggctctcgaagctgctattggctcccggaacgcaggtccctggcaggagctgcactggcagctgtggatgaccggcagcaccacgggctctgtgtggccacccagacagcgcaggttcaggatccgcacagggctctccgggtctagacggtagctgcagcagtcacactggctctgcaggtatggctcctctggcatgacatgggtgctggatgggcagtacccactgcagtagctcacttctacctggtccaggtaacaggtccctttggtgaagtttcgaagctccgtgaggagctggcaggagggcgactgctcctccggagcctccctgcggcaagagggacagcagctccctggctccagcaccatctcctcgcccaggtggggacgcccaaggtgccagcactcgcagtggtcttcggggacgcaggggcctgcctggctgcggaagtgcccgggctggcacacgcagcccgaggctcgagctgaactgcagttactctgggtctttgtggcgttcatctccaggcacgtctgctcgcagagccccagctcccccggggccacctgctgccacgtttccccagggggcacctgacagtcaacgagggagcagctgaaggctccaccgtggcagacacagcgggtgcagttccgggtgagcacagtccctgggggcagctcctgggcctgctcttccagggtcagggtgaggccccagggcagagaatgctgccctccagggcagccacagccaggctggcagggctcctgcacacagatggcaccaggctgcagatgccagcagaggcacgggcatgaggtggcacaggcactaagcacctggccaggggggcactcagggcagggctgcaggttacactcctgccgttgctctgtgtcctgggcctggcatggtgccaccccaggacccccctcacaagtccgatgtcgctccatagtgcccccaccacagggggccgagcaactgctccaggctgaccaaggcccaaggactggacactcctggtgtgggcacaccagggactcgttgacacaggtgcagttttggcagtccagctgcaccgcctgggccggggccagctcccaagaggcattggcactggggaggccacagcggcaagaggagatcggcacacagcgcccatcctggaccagctggccagggggacagcggcagcctgggcagggccctccgttgcagctttctgtcttgagcccatggctcccggcagcctcctccacagagggcctctgcctctctccagcgtagcctgaaccccccactgcagggcacctggcaggggctccatggcccccacagactccactggcatgagtcagggcaggctccagggtcagggcagaggcgctgctggctgaggggtgcggtgcagaggtgaggggctccagtccagggcctccctgtcgcaggatccagacagagccggtggcggtgctgctctggaaggacagggtgtgggtgcccttcccagtgaccacccctgggcccagagacccttgacagccctggctggtgcagtgcagctccccacgccggcattcacactccttacagcccagctgcaggcggtccccaggggccagggtcatcccggctcctgctgctgaggtatgccagcagttacactcctctgggggaatgcagcccccagcctgctccagcagccccttggggcagtagcagcccggctggcagggtggcaggtcctggcagagctgatggctcaggtgtgtggcacagagcccagcacagggggagccgcaggcatggaactcaaagggaggcgtgcagctgtcctcagagcagttgctgataaggcaaggccggaagtggccatccagccgcgtgcagggggcgcctgccctggcccctcgggacgccgggccctggtgtcggtagcgctgctgcaccagcacccggcaagagcagcgcgtccagctgctccagctgctccacacacactcctctgggcagggccctgagtagcagccctgggtgtccaggtggaggaaggtgctgttgcaggtggggtcggccttggccatcaggcaggggcaggacccagagcgagaggccaggcccgggccgcagcaccgctggcactccccctgcagccagctgtcccccagggtgcgggagcgagtgccctgcaggcacaggggtgggcacgagggctgagggcagggctggctctgggactgctcctcccgacactctggggcccacgagcccgacgtggaggaccggaagcggctctgctgccctctgggcccgcatgagtggctgcagggactccaggccgaccagtggctccaggcacagtgggtgggaggcgggcagggctgagccgtgcaggagagctgcccagcttggcatgagcagttgttgcaggcatcctggtgctggctccccggggcccagctgtggccctgggcatcggtgcagtcacagtgcccaattggcacgcagccaccatcctgctccagggacccctttgggcagcggcagcccttctggcagacctggtcgtcctgacacacaattccctcctggaggtctgagcagcggcgggggcagcggttggcacaggtgaccacctccatgcctgctgggcagccggcctctgggcaggctcgcaggttgcagaagcggcgctcttggtaggcagtaaggatgttggggcaccagtgcccgccgggcccagggggacggtatgcccgcaggcggcgctgctggcccactccgcagctgcgggagcaaggttcccacggggcccaggaggtccaggaacagttcccagccccacagccagggccagggcacacgggcagctcactgagggtgggcatggtgagcacacactggcggctgcgggtacgggtgcccagccctccacaggagcgggagcacgggccccacgggctccagggaccgaaaccaccatcggcctcgaagcagtcgtccagggagcaagacagcttcccgtgtgcacacgagcagttgccacagcttgtacgaagtgtctggcctgagtccagctcatctccaggcccgaggggctgaccagggtcacctatggtggctcccagctcctgcagcagccaggctgtcagcacacaagggcactcctgcacacaggccaggcggtgctggaaggtgccctcggggcagtggcagccctcctcgcagccctcagagaagcagcccacctgctgcgtgacgtgggcgcaggagaaggggcatccctcgccgggctggcattcacggtacaggcggccagccgggcagcctgcctctctgcagacctgtgtgctgcatgtgcggctctggcgggcaggccctgggcagggaggacgagcacagcgccgggagcgcagctgctccccgcccccacacgaaacactgcagtcttcccaagggccccaagagctccacaccccagggtccgggcagtcaggcacctcctggcattgcagaatgcctgccacacaggtgcagttgtcacatggcccagtgaccacctctccgggttccaggctctcccaggagctaaacctagaccctgctgagcggctctggttctcagggatccccatggctccaggctggtactggcagcggcagtgggctgggggcacgcacagcccgtcctgggagagctggcccagggggcacccacaagtgggctggcagcccacagagcctggctggcacacactcccaggggacaggtcctggcaggagcgggggcagggctgcccacagggatgcagactctggccacccccgcagtctgggcagggcaggtctgtgcagttcagcctcccctccaggcaggtgcagtggttgcagccgtcaggccttgccagccgagcacccggatggtgccgctgcccggtcagcaggtccaggcagctgcagtgacccggctgcacgcagatggccccgttggaactcagtacctggcctggtgggcagtagcagccaggctggcagcgccacacgcagtgcactaggtcatcacaggagcgagggcacggagggccacaggggctatactcggccccttcaatggcagtgcagttggtcactgggcagggcagagcctggcagacctccccctgtgcccgtggcccctcgcagtaatcccccaggccctggggtgggggctggtcacaggcccgggtccggctccgcaggcctcccccacagctccggctacagtgggaccagggcccccatggaccccatcccccagctcctggcacagaaccggtgccgatggcaccgggcagggccacaggaggctgaacactggctccaaggggtccagggtgaccacgtgggctcaccctccgcacaaggccaggagctgcagttggcgatgagcccggagacacaggagcaacaccttgatcctgggcttccaggatctgtgagaccatcaggggccgctgctctagctccccagtgcatggcactcggtggcagcagccccaggaggctggacatggccgcaggctgcagaattcagcctccatggtggggccttggcactcagcacccccaaaggcagctgggggtgcagtgcctgcccggaagcggcgccgaatgcccacgttgcagcagttgttgcaggagtccaggcgagccattgctcctgatgcatagagctgcccgtgcagctggcaggggcactggctgcggggcaggcagctagcattgtgcaggaaaagaccaggggggcaggtgcagccgggggcgcagaagcccgtacactctatctgggcatacaggggggctgcagggctcctcctgggtggcatctcctgggcaggatgaatccccagggctggggcagagtcgggaacgactgcgccagccagggccccctcccggggcaaggcagctttgggagcaggaggaccaggaagtccagggcgtccagccgaacaccttccagagccacaggagcggtcgcagggagcccaggaggaccaggctgaccagccgcagggcagggggcagccccctggttggcacagcaactcccccttctcacacacgcattggctgcagttgcccaggaggaaggacacccctggccacttcagctcttcgcccaccaggcaggggcactcagagaggggcaggcagcgagtgtcatgcagaaggagccccgggggacagcggcatccttccacacaatgcccactgcagcttctgttggccttgggatccaggcaggagggtgggcatgggggcaccagccccttctggcacagatcggcactcacatacacacggcccagctcgcagtctgggcaggcctgcacaaagcaggactggcttcggaaccggtcacgcgggcagctgccccctggcagaggaggccgcagcagctcctggcgctggaaggtgaggcccaggccacagctgcggctgcagctgctccagacagaccagggggccagcacgcagtccacacagccatcctcgtccgagccatcctggcagtcaggccgcaggtcacagcgccgctcagcagacagacactccccgctgccacagctcagctggctcggggaacagagggcccttgaggcgcagtgcctctcgtcggagccgtcgaggcaatcctccctgccatcacacacctgcgcctgttccacgcagcccagcacctcacagggcgtctggccggggccacactgcacaggtgggaagggtcctggggcgacgctctggccagcaggggtcgctggagtcacagggtgtgggggcaccaccgtcacagctgccatacctggtggcagggtcctggcctccatctggggtatgggggtggtggtcaccatctgcacagattccccatggtgaggcaccccggaggctgggccaggactcacgggccttgtctctgtcggggacgtgggggattcctgcccagggggccagtgctcagtctctgccaggccctccctgggccagtgcagcagctgccccggctgggcagaggagagggccagggtcttggctgtggaatggaatctgccagtgccctcaggcagcaacacacagccctcctcatccgagccatcctcgcagtccagaacaccgtcacaagggccccctctcaggacacactcaccactggcacagcggagtccaacccctggctcgcagcccagcagctccacctgcagggggacatcgctgtggtggacatcgtggggccacaccctgacaaacctcgcctgcaccatgcggccgaaagtccatacggcagggtccaggtcatcccagtttctggggaaaagcaggtattcaacaagcatcgaatgcaggccatgcccctcggggacactggaaggcccttggggacaaagactatggaacccacaaaagggcatggtgggctgctggccccatcggccttgggcgggtgataccttgggcaggggcaagatgccaggcaggaggtcacgatagtcatgccagtgtagaccattgctgctgaactggagtgagaagctgctggcatatgcgttggaggagccagtctccggcactaggatgccagtgaggttccgaggctgaagcaggtccagctgcaggtaatggggccgagtgtgccacttggcataagcatcccctccagcgtgccatccctgagggctgggcccctgggtgggagcccccaggagggcagcctgggtggggtgttccagctgctgggacgatgcatgcagactcccctcagccagtccggccagccccaggggagaatagcaggggtctcctgacggaggcagaatgtaagtggccaaagggaatctgatctggggactgggagccggagctgcggcaggagtggccatgggctggaccgtctggttctctccaggtagggcacagtggcagcatgattctcccgtcccctccaccaagacccagccctgggggcagctgccgagcgggcagtagggtgagcagtgtgcggtgaggttgtgcagacactggcacaccctgcaggggcccccatgccagcgttccccgacacggtggacctggccctgatgctcacacccctcacagggctccgtctggcacctgcgtgccttgcggtggatgccacggcactggcgacctcggccggaggggcgggggttgttggagctccggaaggaccactggatgctctggcttccacaggggcccaggcacttggcccagggtgaccaggaggaccagccacagtccacagcgcagtccgggttgagtcggcagcgtcggggccgtccgtcttggcagatgcagagctggcagtcggccttgatgcgttgcccaggccagtagcgggcaccgtccaccaggcaggggcactgccggggccacacacaccacccctcgctgcccagcacctgcccttctgggcaccagcagcccgggctgccgcagggccaatcaggtgggcacgtgacctggccagagatgtcatcacaggtcagtgggcagggggcacagggctggaacatcagctccccagagcaagtggcattggggcagccgtcctgagggcaaggcttggtctggcgggtgctgtgcaggcctccgggcagtgcagcacaggtgcggcccccattctggggtgagtggcactgccgttgccgcgtcatggtgcccctgcacggctcagagcacacagaccagggggaccaggtgctccattcaccgtccactgggcaggctgccgtgaagcaggcctgagactggtgctcaggccctgggcagttctgtagcaccaggaggccgagtggggagcagcggcggctccggccctggccccagggcccacacgtccggctgcagggcccccatgggctccaggggccccaggccccacaaccctgctcttctggggaggggcccacctgccctggccttccacagtcaggctgcccatcacacaccagctggaagcctatgcaggtgccattggggcaggtgtattctgggcagggaagccctgtcctgttggggcctcccagggctggcagccccccgcagtccagctcgtcctcgccctggggacagtctgggatcccatcacagagctgctcaggggtcaggcacagccccggagccacaccacagggaaagaggccagggcacagaggcagctgggtggagcctgcgggcacttcaggacatcccgggggcctcctggctggtgtggggatacaggagtctctcgggaggctccatgatgcagtccttcagaacctccgctgcttccctggagggcaggatgggtggcttctgggtcctgggctcctccacatagagggctcccatctcctccttcctgagcctggcgcttgcaggggagcgggctggcacctgggcacaggtgtagacatggctgaaacgccggcctgaggaggtcaggtaccagtgctggatggcgggctgggggtcgtactccgtgacggccacgccgttcacagctgtcatcatgagcatgttgagcacctcgttggagagcttggtcctctcatcggtcctgattcggttcatggccttgaacccccgctcacagcaagaggtggagatgggcacacagaccaccacggccatgagcttgcttagcagggggaagcggcagtgctgggccagggcgtttttgcagagcatggagaacgggaggtgctgggcaatggttttcaggcccagccactcctccagcagagcttcctcactgtatcctgttgggagggagcactcgaaatacctggccaggttgagaatgtcatcattcccaaaactggcaagttcaatcccacttggccaggccatggtgtcaaacacctccatgttcttcagctgtgggggtcggtctgcgtcaaacctctgctggaggtactcaatccccgtcaggactgtcctctccctatccgcctggaaccgctgttccgctacctccagtttgtccaagcagatgccgtggagccgcccatccttgaagctggcgttgaattcttcctctttgggccctgcctggtgacggaggctctccagtgccacgtaggcgcggcccagcgtggcgttcacctctgtaatcagcacgatctccttctggcacacctcggacagaggcctgtagatgctcaggaagtccaacaggaagtggcagaacttgacaaagtggaagccgcgcatgagcttcagcatccctttggcccggtgcccaatctggcccccagcctctgccaccctctggaggtgcctggccagggcgggccagctcacgagcagcgcgtgcagcgtgcgcctcctgctggccacccagcggaccgcattcagatccttcaggcggatgatctcctgctccagaggcgccgcaccttcctgcagctcgttcagcctcttgtttgaggactgataaaacttgaagacggtgcggatgtgccggtcacacttcttcaccagatcgatgctcccgcaggcgtccaccacagccaggtgcagccggtgggccacgcagtggacaggcagcagctgcgggatgacctcctggaacttttccacaaggcctcctctgcagctcaacatggctgagccatccgtccccagccccaccacccagccaggcttccggaaggggatgtccagctcatccagggcagaaacgatggtctcgaagtacccatctgctgtctcactgtagagaggggccagagtgatgtaggactctttcacctccatctgcttgaagtagcggatgtaaatccccacgcaggcctgctcggaggcgtcggtggagctgtccagcagcacgctcacacagggcgagttccgcacgtcctccaggatctccctcttcagggtctctgagatgtacttgatgaactgagtgcacgccgtgcgattgcggtacttgcctaatatcacggtccccgtgctttggaggagctgcaggatcttctcaaagtcattcaggggccttgagtggtatgcaatggagtaggcggcattgaaaaagtgctccatgttggccatgaggtcgctggagatctctggaacgagggcagtgtgaggggtgtcttccttgatttcaaccgtgttgacacagagcctgtgcgctttgctgacttcatggtattttaaagtctccactttaaaaggccccgtgtaacctctgactaaccgagatgatttatcatggagattaggtctttctatgcaggctgagcagaagagtttggtctctttggggtcaattactaaccatgggaactgcccaaaccatgacctctgaatggaacggggcctgtatgtcctcttgattctcctaggtccatctccttcctcacaaatgctggaactgcagcaggaggcacgggcctccacgggagagcctggaggacgacctttcccccactttggcccatttgggtccttgatccagggtgcagccctccgctccagtttggagatcaagtctggcttggcagcggcaggtcccaaggatgccaacagctcgtagttcatccgcatcacgtctctgtacagctccttctgccgcttgtctagcatgccccactcctcccgggtgaaatacactgccacatcctcgaacaccaccggcagctcctcaaacaccacaggaacctcctccgacagcccctctgcagaagggtcctgaatgcaggattctactgcatcattatataaaatattaatgtctgaggagctgtggatgccatcagtgatttctttttgcctcaaatctgaaatgcagtctagatacattgcaggaattgctccatcccccccagggtcctctagttcagctcttgaacttggcaggagctcagccatgctatcaaatcctcccagaggccctggggggtagaatatggggcaatctgcagtgaagagcggctccgggctggccagaacatctccaggtgggtctctgatgctccggaaccgggctgcccagatggggtccctcgctgccaaggcattgacacagaacatgtgggccttgctcttcgcgtggtatttgagagtctccaccttgaatggtcctgtataaccttctattagtcttgaccgtttgtccctgatggaggggtattctcggcaagcagagcagaacagagccgtctgctcctcattcatgatcagccacggaaactgcacaaaccacgacttctggatggaccggggcttcagaagtttcctgtttcttccggcccagtctccctcgatgtgtccactgcctgtactgaggtgggaaaggtaggctttcttctgaggcgggagggactgtccactctccctggtgggaccttgcacctccatttctcccatgtagcccatctgtttttttcctgggtgatgctccagaaggctcctctggccctggacgctgccaagccatggctctggccctcgtccgaacttgcggaacagctcaggattggcaacagttggtcccagtggtgccaccagcttgttggaaccacagagctccttctgttgctggctcagcagcacccattcctcctggagtaagtacacagtgatgtcatcaaacgtcacaggagccttccccgactctctgggctccatggccccgctttcggaggcccgtgccgccccctccccccgcggcctggcctgaggatgcagccgccgcgaccgccccggggacccaggctcccggagggggagggcacccaggtagggagggagcgcggcccaagaacttcgctctctcacgtcggggggcggtagcgccggtggacccaggataagcgcgctgagctgagacttgcgtcgcaccgagcgaacagctttacggtcactgcccagccccaggcggcggggcgtgacgggaagtgtagtccgctctaggtgagcggctctcgaagctgctattggctcccggaacgcaggtccctggcaggagctgcactggcagctgtggatgaccggcagcaccacgggctctgtgtggccacccagacagcgcaggttcaggatccgcacagggctctccgggtctagacggtagctgcagcagtcacactggctctgcaggtatggctcctctggcatgacatgggtgctggatgggcagtacccactgcagtagctcacttctacctggtccaggtaacaggtccctttggtgaagtttcgaagctccgtgaggagctggcaggagggcgactgctcctccggagcctccctgcggcaagagggacagcagctccctggctccagcaccatctcctcgcccaggtggggacgcccaaggtgccagcactcgcagtggtcttcggggacgcaggggcctgcctggctgcggaagtgcccgggctggcacacgcagcccgaggctcgagctgaactgcagttactctgggtctttgtggcgttcatctccaggcacgtctgctcgcagagccccagctcccccggggccacctgctgccacgtttccccagggggcacctgacagtcaacgagggagcagctgaaggctccaccgtggcagacacagcgggtgcagttccgggtgagcacagtccctgggggcagctcctgggcctgctcttccagggtcagggtgaggccccagggcagagaatgctgccctccagggcagccacagccaggctggcagggctcctgcacacagatggcaccaggctgcagatgccagcagaggcacgggcatgaggtggcacaggcactaagcacctggccaggggggcactcagggcagggctgcaggttacactcctgccgttgctctgtgtcctgggcctggcatggtgccaccccaggacccccctcacaagtccgatgtcgctccatagtgcccccaccacagggggccgagcaactgctccaggctgaccaaggcccaaggactggacactcctggtgtgggcacaccagggactcgttgacacaggtgcagttttggcagtccagctgcaccgcctgggccggggccagctcccaagaggcattggcactggggaggccacagcggcaagaggagatcggcacacagcgcccatcctggaccagctggccagggggacagcggcagcctgggcagggccctccgttgcagctttctgtcttgagcccatggctcccggcagcctcctccacagagggcctctgcctctctccagcgtagcctgaaccccccactgcagggcacctggcaggggctccatggcccccacagactccactggcatgagtcagggcaggctccagggtcagggcagaggcgctgctggctgaggggtgcggtgcagaggtgaggggctccagtccagggcctccctgtcgcaggatccagacagagccggtggcggtgctgctctggaaggacagggtgtgggtgcccttcccagtgaccacccctgggcccagagacccttgacagccctggctggtgcagtgcagctccccacgccggcattcacactccttacagcccagctgcaggcggtccccaggggccagggtcatcccggctcctgctgctgaggtatgccagcagttacactcctctgggggaatgcagcccccagcctgctccagcagccccttggggcagtagcagcccggctggcagggtggcaggtcctggcagagctgatggctcaggtgtgtggcacagagcccagcacagggggagccgcaggcatggaactcaaagggaggcgtgcagctgtcctcagagcagttgctgataaggcaaggccggaagtggccatccagccgcgtgcagggggcgcctgccctggcccctcgggacgccgggccctggtgtcggtagcgctgctgcaccagcacccggcaagagcagcgcgtccagctgctccagctgctccacacacactcctctgggcagggccctgagtagcagccctgggtgtccaggtggaggaaggtgctgttgcaggtggggtcggccttggccatcaggcaggggcaggacccagagcgagaggccaggcccgggccgcagcaccgctggcactccccctgcagccagctgtcccccagggtgcgggagcgagtgccctgcaggcacaggggtgggcacgagggctgagggcagggctggctctgggactgctcctcccgacactctggggcccacgagcccgacgtggaggaccggaagcggctctgctgccctctgggcccgcatgagtggctgcagggactccaggccgaccagtggctccaggcacagtgggtgggaggcgggcagggctgagccgtgcaggagagctgcccagcttggcatgagcagttgttgcaggcatcctggtgctggctccccggggcccagctgtggccctgggcatcggtgcagtcacagtgcccaattggcacgcagccaccatcctgctccagggacccctttgggcagcggcagcccttctggcagacctggtcgtcctgacacacaattccctcctggaggtctgagcagcggcgggggcagcggttggcacaggtgaccacctccatgcctgctgggcagccggcctctgggcaggctcgcaggttgcagaagcggcgctcttggtaggcagtaaggatgttggggcaccagtgcccgccgggcccagggggacggtatgcccgcaggcggcgctgctggcccactccgcagctgcgggagcaaggttcccacggggcccaggaggtccaggaacagttcccagccccacagccagggccagggcacacgggcagctcactgagggtgggcatggtgagcacacactggcggctgcgggtacgggtgcccagccctccacaggagcgggagcacgggccccacgggctccagggaccgaaaccaccatcggcctcgaagcagtcgtccagggagcaagacagcttcccgtgtgcacacgagcagttgccacagcttgtacgaagtgtctggcctgagtccagctcatctccaggcccgaggggctgaccagggtcacctatggtggctcccagctcctgcagcagccaggctgtcagcacacaagggcactcctgcacacaggccaggcggtgctggaaggtgccctcggggcagtggcagccctcctcgcagccctcagagaagcagcccacctgctgcgtgacgtgggcgcaggagaaggggcatccctcgccgggctggcattcacggtacaggcggccagccgggcagcctgcctctctgcagacctgtgtgctgcatgtgcggctctggcgggcaggccctgggcagggaggacgagcacagcgccgggagcgcagctgctccccgcccccacacgaaacactgcagtcttcccaagggccccaagagctccacaccccagggtccgggcagtcaggcacctcctggcattgcagaatgcctgccacacaggtgcagttgtcacatggcccagtgaccacctctccgggttccaggctctcccaggagctaaacctagaccctgctgagcggctctggttctcagggatccccatggctccaggctggtactggcagcggcagtgggctgggggcacgcacagcccgtcctgggagagctggcccagggggcacccacaagtgggctggcagcccacagagcctggctggcacacactcccaggggacaggtcctggcaggagcgggggcagggctgcccacagggatgcagactctggccacccccgcagtctgggcagggcaggtctgtgcagttcagcctcccctccaggcaggtgcagtggttgcagccgtcaggccttgccagccgagcacccggatggtgccgctgcccggtcagcaggtccaggcagctgcagtgacccggctgcacgcagatggccccgttggaactcagtacctggcctggtgggcagtagcagccaggctggcagcgccacacgcagtgcactaggtcatcacaggagcgagggcacggagggccacaggggctatactcggccccttcaatggcagtgcagttggtcactgggcagggcagagcctggcagacctccccctgtgcccgtggcccctcgcagtaatcccccaggccctggggtgggggctggtcacaggcccgggtccggctccgcaggcctcccccacagctccggctacagtgggaccagggcccccatggaccccatcccccagctcctggcacagaaccggtgccgatggcaccgggcagggccacaggaggctgaacactggctccaaggggtccagggtgaccacgtgggctcaccctccgcacaaggccaggagctgcagttggcgatgagcccggagacacaggagcaacaccttgatcctgggcttccaggatctgtgagaccatcaggggccgctgctctagctccccagtgcatggcactcggtggcagcagccccaggaggctggacatggccgcaggctgcagaattcagcctccatggtggggccttggcactcagcacccccaaaggcagctgggggtgcagtgcctgcccggaagcggcgccgaatgcccacgttgcagcagttgttgcaggagtccaggcgagccattgctcctgatgcatagagctgcccgtgcagctggcaggggcactggctgcggggcaggcagctagcattgtgcaggaaaagaccaggggggcaggtgcagccgggggcgcagaagcccgtacactctatctgggcatacaggggggctgcagggctcctcctgggtggcatctcctgggcaggatgaatccccagggctggggcagagtcgggaacgactgcgccagccagggccccctcccggggcaaggcagctttgggagcaggaggaccaggaagtccagggcgtccagccgaacaccttccagagccacaggagcggtcgcagggagcccaggaggaccaggctgaccagccgcagggcagggggcagccccctggttggcacagcaactcccccttctcacacacgcattggctgcagttgcccaggaggaaggacacccctggccacttcagctcttcgcccaccaggcaggggcactcagagaggggcaggcagcgagtgtcatgcagaaggagccccgggggacagcggcatccttccacacaatgcccactgcagcttctgttggccttgggatccaggcaggagggtgggcatgggggcaccagccccttctggcacagatcggcactcacatacacacggcccagctcgcagtctgggcaggcctgcacaaagcaggactggcttcggaaccggtcacgcgggcagctgccccctggcagaggaggccgcagcagctcctggcgctggaaggtgaggcccaggccacagctgcggctgcagctgctccagacagaccagggggccagcacgcagtccacacagccatcctcgtccgagccatcctggcagtcaggccgcaggtcacagcgccgctcagcagacagacactccccgctgccacagctcagctggctcggggaacagagggcccttgaggcgcagtgcctctcgtcggagccgtcgaggcaatcctccctgccatcacacacctgcgcctgttccacgcagcccagcacctcacagggcgtctggccggggccacactgcacaggtgggaagggtcctggggcgacgctctggccagcaggggtcgctggagtcacagggtgtgggggcaccaccgtcacagctgccatacctggtggcagggtcctggcctccatctggggtatgggggtggtggtcaccatctgcacagattccccatggtgaggcaccccggaggctgggccaggactcacgggccttgtctctgtcggggacgtgggggattcctgcccagggggccagtgctcagtctctgccaggccctccctgggccagtgcagcagctgccccggctgggcagaggagagggccagggtcttggctgtggaatggaatctgccagtgccctcaggcagcaacacacagccctcctcatccgagccatcctcgcagtccagaacaccgtcacaagggccccctctcaggacacactcaccactggcacagcggagtccaacccctggctcgcagcccagcagctccacctgcagggggacatcgctgtggtggacatcgtggggccacaccctgacaaacctcgcctgcaccatgcggccgaaagtccatacggcagggtccaggtcatcccagtttctggggaaaagcaggtattcaacaagcatcgaatgcaggccatgcccctcggggacactggaaggcccttggggacaaagactatggaacccacaaaagggcatggtgggctgctggccccatcggccttgggcgggtgataccttgggcaggggcaagatgccaggcaggaggtcacgatagtcatgccagtgtagaccattgctgctgaactggagtgagaagctgctggcatatgcgttggaggagccagtctccggcactaggatgccagtgaggttccgaggctgaagcaggtccagctgcaggtaatggggccgagtgtgccacttggcataagcatcccctccagcgtgccatccctgagggctgggcccctgggtgggagcccccaggagggcagcctgggtggggtgttccagctgctgggacgatgcatgcagactcccctcagccagtccggccagccccaggggagaatagcaggggtctcctgacggaggcagaatgtaagtggccaaagggaatctgatctggggactgggagccggagctgcggcaggagtggccatgggctggaccgtctggttctctccaggtagggcacagtggcagcatgattctcccgtcccctccaccaagacccagccctgggggcagctgccgagcgggcagtagggtgagcagtgtgcggtgaggttgtgcagacactggcacaccctgcaggggcccccatgccagcgttccccgacacggtggacctggccctgatgctcacacccctcacagggctccgtctggcacctgcgtgccttgcggtggatgccacggcactggcgacctcggccggaggggcgggggttgttggagctccggaaggaccactggatgctctggcttccacaggggcccaggcacttggcccagggtgaccaggaggaccagccacagtccacagcgcagtccgggttgagtcggcagcgtcggggccgtccgtcttggcagatgcagagctggcagtcggccttgatgcgttgcccaggccagtagcgggcaccgtccaccaggcaggggcactgccggggccacacacaccacccctcgctgcccagcacctgcccttctgggcaccagcagcccgggctgccgcagggccaatcaggtgggcacgtgacctggccagagatgtcatcacaggtcagtgggcagggggcacagggctggaacatcagctccccagagcaagtggcattggggcagccgtcctgagggcaaggcttggtctggcgggtgctgtgcaggcctccgggcagtgcagcacaggtgcggcccccattctggggtgagtggcactgccgttgccgcgtcatggtgcccctgcacggctcagagcacacagaccagggggaccaggtgctccattcaccgtccactgggcaggctgccgtgaagcaggcctgagactggtgctcaggccctgggcagttctgtagcaccaggaggccgagtggggagcagcggcggctccggccctggccccagggcccacacgtccggctgcagggcccccatgggctccaggggccccaggccccacaaccctgctcttctggggaggggcccacctgccctggccttccacagtcaggctgcccatcacacaccagctggaagcctatgcaggtgccattggggcaggtgtattctgggcagggaagccctgtcctgttggggcctcccagggctggcagccccccgcagtccagctcgtcctcgccctggggacagtctgggatcccatcacagagctgctcaggggtcaggcacagccccggagccacaccacagggaaagaggccagggcacagaggcagctgggtggagcctgcgggcactgtgagatgtgtcctgctccgctcctgtcccttcctgccctctccctgtgcctcaggaggcgaaggtggggatggcgctcgggaagaggtgggcccgccggcttggccaggggggccgcgcatggccgggggcgcgggagcctcaacgcaggcgtcggggccctcgtccgagccgtcgggacactgccgcacgccgtcgcacagctgctcgggggacacgcagtgagggccgcgggcgcagggcgcgtggtgcggcgcgcagggccctccgcagccgcgctcgtcgctgccgtcggcgcagtcttcctcctggtcgcagcgccagccccgcggggtgcactcgccgctgccgcaccgaaactcgaaggggccgcagggtggcgcagggctggcgctggccaggggacttgacgcagtgtccagggagcctggggaggggccaggcaaggtgctggcaggaggtgtgggcagagaaggtagggggcagtgtcccggcccctcatcggctccatctgggcagtcccagactccgtcacacagctggatggcccccaggcaggtgccatcaacacaggacacctccccggggacgcaggtcacctgccccagacaggactcctcgtcggcggcatccagacagtcaggatgcccatcgcagagcagggccggcggcaggcagcgtccatcggcacaggccagcaagccctgggggcacggatagctcggctcatccgtgccatctccacagtcatcctggcggtcacagagcagggccagggtcatattgtccactcatatcctggagggtccatcagaggacagccgagggacagcaagggacccagagaatgttcctttttatcagggtggttcataagagcagccacacagagctgtggtgtcacctcatagcacatttgttcctcttggtcagatacacttttcttgtatgttgcaaaaggatctgcttgccccagctccttggcctggtgtgcatagccccctggggtgtggcagccccacttgctcagttccagtgtgttgggcctcaggtggtagatgcagctccacacgggaacacaaagtgccacaagtgattgagatgagcaggcccaggaatcatctgtggtgtcaattatggcctgggctctctcttccacatctttcaaagcatccttgtaagaggatggaaaggtaatagggacggtattctttagcatggccaaaaactctactactttcctcttaatgacttctgaatgagctcttggaccccacaggaattcgtaacgaggaggagaagagttgggcacctcccggtactctaggtaatgttcctgcacccaaactttagtgaggagctccctgggctccccaaaggcaaagtgctccctcccagcacgcacccctattccactcagcacatcccagatgacctcctcagaggcataggtgccctttatgaagatgatactcagaataagaatcaggaggcggttctgggacatgccctgctcatcactcagacacccctcagaggtgaggtctaatgtgtttacaaagacataggagtcatcagggtccacttctctcagggaaatgccaaaaagtatctctatgaactcacgggctttcctgaagatcacaggaaagtagcccgtgtacctgctgatgacattcgtcagcatctctgcctttgtgataggctgcttcacttgatatttgaggagaagaaaccgcgccaactcgtccaccttttcatccagtgtataagtgaacaagggctcgctctctatcaaggactcgctgtctgtcaaggaatcactctctagcaaggtgtctgaggaacttgtatattcatctactgggctgctggactcttcactgaatgggctcaatgaagtggaggaggagaaggagatcacaggactctggagaggactctcaggggaactcttggaaagactcgatgaagtggaggaggggaaggagctcacaggagaactctgggaaagactcgatgaagtggaggaggggaaggagctcacaggactctggagaggagactgggcaggcccctcaggaggactctgaggactctcatgggaactttggagaagactcgctaaagtgtaggagaagaaggagctgacaggtctctggagaggagactgagcaggcccctcaggaggactctgaggactctcagggaaactctggggaagactcaaagaagtggaggaggagcagatactcacaggactctggagagaagactggaagtcctccccctgaggaggaaactgaggaaagtggagaggagagagggagtcctcccactcaggaggactctgaggaaaatggagagaagacagggagtcctctccctcaagaggactctgaggaatttggagaggagacagggaatcctccccctcaggagcactctcaggactctggagaggagattgggagtgcatcccctcaggagggctctgaggactatggagaggagactggacaggcccctcaggaggactctgagaactctcagggaaactctggggaagactggatggagtggaggaggagcagatgctcacagggctctggagagaagactggaattcctccccctgactattgtggatcaagcctaggcctattctggtttgcctggggcagaaagtcatggccagctttgatgcctaggggtaaaggtctctgtacttggacctgagagggactgagaggcctggcctctggccatgtgtatttgggatggcagtctggcccacagaggaacagaagatactcacggaggagattccagggtgaactgggtccactgcggctggcactcccctgaagttcccatatttcacattccatagggtccctgccagtaatactttgtgacaccaaatagaaagagggtcctgttggtttcagacagctgcatcctatgagtcatagggaggctctgaccattcatccaccacaggtagcttgcgtccggagtctcaggattacaggttaagatcacagtctccatggcctccctggggtttaagttgctgctggagatggagggcttgggagtctccaggtataagttgaaggtgaaatatccagttactcctctagtcctatcacctcgcttttatgatgtgtaaggtgtaggatcctgcgtcctcccgggtgacattctggatcagcagggatgcattggaatatactgtttctcgtccactgtatgccggtccatatataattatttgaccgtctactacatatgatgtaatgtaatggtagaggtccctgatttgccctttgtaccagatgtagccagtaagattctggggcaaattgtggacaagtagaagaacatccttcccctcggacactttgggtggctgggcttcaatcatgacttgggcagtggtaggcaagttccagaagtttaaaagtaatgctgtgagcaggagccccttccatttgatgtgctctgtgcagggaggggctgagaggggccccatgatctctgctgcgtgcatgttctcctctgtggagatgagcctaggatccagaagcttccagagcacggctgtcagctgtgctgtccttcctccttctgcgctgagactcttcccggtggaaggagcacttctcaagctcat

SEQ ID NO: 135237 - DNA, 2209 bp, Homo sapiens
ctgtcatcctgtaaacgtgaacacttactttttggtgggtcttcctcttgtctaattatttttcttttcatcactgggtaattcttacaactggtctgagtactatggctgattttcgctgtctggcattgagaagccacacgccccttttgcttaggaggcctctctgctggaggatgacgatggcatggtttatctaaggccactgacaagtcatcaatataggacagcacagctgagagccatgctcaggaagtttctggatcctaggctcagctccacagaggagaacacgcaggcagcagagaccatggggcccctctcagcccctccctgcacacagcgcatcacctggaaggggctcctgctcacagcatcacttttaaacttctggaacccgcctaccactgcccaagtcacgattgaagccgagccaaccaaagtttccaaggggaaggacgttcttctacttgtccacaatttgccccagaatcttgctggctacatctggtacaaagggcaaatgaaggacctctaccattacattacatcatacgtagtagatggtcaaataattatatatgggcctgcatacagtggacgagaaacagtatattccaatgcatccctgctgatccagaatgtcacccgggaggacgcaggatcctacaccttacacatcgtaaagcgaggtgatgggactagaggagaaactggacatttcaccttcaccttatacctggagactcccaagccctccatctccagcagcaacttataccccagggaggacatggaggctgtgagcttaacctgtgatcctgagactccggacgcaagctacctgtggtggatgaatggtcagagcctccctatgactcacagcttgcagttgtccaaaaacaaaaggaccctctttctatttggtgttcacaaagtacactgcagggaccctatggaatgtgaaatacgggaacccagttgagttgccagccgcagttgacccagttcaccctggaatctcctcccgaagcttgcccaagccctacatcaccattcaacaactttaaaccccagggagaagaaggatgtgttagccttcaccctgtgacccttaagagtcggaactacacctacatttggtggctaaatggtcagagcctcccggtcagtcccagggtaaagcgaccccattgaaaacagggatccctcattcctaccccagtgtcacgagaaatgaaacaggacccctatcaatgtgaaatacgggacccgatatggtgggcatccgcagttacccagtcaccctgaatgtcctctatgggtccagacctccccagaatttaccctttcatttcacctatttaccatttcagggaggaaaaccttcggactttgtcctgcttttgcgggacttttaacccaccgggcagagtatttcttgggacaattaatgggggaagttttcaggttattcagggacaaaaggctctttattcccccaggattactacaaagcatagcggggctcctatgcttggctctgttccgtaacctccaggccactggcatgggaaagctcccaaattccatggacagttcaaagtctctggttcctttcagggaacagggacatcttcctggggccttaatccattataggcaggccgtggatgttcatttctggttattttcagggaaggactgggccaggacagtttgcttttcatttctttcctcaaaagtattttaccattcaggcttacagtcccaaaattgcctttttggttccaagggagattttatggaaaagactctggacaagggacttctttggaattacaagttccctgataaccttccaagatccatacccactggacctaagaacctttccaaaattttaaatggaacagggctggatacctccatggaaattcaaggacaaaggaaaaaaaccccaattttattgggacttaaatagtccaaaccatggtttttcataattttcctatttgaaaatgtgctgattctttgaatgttttattctccagatttatgcacttttttttcttcagcaattggtaaagtatacttttgtaaacaaaaattgaaacatttgcttttgctccctaagtgccccagaattgggaaactattcaggagtattcatatgtttatggtaataaagttatctgcacaagttcaa

SEQ ID NO: 135238 - DNA, 1608 bp, Homo sapiens
tggaggcatcacactgcctgacttcaaactatactacaaggatacagtaaccaaaacagcatggtactggtactgagaggtgacagcgtgctggcagtgctcacagccctcgctcactcttggcgcctcctctacctgggctcccactttggcggcacttgaggaaaccttcagcctgccgctgcactgtgggagcccctttctgggctggccaaggctggagccggctccctcagcttgcggagaggtgtggagggagaggcataggcaggaaccggggctgtgcgtggtgcttgtgggcctgcgcgagttccgggtaggcgtgggcttggtggaccccacacttggagcggccagccggccccaccagccctgggcagtgaggggcttagcacctgggccagcagctgctgtgctcaatttctcgccaggccttagctgccttcccacggggcagggcttgggacctgcagcccaccatgcctgagcctcccccaactccctgggctcctgtgcagcccgagcctccccagtgagcaccgccccctgctccacagcgcccagtcccatcaaccacccaagggctgaggagtgtgggtgcacagcatggtactggcaggcagctccacctgcagccctggtgtgggtcgctctttgcagtaaatcttgctgctgctcactctttgggtccacactgcctttatgagctgtaacactcaccgtgaaggtctgcagcttcactcttgaagccagcaagaccacgaacccactgggaggaaagaacaactccagatgtgccaccttaagagctgttccttaaaattcgagggctaaatactgggcacctgttggccagttaaaagcgactagcacggccgccagactaaagacacgggtgtcaggctttctgggaaagggctctctaacaacccccgactcttcgaagttgggactgttggtttgcctggggcaagcgccagctcatgtcatcaccctcactgagccccaggtatgtttcaccattgagggccatgaaattgacttcctcctgggcactggcatggccttctcagtgttaatctcatgtcctggatgactgtcctcaaggtccgttaccatccgaggaatcctgggatagcctgtaaccaggtacttctcccaccttctcagttgtaattgggagactttgctcttttcacacaatgcaaaaacacaagggggtggcactcttacactgccaaagccatcaaaatcccaccggccctgggcagtgaggggcttagcacctgggccagcagctgctgtgctcaatttctcgccaggccttagctgccttcccacggggcagggcttgggacctgcagcccaccatgcctgagcctcccccaactccctgggctcctgtgcagcccgagcctccccgacgagcgctgccccctgctccacggcacacagtcccatcaaccacccaagggctgaggagtgcgggctcacggcacgggaccggcagccagctccaccagcagccccggcgtggggtccacactgcctttatgagctgtaacactcactgcgaaggtctgcagcggacacaccacctttaagaac

SEQ ID NO: 135239 - DNA, 388 bp, Homo sapiens
atcctcttagcacaattggagagccaggatggggacatcttgaggcaacgggatgaatttgatttgctggttgctggggagatctgccggtttagtgctcttattgaagaactggagtgagaagaatgagaggccagcaagggagctcctgacggtgaggcctgaaccggaaccctgccccacctgtgctgtcctgagactcttgcatctttgtcttgcctaagccatgtctccctgactcacacatctctgtatcccagatgggaggtgggtcagaggaccagaaagtctcaattctagttcatgcttttccaagagttccctggtcactttttgctctctggtctccacctttccgtcccaccatttgtcaaatagggaagatatg

SEQ ID NO: 135240 - DNA, 2535 bp, Homo sapiens
  misc_feature (1)...(2535): n = a,t,c or g
atggcatctccactctgtgacccagactgccacttggccccaaaagaatatttcttctgacagaggacagctgacatatcaccactttccttctactgtgagtgtctctggatgggcagaaaggaatggccagcccctggttatggtcatctaaggtcacctctgaaatgctgtgagcccctcttccttcctctcctctgctatttcccatctctgctgttggcaggagaatagaaccctgggctgccagagatgcaagtgtgtgacgatatgggtgctggtgcatatttagtatgtgcctgtgtccagccatgtgcatgtgtggggtgtgtgagtgtgtgacccagcccttcccccgtgggccaagcagagagagtgggccttggagggaagccatagcagcaggaccagcatgggccttctggttgcctctgtgaccagcctgggcagatggaagttcaactgccccattttgttcagggtaccctgaaggaagccgggtcactatcgaactgcggcccaaaaacttctgccgggcctgccttaccccgctactgtgagatacccaggcccagaccctggaggagtccccctacttgccccactctgcaaagaacccttccgtccctgggagcttccggcccaactggcagctggctaacgtggtggagaacattgagcgcctccagctggtgtccacactgggtttgggagaggaggatgtctgccaagagcacggagagaagatctacttcttctgtgaggatgatgagatgcagttgtgcgtggtgtgccgggaggctggggagcacgctacccacaccatgcgcttcctggaggatgcagcgggctccctatagggaacaaatccataagtgtcttaaatgtctaagaaaagagagagaggagattcaagaaatccagtcaagagaaaataaaaggatgcaagtcctcctgactcaggtgtccaccaagagacaacaggtgatttctgagttcgcacacctgaggaagtttctagaggaacagcagagcatcctcttagcacaattggagagccaggatggggacatcttgaggcaacgggatgaatttgatttgctggttgctggggagatctgccggtttagtgctcttattgaagaactggaggagaagaatgagaggccagcaagggagctcctgacggacatcagaagcactctaataagatgtgaaaccagaaagtgccggaaaccggtggctgtgtcgccagagctgggccagaggattcgggactttccccagcaggccctcccgctgcagagggagatgaagatgtttctggaaaaactatgctttgagttggactatgagccagctcacatttctctagaccctcagactttcccaccccaagcttcctcttgttccgaggaccatccagcggagctcagttctcctgacaaatgggcagaacttcaccagacaacccccagtcgtttttgaccgggccacctgtgtttctnggcccacactgggcatcacaggggggagacacacgtgggtggtgagtatagacctggcccatgggggcagctgcaccgtgggcgtggtgagcgaggatgtgcagcggaagggggagcttcggctgcggccagaggagggggtgtgggctgtgaggctggcttggggcttcgtctcggctctgggctccttcccccacacggctgaccctgaaggagcagccccggcaggtgagggtgtctcttgactatgaggtgggctgggtgaccttcaccaacgctgtcacccgagagcccatctacaccttcactgcctccttcactaggaaggtcattcccttctttgggctctggggcccgagggtccaagtttctccctgagctccttgagaaggagcagttacctactctcctctaagtacaggactcatatcaacccaagtaccatgtggacttgatccctggctgaatcacctggatgacttggaatagaaatgactgctttagaagatgggatggggccgggtggtaagggatagaagagaggactctcaatctactgatcaagtcctttccccaatgcccagtggatggcccagggtaccctggggacttcaggctgcctgccagttcctgcttcaccaccaatccgtgctttggcacagaagtagctgcatagaaagagcactggatttgaagtcagaagacctgggttcttgaaccagcctgtcaaccagttgtatgactttaaacaaggcatctcacctcttttcatcttgttttcttccaataatgttagagttcattgtaatcacattctctaagaaccatttagtttgtgttaactatgaaccaagcagtgtggtggccactggtgacttgaaaatgtagagaaaaaaaaaaaacctgctctatatctgaaagagctcttggggaagacagagaaacataaagaggaaattacagcacagtgtggtgggtgttacgggaagtccaaccccagcattatgggagttcgtcgacgcggccg

SEQ ID NO: 135241 - DNA, 571 bp, Homo sapiens
agtactgactccatgtactttgctgctgcttttgtgatccctgttgaagtgacttcaagaagtgacaatgatgccaggcatttggttaagtatgatgtggtgagttaaccttaaaatagaaaatttggtcaataagcatttttattttggagccagagagctattttagggacctgctgcctggaaaggatatccttgggacagcagatcccttagttcctaatgaatagctgcatcaccaacacagcttctcctgaccatggtagggccatcagcagggtaactcagcccagcttattaacccttctgttttctttccagctagccacagtgcagcctggccagaatttccacatgttcacaaaggaagaacttgaagaggttatcaaggacatttaaggaatcctgatcctcagaacttctctgggacaatttcagttctaataatgtccttaaattttatttccagctcctgttccttggaaaatctccattgtatgtgcattttttaaatgatgtctgtacataaaggcagttctgaaataaagaaaattttaaaaaaaaaaaaaaa

SEQ ID NO: 135242 - DNA, 1661 bp, Homo sapiens
tcagagccccacagggtccccagcggggcactgcctagtggagctgtgagaaggccaacatcctccagaccccagaatggtaggtccaccgacagcttgcactgtgtgcccaggaaagtcgcagacactcaacgccagtccaggaaagcagccaggagcagggctgtaccctgcaaagccacaggggcagagctgcccaaggctgtgggagcctaccttttgcatcatcatgactgtagccgactcattaccgcccaaagtcctggagccctcgaccgggcatggagaacaccgtggaggaaccctaagagagggaatcctgcgaagagaagtcaggtggtggccttgccggaaacgggaccaaagtcctctagctccctggtcctcctcctcctccggaccaaccaagccctcgtgaggaagcgcgttggcccaatcacctaggcgggaactactaccagccaataggaagcaggcacaggagggcgggctaaagaggtcgcggtcgcacgcgcagttggtccttagtactgcggccgtgtgggtgagttggctgccggagagttggtgtttttgtggagtcgtgttggtcctcagaatccccgcagtagccgcttgcctcctcctaccctcgccatgtttcttacccggtctgagtacgacaggggcgtgaatactttttctcgccgaaggaagattatttcaagtggaatatgacattgaggctatcaagcttggttcccacagccaattggctcccagacatcgagagggtgtgtgccctagctgtgggagaagagaatttacctcccccacttgatgggagcccaagcaggcatttgaggaaaattgttaggagatttgatgcttcacatagggttgttgcccattgagtggggcttaatttgcttgatgcttaagacttttaattcgataaagtccagagttgggagacacagaacccctggggttcaccttacaatggaggacattgacagtgggagagttttgaacccaagctgtgtcccaatctgggcttttccagttttggagaagaagatgcagaatccagggtgcccatgtcctcgtccccttgggagtagccatttatttatttgggaggagttgtatgagaaaggaacccccagcctgtttccataggggaccccattctggggaccctttgtaccagtgtggatggctcggagccaatttggctctggcttccagaggggtgcccccagagctcccttgccaagaaagtttccccccacaagtcctatgacctttgaaagaagcccatcaagtccttcacctcatccatccctcaaacaagtaatgggagggagaaagctgaatgccaaccaaaccattgagcctaggcccacagtgccagccctggccgagaatttcccacattgttcacaaaggaagaaacttgaagaggttatccaaggacattttaaggaatcctggatcctcagaacttctctggggacaatttcagttctaaataatgtcccttaaattttatttccagctcctgttccttggaaaatctccattgtatgtgcattttttaaatgatgtctggtacataaaaggcaagttctgaaataaagaaaattttaaaataaaaaaaaaaaaaaagggcggccgct

SEQ ID NO: 135243 - DNA, 382 bp, Homo sapiens
ccatttcgtagacacagctatgctcgtgcactttagacgagtggagtccagccgcagggctgagagtaatggatccagagtttcaaactctgcaagaacatggctgtaggactctggtatcactggcacaaaagccatttagccagaaagctgaaacttgttgaatgatagatacagtattcctcaccgcgcactaagagcggaacgtgaacttcagtctcccctagcgttcctccccttccttgctgacgtcatccaggagagccgcagactggaaacaacgctagtaacggcacttcctcatcacgtgacgagtcacgcccccccgtgcgggtggtccctccccctcagaccgcggtcgcgattacgctctctacggcct

SEQ ID NO: 135244 - DNA, 346 bp, Homo sapiens
tttttttttttcccccacaaaagtatgactaggacaggtaagaacacccaagattccacaaaacgttaaggaactggagggtaggggcacagtaacagagagcacgtgaaaatgaaactgatacaaggatcaagaaattcacctttagacgactggagtccagccgcagggctgagagtaatggatccagagattcaaactctgcaagaacatggctgtaggactctggtatcactggcacaaaagccatttagccagaaagctgaaacttgttgaatgatagatacagtattcctcacctgaataaaatccacaaaaatataatttaagaagcccaccattcatt

SEQ ID NO: 135245 - DNA, 1323 bp, Homo sapiens
atggtggtcagggttcttcctgatgtgaaatccagctccctcagatatgggggtggaactgcccagagaagaacagctgtatctacgactggtcctgaaagtggtccttgttccaagccccctctctgggcatattccaccaatacctcttcaagctctgctggcctgggctactccatccttcagaaatccccagatgagaagcaggcaccagaatgttcacacatgagcaagagcacgaggccagccccccaggagtcactaaatgggagcctcagtgatgggccttcccccatcaatgtggagaatgtggcacttctgttagctaaggccatgggccacgatcgggcttggtcactgctacaggaatgtggtctggcccttgagttgtcagagaagtttaccagaacctgcgatatcctgaggattgctgagaaaaggcagagggtcatcagactggggtttctgagcatggattcaaccatcccagtcttgggtacagaactgacaccaatcaacggacgtgaggagactccttgctacaagcagaccctgagcttcacggggctgacgtgcatcgtttcccttgtcgcgctgacaggaaacgcggttgtgctctggctcctgggctgccgcatgcgcaggaacgctgtctccatctacatcctcaacctggtcgcggccgacttcctcttccttagcggccacattatattgagctcctcgaaagaagggtctgcgccgcccccttctgcgcggtcatgccgagccagcacctgggcctggaactgggccgcagcccccagcttcacccaccacctccctaccatggacccctgcaaagtgaacgagcttcgggcctttgtgaaaatgtgtaagcaggatccgagcgttctgcacaccgaggaaatgcgcttcctgagagagtgggtggagagcatgggaggtctgacccagaccagtcacagtggttgtggccacaggggtgcttgtgtcactccacccccaactttaggtggcttagaacagggagacagactcaatttgtttgggagaagtaagagaagagaacaagagtctctgcttggtaatccagagaattatcctgaatattgtccaaaaccatcaaggcagtacctctacaagtctgcaagaaccacagctttactggtcttgggatgcctgctaaaacacatacagtttagatcaaaatactcaaatctgtccagatatctggaaaggcttcccaagaaagttgagtacaaaaaatcccagacagaacactacaataaatactttagctcttcagtgcccagacactga

SEQ ID NO: 135246 - DNA, 342 bp, Homo sapiens
atggcaagttccaatcctgtgtatatggagatggaaaaaggagatctaccaacaaggttaaagttactagatgacgaggttccttttgatagtccgttgttggttgtttatgctacccgctgttttgcccaaactgccttagacataatggcagttgaaaatcagaagtttttggaggaaaaagaggtaactagtccacctccagaagaagacaggttccaggagcttaaagtagcaacagcagaagcaataggcagtgagcagacctgcaatgaaggggaacagctgttctcagaacgaccaactgcagaggacactctgttgagtgggaggttcctgtag

SEQ ID NO: 135247 - DNA, 4939 bp, Homo sapiens
tttcgatgaacgcgaggggagactgaagttcacgttttgctcttagtgcgcggtgagttccccggcgctgggccgggagacaagatccgatctactgagagctgcgaggtactgccctggatgtggtggagctgggctgggacctccgggctgctggtctgtgagcctggctttgaaaattggttactgggtctcctctcaagaaatctcaagatattaaagttactgctgttaaaaaggtgaggaatactgtatctatcattcaacaagtttcagctttctggctaaatggcttttgtgccagtgataccagagtcctacagccatgttcttgcagagtttgaatctctggatccattactctcagccctgcggctggactccagtcgtctaaagtgcacgagcatagctgtgtctcggaaatggttggctttgggcagttcaggaggaggactccatctcattcagaaagaagggtggaagcacaggctttttctttcacacagggaaggtgcaatttctcaagtcgcctgttgtttacatgatgatgattatgttgctgtagctaccagtcaaggtcttgtggttgtttgggaattaaatcaagagcgtcgtgggaaaccggaacaaatgtatgtgtcttcagaacacaaaggccgaagagtcacagctctctgctgggatacagctattcttagagtttttgtaggtgatcatgctgggaaggtttctgctatcaaactcaatacttctaaacaagcaaaggcagctgctgcttttgtgatgtttcctgttcagacaatcacaactgttgactcctgtgttgtacagttagattatttggatggaaggctacttatatcttcacttactcgatccttcttgtgtgacactgagagagaaaagttttggaaaattggaaacaaggaaagagatggagaatatggagcttgtttctttcctggaagatgttctgggggccagcaacctctgatatattgtgctcgcccaggctctaggatgtgggaagtgaactttgatggagaagttataagtacacatcagttcaagaaactcctctcgttgccacctctccctgtgattactctaagatcagaacctcagtatgatcatacagctggatcctcccagtctttgtctttccccaaactcttacatcttagtgagcattgtgtgctgacttggacagaaagaggaatttatattttcattgcctcagattgtctcggctcttgttttgagtgaagtcaaagatattcaggatgtggctgtctgtaggaatgaattgttctgtttgcacctaaatgggaaagtctcacatctctccctgatatctggggagcgctgtgtggaacgcctgctaagaagaggcctatggaacttggctgctcgtacatgctgtcttttccaaaattctgtcattgccagcagagcaagaaaaactttgactgcagataaattggagcatttgaaatcttagctggaccatggcacctacaatgatctaatttctcaaatggaagaattgatcttaaaatttgaacctttggattcagcttgtagcagtagaagaagctccatttcatcacatggaaaagtttcagcatcttggactctggtatttatcgtatcattagtagtagaagaggcagtcagtcagatgaagactcttgctcccttcacagccaaaccctctcagaagatgagagatttaaagaattcacctcacagcaggaagaggacctgccagatcagtgttgtggctcacacggaaatgaagacaatgtttctcatgctccagtgatgtttgagacagataagaatgaaacttttctcccgttcggcattccattaccatttcgttctccatctcctcttgtgtctcttcaggctgtcaaagaaagtgtttctagctttgtgccgtaaaaacctactgagaagattgggcacccccttcacacgaagcccctgatcctgaaagtgagacccagagctccaggggtgatgagcaatcatgtgaagaggatgtgagttcagatacctgccccaaaggaggaagacactgaggaggaaaaagaggtaactagtccacctccagaagaagacaggttcccaggagcttaaagtagcaacagcaggaagcaatgaccaagctacaggaccctctggttttatttgaatccgagtctctgagaatggttttacgaggaggggctttcacatttagaggaaacatttgccatgaaggacttttcaggtgtttcagatactgacaactcatccatgaaattgaaccaggatgtgctattagttaatgaatcaaaaaagggaatattagatgaagataatgaaaaagaaaaaagggactctttaggcaatgaagaatctgttgataaaacagcatgtgaatgtgtaaggagtccaagggagtctttggatgacctgtttcaaatatgttctccatgcgccattgcaagtggtcttcggaacgacctggctgaattgacaacattatgtttggagttgaatgtattgaattctaagatcaaaagcaccagtggacatgtggaccacactttgcaacagtactctcctgaaattctggcttgccagttcctgaagaagtacttttttctcctgaacttgaaaagagcgaaggagagtatcaagcttagttacagtaatagcccttctgtttgggatacttttattgaaggattgaaagaaatggcaagttccaatcctgtgtatatggagatggaaaaaggagatctaccaacaaggttaaagttactagatgacgaggttccttttgatagtccgttgttggttgtttatgctacccggttgtatgaaaagtttggggagtctgctcttcgatccttaatcaagttctttccatccattttgccatcggatatcatacaactttgtcatcatcatcctgctgagtttttggcctatttagacagtctggtgaaatcaaggcctgaagatcagcggtcatcttttcttgagtcccttctgcaaccagagtctttaaggttggattggctgcttttggcagtgtcccttgatgctccaccaagcaccagcacaatggatgatgaaggttatcccaggcctcattcacacttgctttcctggggttacagtcagctgatccttcatctaattaaacttcctgcagattttataaccaaagagaaaatgacagacatctgcaggtcttgtggtttctggcctggatatctaattctctgtttggagctggagagaagaagagaggccttcaccaatattgtgtatctgaatgatatgagcctgatggaaggggacaatggttggatcccagagaccgtggaggaatggaagcttctccttcatctcatacagagcaagagcacgaggccagccccccaggagtcactaaatgggagcctcagtgatgggccttcccccatcaatgtggagaatgtggcacttctgttagctaaggccatgggcccagatcgggcttggtcactgctacaggaatgtggtctggcccttgagttgtcagagaagtttaccagaacctgcgatatcctgaggattgctgagaaaaggcagagggccttgatacaaagcatgcttgaaaaatgcgatcggtttctctggtcccagcaggcctagtgggagaagattcagcaggatgtcatgacattttgagaaaaactaaatcatgctcctgaaccttctgaacgcatttgttattgaaggaaagacaccacccccaaatcctgccatcttattggggctacttttgtcagtgtctgtacccttggcatcggcatctgtgactctttatccatgacctcagtgtttcttaaccaaagttgtactcagcatttcttaaccaaagttgaattttgaaaagagtcagtccttgtttgctggaattagaatgttaatgtcctagtattattccgaactaccgggattaacggcttgttgctagtggattatgacagattcttttcttactgtggcttccatgttgggagcagaagcttttcatcctggtcacatgaagacagatggtattattgactggagttgaattatttttatatcttgtctggcacaatatggaaattacctgaaaataagatggtgtataatggaattaacacccaaaaataagtagaacatctgaagatttgaaatttggatatttaagtaaaatgggactgggtggcagtggctcagcgcctgttaatcccaaccctttgggaaggtaaagacgggaggatcacttgaggccaggagttcaagaccagcctgggcaacatagtgacgaatgcatctctacaaaaaataaaaaaaattagctaggccatagtacctgaggcccaggaggttccagggccgcaattgagatgtgttttgggccattgcacacccagtctggggtgacagagaaagaccctgtctcaaaaaccaaattaaataaaatatcttcatatataaattaagctaattaaaaatatttttccctgtatttatttaatattttctaatctgaacccatatacagctgactaattcattcttagaaatgtgttatctgtaatctttcctaaacagagtagcccacaagaatcatgcactttttaaaattatttctaagaagcccataacaaagcgtgtgtactaataaagactgcagcaagcacttgtgttatttaaattatgtaaatagattgtcatttgtcaggctcctgtacatttacatagcatgttatattaataataaatgtaaaatatgactaaagttttcattggaacccaatgtagacaggaggtttattatgagcattttgcagaaaggtgtggagtaagtaaagtgttggatgccctgaaaaaaaaaaaaaaa

SEQ ID NO: 135248 - DNA, 364 bp, Homo sapiens
ctgcggcccctgccggttacataactcgttgcgggctccgcgcggtcccacttcccggctcccttcgcctccaggatgcgctgagccctacaacacccccagcggccgccggctcccccacgaggtgtgaatgacagaggtggtgccatccagcgcgctcagcgaggtcagcctgcgcctcctctgccacgatgacatagacactgtgaagcacctgtgtggcgactggttccccatcgagtacccagactcatggtatcgtgatatcacatccaactagaagttcttttcccttgctgcaacctacagaggtgccattgtgggaatgatagtagctgaaattaagaacaggaccaaaatacat

SEQ ID NO: 135249 - DNA, 2554 bp, Homo sapiens
atgtctccagcacccacaggtgtgtctgccatcccccgccactgtcaggtgctgaaaactcagaatctgggggacacagaatggactgcgtttcagttaccagaaggctttcctgacaccctcatgatgcccacagggtgctccacttgcaccccaggacagaggagtgacaatggaggattctgtttttatgacactctggaactggccaaacaaattgccggtgctggcacccagagtggtgaaggcggagctgagaagcgcgatggcgatgtgctacgtcttgtttcacagttgtcaaaactcagtgtcagaagtggcgatgacaaggacgaagaagggatgaggaagaacagagacaagaacatgacccaagagaaggacagaacgctaaaccggggaccacaagatgtgctgccaagatgggaccccgacaaaccacaaaagctacagattccctttactccctgggaagtacccaatctggagaagaaagtcggagctgggggtgtgggttctgtagggccggtctgtaaagggccaggaacgtccgagccccggcggccgccccccgccacctcacctcgtgggggagccggcggccgctgggggtgttgtagggctcagcgcatcctggaggcgaagggagccgggaagtgggaccgcgcggagcccgcaacgagttatgtaaccggcaggggccgcagccgggacggaggcggcagcccgcggcacttccgcctcccgctccctgccggcagcgcagcccggaagcccattggccgccgcccccacgtggccccgccccctgaggcaggcgctgccgccatgttgggagcgggcaggctccgtgcgaagccaggcccaggatcccgtatgcggggcactgctttgtcacgaagtccctgtggcgtcttgaagaaggcattccccacccgccaaatggcgtccatgcccccgacgcccgaggcccaggtgagtcgagggaccaatactctttgaggatctggctgtgtatttttctcaagaggagtgcgtgactcctgcaccctgcccagaggtccctcagcaaagatggtacaaaagagtctttggaggatgcggctttgatgggagaggaaggcaagcctgagattaatcagcagttaagcctagagtctatggaacttgacgagcttgccttagaaaagtaccccattgctgcaccccttgtcccttacccagaaaaatcctctgaggatggagttggaaaccctgaagcgaaaatattaagtggaactcccacttacaagagaagggtcatcagccttttagttaccattgaaaaccacaccccattagtagaactctctgaatatttaggaaccaacacactttctgaaattcttgattctccctgggaaggagccaaaaatgtgtacaaatgtcctgagtgtgaccaaaacttcagcgatcattcatacctagttttgcatcagaaaattcattcaggagagaaaaaacataaatgtggtgactgtggaaagatcttcaatcatagagccaacctgaggacacacaggagaatccatactggtgagaaaccttataagtgtgccaagtgcagtgccagctttcgccagcactctcatctatcccgacacatgaatagccacgtaaaggagaagccctatacatgtagcatatgtggtagaggttttatgtggctcccaggattggcacagcatcagaaaagccacagtgctgaaaacacctacgaatctactaactgtgataaacattttaatgagaaaccaaatcttgctttgcctgaggaaacattcgtatcaggcccccagtaccagcacactaagtgcatgaagagcttcaggcagtccttatatcctgccctttccgagaagagccacgacgaggactctgaacgctgcagcggatgatggggacaatttcttctcattctcaaaattcaagcccttacagtgtcctgactgtgacatgacctttccttgtttctctgagcttatttcccatcagaacattcatacagaggaaaggccccattaagtgcaaaacatgcgaggaaagttttgctttggactcagaacttgcatgccaccagaagagccacatgctagcggaacctttttaaatgtaccgtgtgtgggaaaactttcaagtcgaatttgcatctcattactcataagcgaactcacattaaaaaacaccacgtaaagtaaatataacaaattgttattagtgattgggcttttcagtatctgtatggtgggaagcagttactgtatatgtcccaggcaatgtgctaagcactttacacacattcccatgtaatacttaattctcagcacaaccttgatttaggcagtatcatttccattttataagtagggatgcaaaatccgtgtcactaaactagtgaatgaacccacggatttgaactacagttactgtacaactgtgagccagaagaagatacacaacttttgtttaaattcaattttcattaaaatgaaggctcttgctaaagttattttaa

SEQ ID NO: 135250 - DNA, 497 bp, Homo sapiens
  misc_feature (1)...(497): n = a,t,c or g
cccttggaaaaccngntcancccccaggcatcccctgacccggactggaaacggatataaaggttgcgtccagctacacttgtatgaagtttctgtagacgtgcaaatctgctagtgctggcaaatgccttctttatcactggcgaacccttcagatgtttcgagccaggctttcacttctgcagagtcacaagcacgtggaagacgcacaactgggccacgagtcatcccatctgcaaggactcggctgctggcacctccaccaagctacacagtatatgttagagaagcaagcacatgttacccaaaaatgctcatgcttgacccaaaaggtatcactaattgtccttaaaactcttctcattgccttacttatgatgtatttttaaactggcaaatatataaatgccaacttacacctattgctctgcagcctctattggtgctggccaccctcgtgccaagcttggcgtaagcatgctatagatgtgccccgt

SEQ ID NO: 135251 - DNA, 2469 bp, Homo sapiens
atgttgtcaagactttttcgaatgcatggcctctttgtggcctcccatccctgggaagtcatagtggggacagtgacactgaccatctgcatgatgtccatgaacatgtttactggtattgctggccttttcacaattttctcaagttttgtattcagtacagttgtcattcacttcttagacaaagaattgacaggcttgaatgaagctttgccctttttcctacttttgattgacctttccagagcaagcacattagcaaagtttgccctcagttccaactcacaggatgaagtaagggaaaatattgctcgtggaatggcaattttaggtcctacgtttaccctcgatgctcttgttgaatgtcttgtgattggagttggtaccatgtcaggggtacgtcagcttgaaattatgtgctgctttggctgcatgtcagttcttgccaactacttcgtgttcatgactttcttcccagcttgtgtgtccttggtattagagctttctcgggaaagccgcgagggtcgtccaatttggcagctcagccattttgcccgagttttagaagaagaagaaaataagccgaatcctgtaactcagagggtcaagatgattatgtctctaggcttggttcttgttcatgctcacagtcgctggatagctgatccttctcctcaaaacagtacagcagatacttctaaggtttcattaggactggatgaaaatgtgtccaagagaattgaaccaagtgtttccctctggcagttttatctctctaaaatgatcagcatggatattgaacaagttattaccctaagtttagctctccttctggctgtcaagtacatcttctttgaacaaacagagacagaatctacactctcattaaaaaaccctatcacatctcctgtagtgacacaaaagaaagtcccagacaattgttgtagacgtgaacctatgctggtcagaaataaccagaaatgtgattcagtagaggaagagacagggataaaccgagaaagaaaagttgaggttataaaacccttagtggctgaaacagataccccaaacagagctacatttgtggttggtaactcctccttactcgatacttcatcagtactggtgacacaggaacctgaaattgaacttcccagggaacctcggcctaatgaagaatgtctacagatacttgggaatgcagagaaaggtgcaaaattccttagtgatgctgagatcatccagttagtcaatgctaagcatatcccagcctacaagttggaaactctgatggaaactcatgagcgtggtgtatctattcgccgacagttactttccaagaagctttcagaaccttcttcttctccagtacctaccttacaggggttataaattactccctttggtgatggggagcttgttgtgagaatgttattggatatatgcccatccctgttggagtggcaggacccctttgcttagatgaaaaagaatttcaggttccaatggcaacaacagaaggttgtcttgtggccagcaccaatagaggctgcagagcaataggtcttggtggaggtgccagcagccgagtccttgcagatgggatgactcgtggcccagttgtgcgtcttccacgtgcttgtgactctgcagaagtgaaagcctggctcgaaacatctgaagggttcgcagtgataaaggaggcatttgacagcactagcagatttgcacgtctacagaaacttcatacaagtatagctggacgcaacctttatatccgtttccagtccaggtcaggggatgccatggggatgaacatgatttcaaagggtacagagaaagcactttcaaaacttcacgagtatttcccctgaaattgcagattctaagccgttaagtggtaactattgtactgacaagaaacctgctgctataaattggatagagggaagaggaaaatctgttgtttgtgaaactgtcattccagccaaggttgtcagagaagtattaaagactaccacagaggctatgattgaggtcaacattaacaagaatttagtgggctctgccatggctgggagcataggaggctacaacgcccatgcagcaaacattgtcaccgccatctacattgcctgtggacaggatgcagcacagaatgttggtagttcaaactgtattactttaatggaagcaagtggtcccacaaatgaagatttatatatcagctgcaccatgccatctatagagataggaacgatgctaggtgttcaaggagcatgcaaagataatcctggggaaaatgcccggcagcttgcccgaattgtgtgtgggaccgtaatggctggggaattgtcacttatggcagcattggcagcaggacatcttgtcaaaagtcacatgattcacaacaggtcgaagatcaatttacaagacctccaaggagcttgcaccaagaagacagcctga

SEQ ID NO: 135252 - DNA, 4897 bp, Homo sapiens
ctaggaccaataggcaggccctagtgctgggactcgaacggctattggttggccgagccgtggtgagagatggtgcggtgcctgttcttggccctgcagagagctgtgggcggttgttaaggcgaccgttcgtgacgtagcgccgtcaggccgagcagcccccaggcgattggctagacaatcgaacgatcctctcttattggtcgaaggctcgtccagctccgagcgtgcgtaaggtgagggctccttccgctccgcgactgcgttaactggagccaggctgagcgtcggcgccggggttcggtggcctctagtgagatctggaggatccaaggattctgtagctacaatgttgtcaagacttttttcgaatgcatggcctctttgtggcctcccatccctgggaagtcatactggggacagtgacactgaccatctgcatgatgtccatgaacatgtttactggtaacaataagatctgtggttggaattatgaatgtccaaagtttgaagaggatgttttgagcagtgacattataattctgacaataacacgatgcatagccatcctgtatatttacttccagttccagaatttacgtcaacttggatcaaaatatattttgggtattgctggccttttcacaattttctcaagttttgtattcagtacagttgtcattcacttcttagacaaagaattgacaggcttgaatgaagctttgccctttttcctacttttgattgacctttccaagagcaagcacattagcaaagtttgccctcagttccaactcacaggatgaagtaagggaaaatattgctcgtggaatggcaattttaggtcctacgtttaccctcgatgctcttgttgaatgtcttgtgattggagttggtaccatgtcaggggtacgtcagcttgaaattatgtgctgctttggctgcatgtcagttcttgccaactacttcgtgttcatgactttcttcccagcttgtgtgtccttggtattagagctttcttcgggaaagccgcgagggtcgtccaatttggcagctcaaccattttgcccgagttttagaagaagaagaaaataagccgaatcctgtaactcagagggtcaagatgattatgtctctaggcttggttcttgttcatgctcacagtcgctggatagctgatccttctcctcaaaacagtacagcagatacttctaaggtttcattaggactggatgaaaatgtgtccaagagaattgaaccaagtgtttccctctggcagttttatctctctaaaatgatcagcatggatattgaacaagttattaccctaagtttagctctccttctggctgtcaagtacatcttctttgaacaaacagagacagaatctacactctcattaaaaaaccctatcacatctcctgtagtgacacaaaagaaagtcccagacaattgttgtagacgtgaacctatgctggtcagaaataaccagaaatgtgattcagtagaggaagagacagggataaaccgagaaagaaaagttgaggttataaaacccttagtggctgaaacagataccccaaacagagctacatttgtggttggtaactcctccttactcgatacttcatcagtactggtgacacaggaacctgaaattgaacttcccagggaacctcggcctaatgaagaatgtctacagatacttgggaatgcagagaaaggtgcaaaattccttagtgatgctgagatcatccagttagtcaatgctaagcatatcccagcctacaagttggaaactctgatggaaactcatgagcgtggtgtatctattcgccgacagttactttccaagaagctttcagaaccttcttctctccagtacctaccttacagggattataattactccttggtgatgggagcttgttgtgagaatgttattggatatatgcccatccctgttggagtggcaggacccctttgcttagatgaaaaagaatttcaggttccaatggcaacaacagaaggttgtcttgtggccagcaccaatagaggctgcagagcaataggtcttggtggaggtgccagcagccgagtccttgcagatgggatgactcgtggcccagttgtgcgtcttccacgtgcttgtgactctgcagaagtgaaagcctggctcgaaacatctgaagggttcgcagtgataaaggaggcatttgacagcactagcagatttgcacgtctacagaaacttcatacaagtatagctggacgcaacctttatatccgtttccagtccaggtcaggggatgccatggggatgaacatgatttcaaagggtacagagaaagcactttcaaaacttcacgagtatttccctgaaatgcagattctagccgttagtggtaactattgtactgacaagaaacctgctgctataaattggatagagggaagaggaaaatctgttgtttgtgaagctgtcattccagccaaggttgtcagagaagtattaaagactaccacagaggctatgattgaggtcaacattaacaagaatttagtgggctctgccatggctgggagcataggaggctacaacgcccatgcagcaaacattgtcaccgccatctacattgcctgtggacaggatgcagcacagaatgttggtagttcaaactgtattatctttaatggaagcaagtggtcccacaaatgaagatttatatatcagctgcaccatgccatctatatagattggaacgggggggggtgggaccaacctactacctcagtaggccgtagctgcagatgctaggtgctcaaggatcatgcaaagataatcctggcgaaaatgcccggcagcttgcccgaattgtgtgcgggaccgccctggctggggaattgtcacttatgggcagcattggcagcaggacatcttgtcaaaagtcacatgatttcacaacaggtcgaagatcaattttacaagacctccaaggagcttgcaccaagaagacagcctgaatagcccgacagttctgaactggaacatgggcattgggttctaaaggactaacataaaatctgtgaattaaaaaagctcaatgcattgtcttgtggaggatgaatagatgtgatcactgagacagccacttggtttttggctctttcagagaggtctcaggttctttccatgcagactcctcagatcttgaacacagtttagtgcttttacatgctgtgctcttttgaaggggttttcaacaaggaatattgtatgttaaagcatcagaggtgggtaatctacagcttcacctctggaagggcaatataagctggggaaaaaaggtttgatgaaaatcttgaagttcatggtgatcaaggcaattgaccttctccctcactcctgccagttgaaaatggatttttaaaattgattactgtagctgatgaaactcctgattttgtaggtaatttattaagtctgggatgtacaacttcaagaagtaaggagctaagtttctaagttcattttttgtaaattaatacttcatttggtgctggtctattttgcattttggggggtaatcagcactattcttcagaaggggacctgttttcttcaagggaagaaatactcttattcccaaactacaggaataatgtgttaaacatgctaaatagttctatcagggaaaacaaatcactgtatttatctccgcaggcttatttgttcagagggggccttttgttttaaatattaaatgttttaaatataaatgtttgtctgggattgggctattaacatgtcttttcaggcattagggcttttaagaaccacaggggttttgtattctttacctaaagatatcagagctcttaagtgttgcttaggatgaggggtgactgtccaagtaccaagccaagcgctgggaccttagaaatcgattgtagaaacacagttttgaaagaaaaataccatgtctctaagccaactttaattgcttaaaagacatttttatttacgttgaaaaatctagttttttttgtaaaactgtattcaaatcctgtatatgttgtaaataaaacttatgcctagtttattggaagtgttccaagaaataaaaatcaactctgtgtacctgataaaaatactcctagccccgggcccagagaaagataatgttcctttaaaagttgtccccaggaaacccctggcttgctttgccgagccctaatgaaaggggaaagtccagctttccaggagcccagtgaaggagccacgtgaatggccctaggaactgtgcctaggttcctgtggccagggaggttggtgacttgaaacatttcacacagggctcttttgatgggacccacggaacgctctttagcttttcttcaggggggttcagcagagttattgaatcttaatttttttttaatgtacaagttttgtataaataataaagaactccttaattttgtattacatctaaatgcttcaagtgttgctccttggaaagcctgatgatgtcctcttgtagaagatggactctgaaaaacattccgaggaaacccatggccagccatggagagcccccttagtgattgtgtcctgccattgttattgtggaagatttacccttttctgttgtacagtaaagccttaaattgcttttgttgtgacttttttagcccagtgacttttttctgagcttttcatggaagtggcgagtgaaaaatatgttgagtgttcattttagtgactgtaattaatatcttgctggattaatgttttgtacaattactaaattgtatacattttgttatagaatacttttttctagtttcagtaaataatgaaaaggaagttaataccaaaaaaaaaaaaaaaaaa

SEQ ID NO: 135253 - DNA, 482 bp, Homo sapiens
  misc_feature (1)...(482): n = a,t,c or g
tgcaaatcaagaggttccaatcttcgtgttcactttaagaacactcgtgaaactgctcaggccatcaagggtatgcatatacgaanagccacgaagtatctgaaagatgtcactttacagaaacagtgtgtaccattccgacgttacaatggtggagttggcaggtgtgcgcaggccaagcaatggggctggacacaaggtcggtggcccaaaaagagtgctgaattctctggtcattgagcatatccaagtgaacaaagcacctaagatgcgccgccggacctacagagctcatggtcggattaacccatacatgagctctccctgccacattgagatgatccttacggaaaaggaacagattgttcctaaaccagaagaggaggttgcccagaagaaaaagatatcccagaagaaactgaagaaacaaaaacttatggcacgggagtaaattcagcattaaaataaatgtaattaaaagg

SEQ ID NO: 135254 - DNA, 879 bp, Homo sapiens
atggctgcatcaagcctagctgtacggaccttttccacagtacgggtctgggccctgtgcccctgggtaacctgtccaggcgcactggccttcctgctgctccctgcacactcagggcctcccagcgccatcagggcccttgtgcttgctgttccttctgcctggaatgcacttcctcctttatctcatcaaggttttgactcagatgttatcttcatgaaatcttacctgacaatcttgattaaactgaacattgggaacgtggccatcaacaagcagatggatgaacagactggggtgcacccttctgtggggatactgctcagccaggaaagggagcacctgcaccaatggctccacgagcagggctcggagctggccctctcctgcttcggagccgcgctgactggtgaggaaagtgggaaccgccataccgtgtctggattcggtgggatcgtgtgtgtccagcagcagtcgcgcagcgcctggcgtgagtgcaaattcaaggattcggtcaaaggagaaccaatagctgcaaattgtaaatcctgtgaaattgtctttgggttccgtcctgagaggccggttcgggaacgtgccctgtgtaaaagtttggcagagagtaacgctgaacttaagggtttagatgtagattctctggtcactgagcatatccaagtgaacaaagcacctaagatgcgccgccggacctacagagctcgtggtcggattaacccatacatgagctctccctgccacattgagatgatccttactgaaaaggaacagattgttcctaaaccagaagaggaggttgcccagaagaaaaagatatcccagaagaaactgaagaaacaaaaacttatggcacaggagtaa

SEQ ID NO: 135255 - DNA, 1728 bp, Homo sapiens; identical to SEQ ID NO: 121319

SEQ ID NO: 135256 - DNA, 952 bp, Homo sapiens
ggcacgaggagcaagcctggagggtgcctggattggtgaggcccgtgtggctacttctgtggaagcagtgctgtagttactggaagataaaagggaaagcaagcccttggtgggggaaagtatggctgcgatgatggcatttcttaggacacctttggattaataatgaaccacactctcttctgaagcaagctgttcgaatcatctgatatttatactgaatgagttactgtaagtacgtattgacagaattacactgtactttcctctagggtgatctgtgaaaatggttcgctattcacttgaccccggaggaaccccacgaaaatcatgcaaaatcaaagaggttccaatcttcgtgttccctttaaggaccactcgtgaaaactgcctcaggcccatcaaagggtatgccatatacgaaaaagccccacgaagtatcctgaaagatgtccaccttaccagaaaccagtgtgtccccattcccgaccgttacaatgggtgacagttgggccaggtgtgccgcaggcacaagcaaatggggcctgggaccaccaagggtcgggtggccccaaaaaggagtgctgaaatttttgcctgcacatgccttaaaaaccgcagagatgtaatgctgaactctaagggtttagatgtagattctctggtcattgagcatatcccaagtgaacaaagcaccctaagatgccgccgccggacctacagagctcatggtcggattaacccatacatgagctctccctgccacgattgagatgactccttacggaaaaggaacagattgttcctaaaccagaagaggaggttgcccagaagaaaaagatatccccagaagaaactgaaagaaacaaaaacttattggcacgggagtaaatttcagcattaaaataaatgtaaataaaaggaaaaaaaaaaaaaaaaaaaaagtcgacgc

SEQ ID NO: 135257 - DNA, 1926 bp, Homo sapiens
atgagcaccaccccctgctccacggagcccagtcccatcgaccacccaagggctgaggagtgcgggcgcatggcaactccacctgcagcccccgtgtgggatccactgggtgaagccagctgggctcctgagtctgacctggctggaaatgagtacgacctgactggcctaagcacagtcaggaaaccttggacggctgttgacacctctgtcgatgggagaaagaggactttctatttgagcgtttgcaatcctctcccttacattcctggatgccagggcagcgcagtggggtcttgcttagtgtcagaaggcaatagctggaatctgggtgtggtgcagatgagtccccaagccgcggcgaatggatctttgagcatcatgtatgtcaacggtgacaagtgtgggaaccagcgcttctccaccaggatcacgtttgagtgtgctcagatatcgaccgaatgttccgtgaggaatggaagctctattgttgacttgtctccccttattcatcgcactggtggttatgaggcttatgatgagagtgaggatgatgcctccgataccaaccctgatttctacatcaatatttgtcagccactaaatcccatgcacggagtgccctgtcctgccggagccgctgtgtgcaaagttcctattgatggtccccccataaccgaatgttccgtgaggaatggaagctctattgttgacttgtctccccttattcatcgcactggtggttatgaggcttatgatgagagtgaggatgatgcctccgataccaaccctgatttctacatcaatatttgtcagccactaaatcccatgcacggagtgccctgtcctgccggagccgctgtgtgcaaagttcctattgatggtccccccatacgtgtgtctcatgaccccagctatggctgttatcacacggtctcatatctaaggcatcgttcagaacgtctgctactctatacatttaaaatgacttgtagggacaggcccagtcctaccttccactctgacaacgggacaggcttccacagttctccagataaacacgtactcacaaccatcctgaagctgaaatgctggccctatatgagtgctgagagacacgacaacaatgtgaagctaccctgtaaactaaatatggtatcacagaaaagctggaaaaccaagggtccaagaactttctggaactacccagtgtctcaatggcaacaagaaaccagagaaggagggggcagtccacaggcagggaatgcacagatgtgcccaaaaacagaccagcaggctgaactgggcaacctaggcatctccccgtggaacaccaaacctggatccttcctgagactgagagaagaagtgggcggcccaagctcagtgccctttttctcaggtgagaaagaaggacccccgtgtgttggccgaatgggaatcaccattgcaatacaaatgatctgcctggtgaatgctgagctgaaccccacattcgtcagggcatgctcagccttctgggtggcagcccccttgagccctctcttggcagcagctgagcatttccaaagaagaaaaccccccaggagtgggaattatggagctgcagcccccaagagcatgggcacctgccttatgcctggccaaacagctgaagccactcacgactttgaatgtggatccagggcacaaagaagcagggagagaagagaatctattctagcggcactgatagcagcagcggtatggagcttccagaggatccccggcaacaatgtggttatcacaagctacatgacaaacagaggcttcttcgaggataaaaaggcaacatttgcgccaagcttcttaatgaacatcaaaggcaataaaacatccgttgtcaaaaacagcatcctggagcaaggacagctgacagtcaactaa

SEQ ID NO: 135258 - DNA, 280 bp, Homo sapiens
atgagcaccaccccctgctccacggagcccagtcccatcgaccacccaagggctgaggagtgcgggcgcatggcaactccacctgcagcccccgtgtgggatccactgggtgaagccagctgggctcctgagtctgacctggctggaaatgagtacgacctgactggcctaagcacagtcaggaaaccttggacggctgttgacacctctgtcgatgggagaaagaggactttctatttgagcgtttgcaatcctctcccttacattcctggatgccagg

SEQ ID NO: 135259 - DNA, 424 bp, Homo sapiens
ttcacagctgcttacagcgagaaggggttggtttacatgagcatctgtggggagaatgaaaactgccctcctggcgtgtgtgagtgctgtggtctctcgtgtgttgtctgactctcccgtcctctggggttgtcctcagtctctttgcatgctaatggcaaaaaggatgagcagagccaggaagctgagacgcttttgtctcctgcagcagtcaccccatgtgggggacacatggtcatgtgatggaatgaacattcaatgtaaaacaatggttaaagccggattggacacttgaagttataagtgttggctatgaaattgatggtcctgacttgcgaaagttctcatcaaaaaataggccatcgagtctgtgattgtgttttctccgcctttcccttgtggagcaggggcctgctttggacaa

SEQ ID NO: 135260 - DNA, 638 bp, Homo sapiens
accgaatgttccgtgaggaatggaagctctattgttgacttgtctccccttattcatcgcactggtggttatgaggcttatgatgagagtgaggatgatgcctccgataccaaccctgatttctacatcaatatttgtcagccactaaatcccatgcacggagtgccctgtcctgccggagccgctgtgtgcaaagttcctattgatggtccccccataaccgaatgttccgtgaggaatggaagctctattgttgacttgtctccccttattcatcgcactggtggttatgaggcttatgatgagagtgaggatgatgcctccgataccaaccctgatttctacatcaatatttgtcagccactaaatcccatgcacggagtgccctgtcctgccggagccgctgtgtgcaaagttcctattgatggtccccccatacgtgtgtctcatgaccccagctatggctgttatcacacggtctcatatctaaggcatcgttcagaacgtctgctactctatacatttaaaatgacttgtagggacaggcccagtcctaccttccactctgacaacgggacaggcttccacagttctccagataaacacgtactcacaaccatcctgaagctgaaatgctg

SEQ ID NO: 135261 - DNA, 399 bp, Homo sapiens
atgctacctgaagggcacaggctctggccacgtgaggtgctcgatactctgttgccttctgccatgactgtaagtttcctgaggcttctccagatgcagatgctgccattcttcctttacaacctgcggaactgtctcctgactcagaagctaacttatgaaaatggcttgttaaaaatgaacttcacggggggggacacttgccataaggtttatcagcgctccacagccatcttcttctactgtgaccgcggcacccagcgggtacaactactggcctgctccctatcccgggaggaagaaaagactgcctacacacggttagggttgaatgcctgctttgtggctctagaggatccccgttcttctggagcccgagccaacaaattctgtgactga

SEQ ID NO: 135262 - DNA, 972 bp, Homo sapiens
atgcaggggatgctggggatcctagcatggggtggggtgcagggatggcctcccaatggaatgccgattcttgtgccagatatttatggcctttatgcagatgaactcttactgtgcgagacacaaaaaggctacaaggaggacagtctgagcagaaaccaggacatgactgaatcttcacaaaagtggactgggaaaggcagtgcagttgagcacctcgtggaaagcggtgaatggaccatgcaccctgcacggcctgttagcgcttgccgatgtcctagtgattgccacgtgccactgagtccaggtgcttgctggccgaagcttgagtgtctctctgaaggttcatcctatatttcagatggaaaagaatatttgttttatttgaatgtctgtggagaaactgaaatacagttctgtaataaaaaacaagctgcagtttgccaagtgaaaaagagcgatacctctcaagtcaaagcagcaggaagataccacaatcagaccctccgacccagcgagagctcatggtccctcctctttgtggtcttggttttcttcccaggagtccatagtcccttctctctggatgaggctctcactctgtgcccccagaactgtctgccccctgggactgtgtctgcccccctgaactgtgtctaccccttggctctcagtgcagcagtagcattggctgcgggttctgagttaatggaatgccaccgtcttgtaaattccctggaggtttccacggcagcgcaaggccagagctccaagacccagttctatgcctgtttgtgtcgtctgagcacccacctttggaaatacagtgaggagtcagggaggagacttgtctgctccttttaccaaccatcggaacttaacccagcgcttaacttgagcttccttgtgggcacacggcttcaagaaggggctgctctgttattcatccagagcggcttcaccatagtttaa

SEQ ID NO: 135263 - DNA, 465 bp, Homo sapiens
atggctggctctgcaaacaaccagcaactgttgtcttctatcaagtggcttgggaagcacgagaaggttggctgggcccgggtcacaggtagcgctgccacttcccagccacataacttggttaattactcagggtttcgagagaagaggctgttcagagcctctggggacatgaggaccaatggggacaactacctgtatgagatccaactttcctccatcacaagctccagaaacccggcgtgctctggagccaacatatgccaggttcccagcatccagcacaatgcatggcacacagtcgcccaacaagttttgtcaaataagctctttgaccatggggatctttctagagtccacacgcagggcttcaaccctaacggttcacagtgtccatgccaaggtgtgtccggattggtgggtcttggtctcacgacctcaaggatgaagccgcggcacctcgcg

SEQ ID NO: 135264 - DNA, 840 bp, Homo sapiens
tcatggtaccagctcctctttgtaccgctggtagaattcggctgtgaatccatctggtgctggcctttttttggttggtaagctactaaatactgcctgaatttcagaacttgttattggtctattcagggattcaactgctttctggtttattcttgggagggtgtatgtgtccaggaatttattcatgtcttctagaatttctagtttatttgagtagaggtatttatagtattctctgatggtagtttctatttcttggtaatggcaaagaccggcccggtggttgagtacagcggcagcctccttctggaatacgtgaatgggtcggcctgcaccaccagcgatgtcagacagaccacatataccacgaggatccatctcgtctgctccaggggcagcctggtaaggcactgctgctggctggtgaccttcactgctgcattttttgactgagcgttgccttatgtgtctcttaacagcagcagtcttcatggctgcgatttctgaagtgtaagcctcatcttttgctgcggagtttgaggctctggtgacatacactgtttcctggattttttttctgagtcgtacagacattatcttgcctcttagttcttgtgagttgaggatcgtggcagtggaacggggcttagagatagtttggtcctgtaggggccaagggaaagcttccctttcaccctttgaagtttccctgaaaatcagatgatcacaaggtcccacagtaggccatctgctggctgaagagcaagcagagccagtctgagttccaaaactgaagaacttggagtcagatgtttgaaggcaggaagcatccagcat

SEQ ID NO: 135265 - DNA, 843 bp, Homo sapiens
atggaaaatctgaagtgtgatgaagatgaggacattgggaggccacaagtcttcagtgaagtgcgtgggtgtgatgtgacatttgagtggaaaacaaaagttgtctgccctccaaagaagttggagtgcaaattcgtccagaaacacaaaacctacgacctgcggctgctctcctctctcaccgggtcctggtccctggtccacaacggagtctcaagacccatgcataaagccacttgctggccggggcttgacattattccttcctgtctggctctgcaccgtattgaaactgagttaatgggcaaatttgatgaaggtaaactgcccaccgatccacacctgatgctccgactggccattgaaactgttgctcatgactatgatgtcatagttattgacagcgcgcctaacctgggtatcggcacgattaatgtcgtatgtgctgctgatgtgctgattgttcccacgcctgctgagttgtttgactacacctccgcactgcagtttttcgatatgcttcgtgatctgctcaagaacgttgatcttaaagggttcgagcctgatgtacgtattttgcttaccaaatacagcaatagtaatggctctcagtccccgtggatggaggagcaaattcgggatgcctggggaagcatggttctaaaaaatgttgtacgtgaaacggatgaagttggtaaaggtcagatccggatgagaactgtttttgaacaggccattgatcaacgctcttcaactggtgcctggagaaatgctctttctatttgggaacctgtctgcaatgaaattttcgatcgtctgattaaaccacgcctgggagattag

SEQ ID NO: 135266 - DNA, 666 bp, Homo sapiens
atggatatcggccgggtagcaggaccaccaatactcaatccaatagcaaatgagatttacttgaattttgaaagcagtactccttgcttagcggacaagcatttcaactacacctcgctcatcgcgtttcactgtaagagaggtgtgagcatgggaacgcctaagctgttaaggaccagcgagtgcgactttgtgttcgaatgggagactcctgtcgtctgtcctgatgaagtgaggatggatggctgtaccctgacagatgagcagctcctctacagcttcaacttgtccagcctttccacgagcacctttaagggccggggcagctctttccggcacgattataaagcaacctactgcttcatcacgagaaccacacagggtcctggtggaaccacagattccctgtgtattctgcctcagtgggtcccgaataggaatccaggtgatcctgaggatcagccaagtttgagaaacactaatgtaactacctctgtctcccttggcgtgagaccactttccaatgatcagcagtcatggatggtagaagacagctggcctggtgtgggggctgtggctgaaaccaagactgatagaggagatccttttgttgggagagtcaaaagccaggaaaatgcccacatcccccccgagtggacctcatga

SEQ ID NO: 135267 - DNA, 1173 bp, Homo sapiens
tgctctgcctgctggcacagggtgacaaaacagacaccctggcttgttgcatgcccattggaatagtcactggccaccacgtcaactggtcagggctattattactaaatcgtcctgaagccctaagttccgggattctatggagggctctagcatggaggagagtgaagactgagatgagcccataggtgttcctctcctctctgcgccaccagcaggcaccaccaagataaaggcagaccaactgcacctgcagggagcagcccccaagatttgcccctgcctgcaagatggcagcttgggccaacactactgcccctttgtgtcgttttctaggtactatataaatctgtgccagaaaatatataaagggcccctgggctgctctgaaagggccagcatttgcagaaggaccacaactggtgacgtccaggttctggggactcgttcacacgcagaaagctgggtgtcataggtccaagagtggttgtcacgacttcaaagcgttatccgtgtggtggaaataagaccgcatcctccgtgatagaattgacttgtacaaagccggtgggcagacctgcattcaagaggtttgaaatcgacagctgcacttactacttcagctgggactccggggctgcctgcgcagtgaagcctcaggaggtgcagatggtgaatgggaccatcaccaaccctataaatggcaagagcttcagcctcggagatatttattttaagctgttcagagcctctggggacatgaggaccaatggggacaactacctgtatgagatccaactttcctccatcacaagctccagaaacccggcgtgctctggagccaacatatgccaggtgaagcccaacgatcagcacttcagtcggaaagttggaacctctgacaagaccaagtactaccttcaaggtaatccgtggcttcccacaaagttccacatttaacttcctccaaggaaggggattaaaattttcaactaactcccttcagttgaaatctcggaccacttttaaaacaaaaaccttggtctaattctttactttgttatgaatttcttgacagtggattgagcgatacgtgtcagaactaagcatttccctgtaggcaaattgtgtcttagttatcaagtaaatgtacaaaaaaactaaaaaaaaaaa

SEQ ID NO: 135268 - DNA, 9246 bp, Homo sapiens
  misc_feature (1)...(9246): n = a,t,c or g
cgagcccagtcgagccgcgctcacctcgggctcccgctccgtctccacctccgcctttgccctggcggcgcgaccccgtcccgggcgcggcccccagcagtcgcgcgccgttagcctcgcgcccgccgcgcagctccgggcccggcgcgatgggggccgccgccggccggagcccccacctggggcccgcgcccgcccgccgcccgcagcgctctctgctcctgctgcagctgctgctgctcgtcgctgccccggggtccacgcaggcccaggccgccccgttccccgagctgtgcagttatacatgggaagctgttgataccaaaaataatgtactttataaaatcaacatctgtggaagtgtggatattgtccagtgcgggccatcaagtgctgtttgtatgcacgacttgaagacacgcacttatcattcagtgggtgactctgttttgagaagtgcaaccagatctctcctggaattcaacacaacagtgagctgtgaccagcaaggcacaaatcacagagtccagagcagcattgccttcctgtgtgggaaaaccctgggaactcctgaatttgtaactgcaacagaatgtgtgcactactttgagtggaggaccactgcagcctgcaagaaagacatatttaaagcaaataaggaggtgccatgctatgtgtttgatgaagagttgaggaagcatgatctcaatcctctgatcaagcttagtggtgcctacttggtggatgactccgatccggacacttctctattcatcaatgtttgtagagacatagacacactacgagacccaggttcacagctgcgggcctgtccccccggcactgccgcctgcctggtaagaggacaccaggcgtttgatgttggccagccccgggacggactgaaggtggtgcgcaaggacaggcttgtcctgagttacgtgagggaagaggcaggaaagctagacttttgtgatggtcacagccctgcggtgactattacatttgtttgcccgtcggagcggagagagggcaccattcccaaactcacagctaaatccaactgccgctatgaaattgagtggattactgagtatgcctgccacagagattacctggaaagtaaaacttgttctctgagcggcgagcagcaggatgtctccatagacctcacaccacttgcccagagcggaggttcatcctatatttcagatggaaaagaatatttgttttatttgaatgtctgtggagaaactgaaatacagttctgtaataaaaaacaagctgcagtttgccaagtgaaaaagagcgatacctctcaagtcaaagcagcaggaagataccacaatcagaccctccgatattcggatggagacctcaccttgatatattttggaggtgatgaatgcagctcagggtttcagcggatgagcgtcataaactttgagtgcaataaaaccgcaggtaacgatgggaaaggaactcctgtattcacaggggaggttgactgcacctacttcttcacatgggacacggaatacgcctgtgttaaggagaaggaagacctcctctgcggtgccaccgacgggaagaagcgctatgacctgtccgcgctggtccgccatgcagaaccagagcagaattgggaagctgtggatggcagtcagacggaaacaaagaagaagcattttttcattaatatttgtcacagagtgctgcaggaaggcaaggcacgagggtgtcccgaggacgcggcagtgtgtgcagtggataaaaatggaagtaaaaatctgggaaaatttatttcctctcccatgaaagagaaaggaaacattcaactctcttattcagatggtgatgattgtggtcatggcaagaaaattaaaactaatatcacacttgtatgcaagccaggtgatctggaaagtgcaccagtgttgagaacttctggggaaggcggttgcttttatgagtttgagtggcacacagctgcggcctgtgtgctgtctaagacagaaggggagaactgcacggtctttgactcccaggcagggttttcttttgacttatcacctctcacaaagaaaaatggtgcctataaagttgagacaaagaagtatgacttttatataaatgtgtgtggcccggtgtctgtgagcccctgtcagccagactcaggagcctgccaggtggcaaaaagtgatgagaagacttggaacttgggtctgagtaatgcgaagctttcatattatgatgggatgatccaactgaactacagaggcggcacgccctataacaatgaaagacacacaccgagagctacgctcatcacctttctctgtgatcgagacgcgggagtgggcttccctgaatatcaggaagaggataactccacctacaacttccggtggtacaccagcttatgcctgcccggaggagcccctggaatgcgtagtgaccgacccctccacgctggagcagtacgacctctccagtctggcaaaatctgaaggtggccttggaggaaactcggtatgccatggacaactcaggggaacatgtcacgtggaggaaatactacattaacgtgtgtcggcctctgaatccagtgccgggctgcaaccgatatgcatcggcttgccagatgaagtatgaaaaagatcagggctccttcactgaagtggttttccaatcaagtaaacttgggaaatggcaaaagaccggcccggtggtttgaggacagcggcagcttccttctggaatacgtgaatgggtcggcctgcaccaccagcgatggcagacagaccacatataccacgaggatccatctcgtctgctccaggggcaggctgaacagccaccccatcttttctctcaactgggagtgtgtggtcagtttcctgtggaacacagaggctgcctgtcccattcagacaacgacggatacagaccaggcttgctctataagggatcccaacagtggatttgtgtttaatcttaatccgctaaacagttcgcaaggatataacgtctctggcattgggaagatttttatgtttaatgtctgcggcacaatgcctgtctgtgggaccatcctgggaaaacctgcttctggctgtgaggcagaaacccaaactgaagagctcaagaattggaagccagcaaggccagtcggaattgagaaaagcctccagctgtccacagagggcttcatcactctgacctacaaagggcctctctctgccaaaggtaccgctgatgcttttatcgtccgctttgtttgcaatgatgatgtttactcagggcccctcaaattcctgcatcaagatatcgactctgggcaagggatccgaaacacttactttgagtttgaaaccgcgttggcctgtgttccttctccagtggactgccaagtcaccgacctggctggaaatgagtacgacctgactggcctaagcacagtcaggaaaccttggacggctgttgacacctctgtcgatgggagaaagaggactttctatttgagcgtttgcaatcctctcccttacattcctggatgccagggcagcgcagtggggtcttgcttagtgtcagaaggcaatagctggaatctgggtgtggtgcagatgagtccccaagccgcggcgaatggatctttgagcatcatgtatgtcaacggtgacaagtgtgggaaccagcgcttctccaccaggatcacgtttgagtgtgctcagatatcgggctcaccagcatttcagcttcaggatggttgtgagtacgtgtttatctggagaactgtggaagcctgtcccgttgtcagagtggaaggggacaactgtgaggtgaaagacccaaggcatggcaacttgtatgacctgaagcccctgggcctcaacgacaccatcgtgagcgctggcgaatacacttattacttccgggtctgtgggaagctttcctcagacgtctgccccacaagtgacaagtccaaggtggtctcctcatgtcaggaaaagcgggaaccgcagggatttcacaaagtggcaggtctcctgactcagaagctaacttatgaaaatggcttgttaaaaatgaacttcacggggggggacacttgccataaggtttatcagcgctccacagccatcttcttctactgtgaccgcggcacccagcggccagtatttctaaaggagacttcagattgttcctacttgtttgagtggcgaacgcagtatgcctgcccacctttcgatctgactgaatgttcattcaaagatggggctggcaactccttcgacctctcgtccctgtcaaggtacagtgacaactgggaagccatcactgggacgggggacccggagcactacctcatcaatgtctgcaagtctctggccccgcaggctggcactgagccgtgccctccagaagcagccgcgtgtctgctgggtggctccaagcccgtgaacctcggcagggtaagggacggacctcagtggagagatggcataattgtcctgaaatacgttgatggcgacttatgtccagatgggattcggaaaaagtcaaccaccatccgattcacctgcagcgagagccaagtgaactccaggcccatgttcatcagcgccgtggaggactgtgagtacacctttgcctggcccacagccacagcctgtcccatgaagagcaacgagcatgatgactgccaggtcaccaacccaagcacaggacacctgtttgatctgagctccttaagtggcagggcgggattcacagctgcttacagcgagaaggggttggtttacatgagcatctgtggggagaatgaaaactgccctcctggcgtgggggcctgctttggacagaccaggattagcgtgggcaaggccaacaagaggctgagatacgtggaccaggtcctgcagctggtgtacaaggatgggtccccttgtccctccaaatccggcctgagctataagagtgtgatcagtttcgtgtgcaggcctgaggccgggccaaccaataggcccatgctcatctccctggacaagcagacatgcactctcttcttctcctggcacacgccgctggcctgcgagcaagcgaccgaatgttccgtgaggaatggaagctctattgttgacttgtctccccttattcatcgcactggtggttatgaggcttatgatgagagtgaggatgatgcctccgataccaaccctgatttctacatcaatatttgtcagccactaaatcccatgcacgcagtgccctgtcctgccggagccgctgtgtgcaaagttcctattgatggtccccccatagatatcggccgggtagcaggaccaccaatactcaatccaatagcaaatgagatttacttgaattttgaaagcagtactccttgcttagcggacaagcatttcaactacacctcgctcatcgcgtttcactgtaagagaggtgtgagcatgggaacgcctaagctgttaaggaccagcgagtgcgactttgtgttcgaatgggagactcctgtcgtctgtcctgatgaagtgaggatggatggctgtaccctgacagatgagcagctcctctacagcttcaacttgtccagcctttccacgagcacctttaaggtgactcgcgactcgcgcacctacagcgttggggtgtgcacctttgcagtcgggccagaacaaggaggctgtaaggacggaggagtctgtctgctctcaggcaccaagggggcatcctttggacggctgcaatcaattgaaactggattacaggcaccagggtgaagcggtcgttttaaagttacgttgaatggtgatcgtttgccctccagaaaccgattgacggcgttcccctgtgtcttccctttcatatttcaatggggaaggagctacgagggagtgcatcatagagagcagggcgaagctgtggtgtagcacaactgcggactacgacagagaccacgagtggggcttctgcagacactcaaacagctaccggacatccagcatcatatttaagtgtgatgaagatgaggacattgggaggccacaagtcttcagtgaagcgcgtgggtgtgatgtgacatttgagaggaaaacaaaagttgtctgccctccacagaagttggagtgcaaattcgtccagaaacacaaaacctacgacctgcggctgctctcctctctcaccgggtcctgggtccctgggtccacaacggagtcttcgtacttatataaatctgtgccagaaaatatattaaagggcccctgggttgcttctgaaagggccagctttgcaggaagggaccacaactggtgacgtccaggtcctgggactcgtttcacacgcagaagctgggtgtcataggtgacaaagttgttgtcactgtactccaaaggttatccgtgtggtggaaataagaccgcatcctccgtgataagaattgacctgtacaaagacggtgggcagacctgcattcaagaggtttgatatcgacagctgcacttactacttcagctgggactcccgggctgcctgcgccgtgaagcctcaaggaggtgcaaattggtgaatgggaaccatcaccaaaccctattaatggctagaagttctaccttcggagatatttattttaagctgttcccaacctttggggacatgaggaccaggggggacaactacctgtatgagatccaactttcctccatcacaagctccagaaacccggcgtgctctggagccaacatatgccaggtgaagcccaacgatcagcacttcagtcggaaagttggaacctctgacaagaccaagtactacctttcaagacggcgatctcgatgtcgtgtttgcctcttcctctaagtgcggaaaggataagaccaagtctgtttcttccaccatttttttccacttgtgaccctctgggggaggacgggatccccgagtttcagtccgagactgccggcctgcccagtacctctttttttggaaccactcaaccctgtgtccctctgggggtggggcttttgacagcgagaatcccgggggacgacggggccagatgcacaaggggctgtcagaacggagccaggcagtcggcgcggtgctcagcctgctgctggtggcgctcacctgctgcctgctggccctggtgctctacaagaaaggagagagggaaacagtgataagttagctgaccacttgctgtaggagaagttccaacgtgtcctacaaatactcaaaggtgaataaggaagaagagacagatgagaatgaaacagagtggctgatggaagagatccagctgcctcctccacggcagggaaaggaagggcaggagaacggcgcatattaccaccaagtcagcgaaagccctcagctccctgcatggcgatgaccaggacagtgaggatgaggttctgaccatcccagaggtgaaagttcactcgggcaggggagctggggcagagagctcccacccagtgagaaacgcacagagcaatgcccttcaggagcgtgaggacgatagggtggggctggtcaggggttgagaaagcgaagaaaaaggaaagtccagctctgcccagccaaaagacaagtgagcttccaccaagctggtgtcccttcccatgacgcaaagcgacgaggaccctccttacacatcctgactccccgagtgccctgcaggggagccacggagccgcgaggacagcccaagcaccctcccaacccaaataagaccttcccactcgatgatgccttcctataattttgccctttaaacagaaacctttcaaaagggaagagtttttgtgaatgggggagagggtgaaggaggtcaggccccactccttcctgcattgtttacagtcattgggaataaggcatggctcaaatcggccacagggcggtgaccttgtgccccagggttttgcccccaagtgcctccatttaaaagcattaaggccggtacggcatcttcaaaacagagggctggcattcgaggaaacccttgctgctttagtcccgatagggtaatttgacccccgatatattttaggcattttaaattctcttccccccattttattgactttgaacaattactcaggttttgaggaaaaagggaaaaaaaaacagccaccgtttcttcctgccaagcaggggtgtgatgtaccagtttgtccatctttgagatggtggaggctgtcagtgtatggggcagcttccggcgggaatgnttgaactggtcattaaagatagtcccctgagttggagctcattactgtctccttttctctttttgtttctgtttcttaaagggcaacacacacgtgcgtgcgaagcacacacacacatacgtgcacaggggtccccgaagtgcctaggttttggaaaagtttgcctggttcctatggcctttaagtcaggaatggcctgcacctttttgcatgatatcttcaagcctgggcgtacagagcacatttgtcagtatttttgccggctggtgaattcaaacaacctgcccaaagattgatttgtgtgtttgtgtgtgtgtgtgtgtgtgtgtgtgtgtgtgtgagtggagttgaggtgtcagagaaaatgaattttttccagatttggggtataggtctcatctcttcaggttctcatgataccacctttactgtgcttatttttttaagaaaaaagtgttgatcaaccattcgacctattaagaaagccttaatttgcaccagtgtgtgacttacagaaaactgccatgaaaaattcattgggccaagagccctcggcccctagccattgcaacttggccttcatgctggagggaggctgggcgggttcagcgcggaggaggagggaggccaaggcgggcaatggcgtggaggaggacgtgaggccgggcggtcacagccatggaggaggagggaggcgcttgtggtgatccttattcatggcggcagcgccctttttcctgccatgtttagtgaatgactttttctcgcattgtagaattgtatatagactctggtgttctattgctgagaagcaaaccggcctgcagcatccctcagcctgtaccggtttggctggcttgtttgatttcaacatgagtgtattttttaaaattgatttttctcttcatttttttttcaatcaactttacctgtaatataaaggtattcaacaatttcaataaaagataaattattaaaaaaaaaaaaaaaa

SEQ ID NO: 135269 - DNA, 299 bp, Homo sapiens
  misc_feature (1)...(299): n = a,t,c or g
tgtcaactgtcaaccactgggaatgatctcactgatgaaaaggccncccaggtttttcacctttccgatcatcacgaataggggaaataaaagaagaaacaactagtcacctaaggtcctgcgagtacaagggtcgacccccaaaggcaggggcagagccagcatctgagagggaggtctcttgaccaatgggcagaatcttcactccaggcacatagcccctagaatttaaatagagaagaatgccattttatcactctgcctctgggtgaaataaagatcagtcttgatgttctaaa

SEQ ID NO: 135270 - DNA, 452 bp, Homo sapiens
gaatgcacagcaaccgtggggaagaggagcagtacgaaattctccgtggctacccagacctgccagattactccagccgagggccctgtggtgacagcccagtacgactgcctcggctgtgtgcatcctatatcaacgcagagcccaggtttttcacctttccgatcatcacgaataggggaaataaaaggagaaaaaacttagtctcttaaggtcctgcgagtacaagggtcgacccccaaaggcaggggcagagccagcatctgagagggaggtctcttgaccaatgggcagaatcttcactccaggcacatagccccaaccacctctgccagcaaccttgagaggaaggacaagaagaaagatgggatagaatttaaatagagaagaatgccattttatcactctgcctctgggtgaaataaagatcagtcttgatgttcaaactctaa

SEQ ID NO: 135271 - DNA, 1110 bp, Homo sapiens
atggaggggctgctactaagtttaacccaggaatcacagtccgaggaaattgactgcaatgacaaggatttatttaaagctgtggatgctgctctgaagaaatataacagtcaaaaccaaagtaacaaccagtttgtattgtaccgcataactgaagccactaagacggttggctctgacacgttttattccttcaagtacgaaatcaaggagggggattgtcctgttcaaagtggcaaaacctggcaggactgtgagtacaaggatgctgcaaaagcagccactggagaatgcacggcaaccgtggggaagaggagcagtacgaaattctccgtggctacccagacctgccagattactccaggtggctggtttatcctctggcactgccctggtgggaaattaaccatttctgactatcccaactcttcccgtgtgctgcattgtacccagtgtgtgcaagggctcaacagaaggaccagaagacataagacctgccctccattgcaggcagcatcccagattgaggagcgcataggctttgagggcagacctggcctggaatctttcagagctccttgccttcttgcctctccttttccttgtctagaaaagggagccgagggccctgtggtgacagcccagtacgactgcctcggctgtgtgcatcctatatcaacgcagagcccagacctggagcccattctgagacacggcattcagtactttaacaacaacactcaacattcctccctcttcacgcttaatgaagtaaaacgggcccaaagacaggataccggtgaatgtacagataatgcatacatcgatattcagctacgaattgcttccttctcacagaactgtgacatttatccagggaaggattttgtacaaccacctaccaagatttgcgtgggctgccccagagatatacccaccaacagcccagagctggaggagacactgactcacaccatcacaaagcttaatgcagagaataacgcaactttctatttcaagattgacaatgtgaaaaaagcaagagtacaggtgtgtaaactatactacaaaagcagtaacactatagtctatgtgcaaattgctgactaa

SEQ ID NO: 135272 - DNA, 918 bp, Homo sapiens
gtggtggctggcaagaaatattttattgacttcgtggccagggaaaccacatgttccaaggaaagtaatgaagagttgaccgaaagctgtgagaccaaaaaacttggcatctcactgatgaaaaggcctccaggtttttcacctttccgatcatcacgaataggggaaataaaagaagaaacaactgtaagtccaccccacacttccatggcacctgcacaagatgaagagcgggattcaggaaaagaacaagggcatactcgtagacatgactggggccatgaaaaacaaagaaaacataatcttggccatggccataaacatgaacgtgaccaagggcatgggcaccaaagaggacatggccttggccatggacacgaacaacagcatggtcttggtcatggacataagttcaaacttgatgatgatcttgaacaccaagggggccatgtccttgaccatggacataagcataagcatggtcatggccacggaaaacataaaaataaaggcaaaaagaatggaaagcacaatggttggaaaacagagcatttggcaagctcttctgaagacagtactacaccttctgcacagacacaagagaagacagaagggccaacacccatcccttccctagccaagccaggtgtaacagttaccttttctgactttcaggactctgatctcattgcaactatgatgcctcctatatcaccagctcccacacagagtgatgacgattggatccctgatatccagatagacccaaatggcctttcatttaacccaatatcagattttccagacacgacctccccaaaatgtcctggacgcccctggaagtcagttagtgaaattaatccaaccacacaaatgaaagaatcttattatttcgatctcactgatggcctttcttaa

SEQ ID NO: 135273 - DNA, 1935 bp, Homo sapiens
atgaaactaattaccatccttttcctctgctccaggctgctactaagtttaacccaggaatcacagtccgaggaaattgactgcaatgacaaggatttatttaaagctgtggatgctgctctgaagaaatataacagtcaaaaccaaagtaacaaccagtttgtattgtaccgcataactgaagccactaagacggttggctctgacacgttttattccttcaagtacgaaatcaaggagggggattgtcctgttcaaagtggcaaaacctggcaggactgtgagtacaaggatgctgcaaaagcagccactggagaatgcacggcaaccgtggggaagaggagcagtacgaaattctccgtggctacccagacctgccagattactccagccgagggccctgtggtgacagcccagtacgactgcctcggctgtgtgcatcctatatccacgcagagcccagacctggagcccattctgagacacggcattcagtactttaacaacaacactcaacattcctccctcttcatgcttaatgaagtaaaacgggcccaaagacaggtggtggctggattgaactttcgaattacctactcaattgtgcaaacgaattgttccaaagagaattttctgttcttaactccagactgcaagtccctttggaatggtgataccggtgaatgtacagataatgcatacatcgatattcagctacgaattgcttccttctcacagaactgtgacatttatccagggaaggattttgtacaaccacctaccaagatttgcgtgggctgccccagagatatacccaccaacagcccagagctggaggagacactgactcacaccatcacaaagcttaatgcagagaataacgcaactttctatttcaagattgacaatgtgaaaaaagcaagagtacaggtggtggctggcaagaaatattttattgacttcgtggccagggaaaccacatgttccaaggaaagtaatgaagagttgaccgaaagctgtgagaccaaaaaacttggccaaagcctagattgcaacgctgaagtttatgtggtaccctgggagaaaaaaatttaccctactgtcaactgtcaaccactgggaatgatctcactgatgaaaaggcctccaggtttttcacctttccgatcatcacgaataggggaaataaaagaagaaacaactgtaagtccaccccacacttccatggcacctgcacaagatgaagagcgggattcaggaaaagaacaagggcatactcgtagacatgactggggccatgaaaaacaaagaaaacataatcttggccatggccataaacatgaacgtgaccaagggcatgggcaccaaagaggacatggccttggccatggacacgaacaacagcatggtcttggtcatggacataagttcaaacttgatgatgatcttgaacaccaagggggccatgtccttgaccatggacataagcataagcatggtcatggccacggaaaacataaaaataaaggcaaaaagaatggaaagcacaatggttggaaaacagagcatttggcaagctcttctgaagacagtactacaccttctgcacagacacaagagaagacagaagggccaacacccatcccttccctagccaagccaggtgtaacagttaccttttctgactttcaggactctgatctcattgcaactatgatgcctcctatatcaccagctcccatacagagtgatgacgattggatccctgatatccagatagacccaaatggcctttcatttaacccaatatcagattttccagacacgacctccccaaaatgtcctggacgcccctggaagtcagttagtgaaattaatccaaccacacaaatgaaagaatcttattatttcgatctcactgatggcctttcttaa

SEQ ID NO: 135274 - DNA, 748 bp, Homo sapiens
gaagggggtcccgatccagaccccaagagaggattcttggatctcgcacaagaaagatttcagggataccggtgaatgtacagataatgcatacatcgatattcagctacgaattgcttccttctcacagaactgtgacatttatccagggaaggattttgtacaaccacctaccaagatttgcgtgggctgccccagagatatacccaccaacagcccagagctggaggagacactgactcacaccatcacaaagcttaatgcagagaataacgcaactttctatttcaagattgacaatgtgaaaaaagcaagagtacagggtctttcaaaagccgaggttttcctgtgcgctcggaggagccatagctgccagctgggctggcggcgggtgcccccagcccttgtgggcggcgggcagagctggcctgggggccgggtcccgtggggggtcgcgcagacagtgtgtccggagcgcccccggcgggagcgcaggctgcggggcgagagggaagaggaggcggcggataaggtgatggcgagaagatggaggaagagcagacgaaggaagagaaaggagatggaagagagaatgtcaccagaggagaccgaaggaacaaattttgactttgcaggagaagctgtgggccaggcagaaagaaaaggaccagctttttctgcagctgaagaaagtttccatgaggaagaaaaacggaggcgaaaggagcagagcgacctgaccttctga

SEQ ID NO: 135275 - DNA, 2160 bp, Homo sapiens
atgggcttcccattaagaccttcacctgcgcatttatcctctgggaggcagcagttccctgcaaaggaggaaaggctgctactaagtttaacccaggaatcacagtccgaggaaattgactgcaatgacaaggatttatttaaagctgtggatgctgctctgaagaaatataacagtcaaaaccaaagtaacaaccagtttgtattgtaccgcataactgaagccactaagacggttggctctgacacgttttattccttcaagtacgaaatcaaggagggggattgtcctgttcaaagtggcaaaacctggcaggactgtgagtacaaggatgctgcaaaagcagccactggagaatgcacggcaaccgtggggaagaggagcagtacgaaattctccgtggctacccagacctgccagattactccaggtggctggtttatcctctggcactgccctggtgggaaattaaccatttctgactatcccaactcttcccgtgtgctgcattgtacccagtgtgtgcaagggctcaacagaaggaccagaagacataagacctgccctccattgcaggcagcatcccagattgaggagcgcataggctttgagggcagacctggcctggaatctttcagagctccttgccttcttgcctctccttttccttgtctagaaaagggagccgagggccctgtggtgacagcccagtacgactgcctcggctgtgtgcatcctatatcaacgcagagcccagacctggagcccattctgagacacggcattcagtactttaacaacaacactcaacattcctccctcttcatgcttaatgaagtaaaacgggcccaaagacaggctgctccagcagggagtttagctccatggacacctttgaaggctatgaaggtgcagaagacatggaaaagctcgcggggccttttccagttggatgacagtcacgaaacctgttcctccaaatccgctttcctggagaggagagaaagcacccagggagaaaaagaagaacgcgatgaggaagcaacggcgaccggcagcaccaagaaggagcgtgctggggcgtccacgccggctgactcctgcgggggcgacggctggtttccaggcgagggcgcggcgcccgaggacctccaccccggagagctgccctccctgcggtcgccccggctccccggctccagagcgcccgcattcccgagagaggcgatggtgatgatggtgttagaaggtggggacatagggaggcgatcgggtcatgagggcagagccttcatgaatgggattattatccttataaaggaggagagacttccttgccccttccactgtatctcactgatgaaaaggcctccaggtttttcacctttccgatcatcacgaataggggaaataaaagaagaaacaactgtaagtccaccccacacttccatggcacctgcacaagatgaagagcgggattcaggaaaagaacaagggcatactcgtagacatgactggggccatgaaaaacaaagaaaacataatcttggccatggccataaacatgaacgtgaccaagggcatgggcaccaaagaggacatggccttggccatggacacgaacaacagcatggtcttggtcatggacataagttcaaacttgatgatgatcttgaacaccaagggggccatgtccttgaccatggacataagcataagcatggtcatggccacggaaaacataaaaataaaggcaaaaagaatggaaagcacaatggttggaaaacagagcatttggcaagctcttctgaagacagtactacaccttctgcacagacacaagagaagacagaagggccaacacccatcccttccctagccaagccaggtgtaacagttaccttttctgactttcaggactctgatctcattgcaactatgatgcctcctatatcaccagctcccatacagagtgatgacgattggatccctgatatccagatagacccaaatggcctttcatttaacccaatatcagattttccagacacgacctccccaaaatgtcctggacgcccctggaagtcagttagtgaaattaatccaaccacacaaatgaaagaatcttattatttcgatctcactgatggcctttcttaa

SEQ ID NO: 135276 - DNA, 497 bp, Homo sapiens
aaacaagatatggctttaaatagctacaatcatctttggatgtatatgtcactgctgcttcaagttattggatgcatttgaacctctgagtttgtctttcattttaaatattgtctgttcttttaaataaacaaccacagatgtcaggaaaaagtcttaccttgtcaactggttgcccccactttttaaaaatgattgaatgataacatcatattaactgcgttttactatacttacagagtcacctaaggtccgtgcgagtaccagggtgcgacccccaaaggcaggggcagagccagcatctgagacgggaggtctcgttgaccaactgggcagaatcttcgactccgaggcacatagccccaaccacctctgccagcaaccttgagatggaaggacaagaagaaagatgggatagaatttaaattagagatgaatgccattttatcactctggcctctgggtgaaataaagatcgagtcttgatgttctaactc

SEQ ID NO: 135277 - DNA, 1658 bp, Homo sapiens
ggcacgaggcaactaacgtttggcagcatgattccaaccagtgtcctgagtgctgagggggagaggaggacagaagagacattaggctggagattgtcaaattcagtatcccagttggctcttgattcttggtgaaaccatccctcagctcctagagggagattgttagatcatgaaactaattaccatccttttcctctgctccaggctgctactaagtttaacccaggaatcacagtccgaggaaattgactgcaatgacaaggatttatttaaagctgtggatgctgctctgaagaaatataacagtcaaaaccaaagtaacaaccagtttgtattgtaccgcataactgaagccactaagacggttggctctgacacgttttattccttcaagtacgaaatcaaggagggggattgtcctgttcaaagtggcaaaacctggcaggactgtgagtacaaggatgctgcaaaagcagccactggagaatgcacagcaaccgtggggaagaggagcagtacggaaattctccgtggctacccagacactgccagattactccagccgagggccctgttgtggacagcccagttacggacttgcctcggcttgtgtggcatcctattattcaacggcagagcccagacctggagcccattctgagacacggcattcagtactttaacaacaacactcaacattcctccctcttcacgcttaatgaagtaaaacgggcccaaagacaggtggtggctggattgaactttcgaattacctactcaattgtgcaaacgaattgttccaaagagaattttctgttcttaactccagactgcaagtccctttggaatggtgataccggtgaatgtacagataatgcatacatcgatattcagctacgaattgcttccttctcacagaactgggacatgttatccagggaaggatgttgtgcaaccacctaccaagatttgcgtgggctgccccagagatatacccaccaacagcccagagctggaggagacactgactcacaccatcacaaagcttaatgcagagaataacgcaatttcctatttcaagattgacaatgtgaaaaaagcaagagtacgggtggtggctggcaagaaatattttattgacttcgtggccaggggaaaccacatgttccaagggaaagtaatgaagagttgaccgaaagctgtgagaccaaaaaacttgggccaaaggctaggtttgcaacgctgaaagtttatgtggtaccctggggagaaaaaaatttaccctacttgttcaactgttcaaccactggggaatggatcttcacttgatggaaaaggcctcccagggttttttcacctttccgatcaatcacgaataggggaaataaaagaagaaacaaactagtcacctaaggtcctgcgagtacaagggtcgacccccaaagggcaggggcagagccagcatctgagagggaggtctcttgaccaatgggcagaatcttcactccaggcacatagccccaaccacctctgccagcaaccttgagaggaaggacaagaagaaagatgggatagaatttaaatagagaagaatgccattttatcactctgcctctgggtgaaataaagatcagtcttgatgttctaactctaaa

SEQ ID NO: 135278 - DNA, 287 bp, Homo sapiens
  misc_feature (1)...(287): n = a,t,c or g
gaattctctgcactaggggaatgagcagggggaaggttattagacttcatcggcggaagcaggacaacatatcaggtggggatagcagtncaacagaaagctgggatgaggagctttctccttccactgtgttgtatacagcaacacagcacacacctacaagcatcaccttaactnttagaaganccaaacccaagaagcggaaaaagagtccagaaaagggtcgtgcagcaccaaagacgnagaaaatcaagaattctccctctgaagcacagatttagatgaga

SEQ ID NO: 135279 - DNA, 441 bp, Homo sapiens
caaggaatttgtgggcaaacctactattttagacactattaataagactgaattggcctgtaataacacagttattggttcccaaatgcaggtaagcaccaaagggttgaggactctctaagtagctgaaattttaagaacccaggaagagggtaatggattggaattactgttccttccaaatgtacaaggccatggaataacagattagccaggtgttgatcatatgtaaccaaaagtaggttatattaactggaaacttcctggatacatatttttaaactacctttattaataaaaaaatagatgaattgaggctgtgtgcagtgcagtggctcactcctataatacaacactttgcaagaagccaaggtggaaggattgcttgaggccagcagttcaagaccagcctgtacaacatagtgagaccctctctttaca

SEQ ID NO: 135280 - DNA, 604 bp, Homo sapiens
ggcacgaggcatttggaggcggtaagcccatcagattccagaggcacttttttatctcactgcagacctcaagagaatatcagcagtagggggatgggtcccacatcagtagaacgactccgagaaggagggagcatccccaaggtcctccgaagcagcgtgagggtggcccaaaagggagagccctctcccacatgggagagtaacatcacagagaaagactcacaccctgcagatggagaaggcccagagacattaagctcagcactctctaaaggagcaacagtttacagcccttccagatacagctaccagctcctgcagtgtgatagtcctcggacagaatcacaaagcctccttcagcagagttcctcccccttcagaggacattcctacacagtctccaggatacagttatcgaactactgcactgagacctggaaaccccccctctcacggttcttcagaatcatccctctcttccacgtcctattccagccccgcccaccctgtgtccacagactcgttggccccatttacggggacaccagggtattttagcagccagccacattctggaaacagcactggcagcaatcttccg

SEQ ID NO: 135281 - DNA, 5265 bp, Homo sapiens
gcggccgccgcccgcctgcgctcatagactcacgcagccccagtcccgccagtccgccaacacagtagtgccggcccccctctttccctggccctgccccccctccccgcctttggctcgctccgcctttctgccccccacccccacctcacgggtacgggccattcccggccaggaaacgccgtggcgccgcgttgggcctaactcgagtcctgccgtctcccgggagtgccgtgcgccgcagcccgggcccaggccccggcagcgcctgtgacaaggtcttcagaactactagcagataatttggggggacttcatattcagaagtctatataaaggattcctcatgtccataacatgttggatgaggctctgcagctcacccccactctcagagtggtcagtctccattaattggaccccgtgatttccaatctctgctgtgttggacgtcatgagcattgcaatccctctgggagtcaccacatcagatacatcctactcagatatggctgctggatcagaaaaggaagtggaagccccctacctttcaagacgaagtggcactacaccaggatgtgaaagtccagcgaaagagacccaaggggcctagggggcagcacacccccagaagccaagtctattccaggcagtaccacggattatggtctgggctggaaaaatcctggtgttttgaatatgttcaggtccagttcagactcttgatcccacagccacttcttgagtgagggtatcctgtcttggtagtgaatggaagagggcctggtccctggggcagtgcagaaggcactttgatcatctcactcactgcaaatgtcatgtgaggtttcatggaagtattaagagatccaattaagaagaatagttctgagtctaaaccagcccagagtggcttctctaggggaaactccccgctcagctgccctgaatctgtggaggctagtccagcagttaatgagaagagcgtgtattccactcataattatgggaccactcagaggcatgggtgtcgaggactgccttatgctgatcataattacggagcccctcctcctccgacacctcctgcttctccccctgtccagacgatcatccctcgttctgacctgaatggcctgccgtcgcctgtagaggaacgctgtggagacagcccgaactctgaaggagaaactgtacctacctggtgtccttgtggtctttctcaggatggcttccttctcaactgtgacaagtgcaggggaatgagcagggggaaggttattagacttcatcggcggaagcaggacaacatatcaggtggggatagcagtgcaacagaaagctgggatgaggagctttctccttccactgtgttgtatacagcaacacagcacacacctacaagcatcaccttaactgttagaagaaccaaacccaagaagcggaaaaagagtccagaaaagggtcgtgcagcaccaaagacgaagaaaatcaaggcatttcgagagggatcccggaagtccttgcggatgaagaattctccctctgaagcacagaatttagatgagaatacaactgagggctgggaaaatcggataagactatggactgaccagtatgaagaagctttcactaatcagtacagtgcagatgtacagaacgcgcttgaacaacacctacattctagcaaggaatttgtgggcaaacctactattttagacactattaataagactgaattggcctgtaataacacagttattggttcccaaatgcagttacagctgggaagagtcactcgtgttcaaaagcaccggaagatcctgagggctgcaagagatttggctttggacactcttataatagagtatcgtgggaaagtcatgttacgacagcaatttgaggtcaatgggcatttcttcaaaaaaaccataccccctttgtgctcttcttacttcaaaatctcaatggtgtagagatgtgtgtggatgcccgtactttcggtaatgatgctcggttcatcagaagatcatgtacaccaaatgcagaggtgcgacacatgattgcagatgggatgattcacctgtgcatctatgctgtgtctgccatcaccaaggatgctgaggtcaccatagcatttgattatgagtatagtaactgtaattataaagtggactgtgcctgtcacaagggaaaccggaattgtcctatacaaaaaaggaattcttaatgctacagaactgccactcctaccacctcctccaagcctacccaccattggagcagagactagacgtagaaaagcacgacggaaagagctagagatggagcagcagaatgaggcttcagaggagaataatgaccagcaatcacaagaagttccagaaaaagtaactgtatccagtgatcatgaggaagtagacaatccagaagaaaaaccagaagaagagaaagaagaggttatagatgaccaggagaacctagctcatagcaggaggaccagggaagatagaaaggtagaagccatcatgcatgcttttgaaaacttagagaaaagaaagaagcggcgggatcagcccttggaacagagcaactctgatgtagagattactacaaccacctcagagactcctgttggtgaagagacaaaaactgaagcccctgaatctgaagttagcaactctgtttcaaatgttaccatcccaagcaccccacagagtgttggtgtgaatacccggaggtcttcccaagcaggggatattgctgcagaaaaactagtccccaagccacctccagcaaagccttctaggccccggccgaagagtcgaatttctcggtacaggaccagttcagcccaaagactaaagcgtcagaagcaggccaatgcacagcaggcagaattgtcacaagctgccttggaagagggaggaagtaacagtttagtaactcctactgaagctggaagtctagacagttcaggagaaaacaggccattaacagggtctgacccaactgtggtgtcaattactggatcccatgtcaaccgtgctgcatctaaataccccaaaaccaaaaagtatctagttacagaatggttgaatgacaaagcagagaagcaagagtgccctgttgagtgccctttacgtatcacaacggatccaactgtactggcaacgaccctaaacatgttaccaggtcttatccattccccggttaatttgcaccacccccaaacactacattcgctttggctcaccctttatccctgagagacgtcgaaggccccttctgcctgatggcacattcagctcctgtaagaagcgctggataaaacaagccttagaagaagggatgactcaaacatcatctgtaccccaagagactagaactcagcacctataccaaagcaatgagaatagtagctcttctagtatctgcaaagacaatgcagacttgttgagcccattaaagaaatggaagtctcgctatctgatggagcagaatgtcaccaagttacttcggcctctgtctccagtcacaccaccccctcccaaattcaggctcaaagagtccccagctggccacacctggctcatctcacccaggaggaagaggagtgtcgaaatggatacaggcctcatgttttcaccagtcaacatctcttactactgctagtcgctgcaacactcctctacagtttgagctttgtcaccgaaaagacctggatttggcaaaagtaggataccttgactccaacactaacagctgtgctgatagaccttccctactcaactcaggtcattctgacctggctcctcatccctccctcggacccacttctgagactggtttcccaagcagaagtggagatggacatcagaccctcgtgagaaactcagaccaggcatttcggacagagttcaacttgatgtatgcctactcccctttgaatgctatgcctcgagcagatggactgtatcgaggatctcctctagtgggggatagtttatgcctttacatttggatgggggatattgttcccctgcagaaggattttccagcagatatgaacatggcttaatgaaagacctctctcgtggatccttgtcacctggcggtgaaagggcctgtgaaggagtcccatctgccccccagaacccaccacagaggaaaaaagtatccctgctggagtaccgaaaacggaaacaagaagctaaggaaaattctgctggtgggggaggtgactctgcacagagcaaaagcaagtctgcaggagctgggcaaggcagcagtaactccgtttccgacactggtgcccatggtgtgcagggatcctcagcccgaactccatcttcccctcacacaaaattcttcccatctcattcctctatgtcccatttggaggcggtaagcccatcagattccagaggcacttcttcatctcactgcagacctcaagagaatatcagcagtaggtggatgggttcccacatcagtagaacgactccgagaaggagggagcatccccaaggtcctccgaagcagcgtgagggtggcccaaaagggagagccctctcccacatgggagagtaacatcacagagaaagactcagaccctgcagatggagaaggcccagagacattaagctcagcactctcttaaaggagcaacagttttacagccctttccagatacagctaccagactcgttggccccatttacggggacaccagggtattttagcagccagccacattctggaaacagcactggcagcaatcttccaaggaggagctgcccttctagtgctgctagccctaccctgcagggaccctcagactcgccaacctcagattcagtttctcagtccagcacaggaactctgagttccacctcctttcctcagaaattctaggtcgtcattgccatcagacttacggactaatcagtctgcccagtgctgggcagtcagctgtctaccaggcctccagggtatctgcggtttccaattcacagcactacccacaccgtgggagtgggggtgtgcaccagtaccgactccagccactgcaagggtcaggagtcaagactcagacgggactttcctagggcttctggatttgggcaaacagaactgaatgagcccatagctgcttccttccagctgcctctggaacctaggccgagcatattgctgaggaaacgggggtacaaggtgccagaggattgggtctggtggacaagaaacaagacttgtggtcac

SEQ ID NO: 135282 - DNA, 409 bp, Homo sapiens
ctgccggcctccttcgccccgtcccgtccgcgcagcgcgtcccgcccgcccgcaggccagcttctctcgggagcccccacccaggcgcatggctccatgaagcaagaggaggaggcagagcgcgagaggtcccgtccgccccagccgcgtctgggccaggataaaagcaaaaccatattcctgctgctgtcagttatgatgcactgagaaaacttcagagacctaaactttttccagagaagagaagctttactggtgttccagccctaagcaaccatctttcctgtgaaaaattccctctcgtactttagttctgtggatccaaaatttatagcattcttctaccaccacaggggctcatatgacattaacagacaagacacttttcagaaagacaggcaacgtgttg

SEQ ID NO: 135283 - DNA, 488 bp, Homo sapiens
taaggctcatatgacattaacagacaagacacttttcagaaagacaggcaacgtgttggaccttccggagcttctcagaagacagagggttttcttttgaggctgttgtacagtggcctgattatagctcactgtagcctcgaaattctgggccgaaatgatccgcctgcctcagcctccaaagtagctgagactacagactctggaagtctctctttggcgaacacctagcccccaactcccagggcacttcccagacagccaatgccacatcacaggcagcccctgctctgcccttggggtctgtgcctggcagaagggcggcagaccctcggcccctcttggcctgggccccagctcctccgggccctggaaccagcagaaacacccaccctgcgcctgatggactggacatgcttgttcccattggtgatggtgtgttgggagggaactgttttagaaaccaatgtaaatctgtgtctacatca

SEQ ID NO: 135284 - DNA, 830 bp, Homo sapiens
ggaagtcttaggactcataaaaaatgaaccaactttttgaaatgttagtcttcaaaaattggacaatctttctgagccattctattattaggactattcgttagctgactttagagcctttaatgtttcgttattatttcaaacaatagagaactttactcccccccaaattttgagacagggtctggctctgtcatgcaggaggctgtctgtagtgcagcggcacagtctcagctcactgcaacctccgcctcttgggctcaagtgatccttccacctcagcctcctgagtagctgggactgtaggtgcaggccaccacatctggctaattttaaacaatagagaacttccaaaacaaaagttctttattaattcttcaagaaatctgttttttacttagtcgattaatgtccatctcatgttgcctcaatagcccatgtatgaatcactcttcttgcagattttgttcagttttgttgtatgtagacccatctttctttgagttggtttctttgattgagttgatttgtctgtattaaaacccaaacaatacctaagccaaaaaagcaatgtaggcacctgtgaactcacacacttggttgcaattgcttcagtaaaaaggacagtttacactcaaattgaagcaaccattatgtttccacaaacaacattccttattatcccacctcaccttttcattcttcctatgctgtctaatctgattctgtacaagagataaggcaggtactgctaaatgataacttagatgcaggggccatcatgaaaatattcatcccatatcttacattaagcaaactactagcaactg

SEQ ID NO: 135285 - DNA, 2081 bp, Homo sapiens
gttacactccaaaatttttttttttttcttttgtgagcatggggctgtattttaatacaagaaagacattgctctagaacatggctcagcctttgcttcagggcctgagcacgtttattttagccataagggtaagggagcaggtcagaaatgacttttagtgtaatcctatctgtaattaaaaatacaaatgctgtcataagatcaaatgttatcaaaaatcagtatttaaaattaaatttacccccaaatttcatttcaaaaaaaatttgtaatgttctttttcagtgaagccctttgcactgctagagctgaagaatgtgatccaatcggcttgttgaataatccccgcaccagtaggtattcccgcttgaagcccaactctagcctggggggctccgagagccgaaagacacagatggggcccctgccgccccctccgaagagtccggatggggcgcgccccgtccccgggtgcatcaaagaggctggcccggccaggggccgaagccggctggcaccgaaccccggcgcacttcgccgcggggggggctgggccgttagtcggctcgaatttaaggcttggtatccaaagctgcggccggtcaaggcgaggcgaggcgaggcgaggcgacgtgagcgaggggtgctttagggagaacaaccgctggcagcttcaatgctgggtggctaacgctcgacggtgcccggcagcaacccggccgacaaaccccgacgcggatcccgagctgcgtcgcggacaatgctgcgggcccgtcccggactacgactcccgacgggctctgcgaccgctccggggcggcccagcgtgcactgcgccggccagttttgacagccgggcgccctactcggctagctctgctcccagcgagggacgctggccttctcgcggctttcccccgatatctctctttattcccagctgcctgaaactcggtcccacgaatggcaggcagcgtccaaaattcaaccccgtaaagccagcaccagccaataaagcgcacggatggaggccacgtgacagcagtgggccggccctccggctgagccctgatctctatggtttccgcggctcgctagaaggagtgtggtccactggaggactccctacattcttcctccattacctcactgcctccggtggctgctgggataccggaggactcgggtcccggctcgactcagtcctccagccgcccggggaatacctctagttcttcccggccgccgccgccgccgccgccgccgccgccccgccgcttcctcctccgcctgccggcctcgcttcgccgcgccccgtccgcgcacgtcgtccggcccgcccgcaggccagcttctctcgggagcctccacccaggcgcatggctccatgaagcaagaggaggaggcagagcgcgagagatcccgtccgccccagccgcgtctgggccaggagaaaagcaaaaccatattcctgctgctgtcagttttgatgcactgagaaaacttcagagacctaagctttttccagaagaagagaagctttactggtgttccagccctaaggctcatataacattaacagacaagacacttttcagaaagacagatggagtctctctgtcacccagactggaatgcagtggcatgatcttggttcactgaaacctctgcctttctggttcaagcaattctcatgtttcagcctcccaggcaacgtgttggaccttccggagcttctcagaagacagagggttttcttttgaggctgttgtacagtggcctgattatagctcactgtagcctcgaaattctgggccgaaatgatccgcctgcctcagcctccgaaagtagctgagactacaggtattgtttgggttttaatacagacaaatcaactcaatcaaagaaaccaactcaaagaaagatgggtctacatacaacaaaactgaacaaaatctgcaagaagagtgattcattacatggggctatttgagggcaacatgagatggacattaatcgactaagtaaaaaacagatttcttgaaaaattaactcaagaacttttgttttggaaaaaa

SEQ ID NO: 135286 - DNA, 234 bp, Homo sapiens
gcacattcggtgtcttctgtgctgagctggcagatgccggggaggggtgctgtagtctccttttaaatttttttaaagaaccaaagaatcctacaagcccccgtaacacacatacttgagttccagatactcatcaatgccatacttggacccctctcgcccaaggccggactgcttcactccaccaaaagggcactccacagaggaaattaatccttcgttgacgccaaccat

SEQ ID NO: 135287 - DNA, 400 bp, Homo sapiens
  misc_feature (1)...(400): n = a,t,c or g
aagcccgccgtgtttacggagacattatccacaccccggcaaaggacaggcgggccctggtcctcaagcagcccataggcgtggctgcagtcatcaccccgtggaatttccccagtgccatgatcacccggaaggtgggggccgccctggcagccggctgtactgtcgtggtgaagcctgccgaagacacgcccttctccgccctggccctggctgaggtaaannnnnnnnnnnnnnnnnnnnnnnnnnnnnnnttgcttgcaagccaggctgggattccttcaggtgtatacaatgttattccctgttctcgaaagaatgccaaggaagtaagggaggcaatttgtactgatcctctggggccaaaattttctttactggntaacaactacaagaaaaa

SEQ ID NO: 135288 - DNA, 607 bp, Homo sapiens
cggccgcccacgaagctgtcggtgcgcagcagcgccgcagagaggcccgccaggcgcccagcgtagcagcggagctgggccgggccgggcgcaggcccggaggcagggaccaggccgccggcgcgggggcggaggcggcagcctggaaacgtcgacccgaggcgccgggccccacagctccgcagccaaatgcaggtcgccatggcccgggcaacgacggcgacaggaaacaggttgtggcctggcctgctgatcatgttgggttctgtctgccatagaggttcaccgtgtggcctttcaacacacgtagaaatagctgttactagaacaccaggatgcgtatcaggctggaatcgtgtttcctgattgtttttaccctagcatctgcaagggaggaaaattccatgatgtgtccgagagcactcactggactccgtttcttaatgcaagcgttcattatatccgagagaactatccccttccctgggagaaggacacagagaaactggtagctttcttgtttggaattacttctcacatggcggcagatgtcagctggcatagtctgggccttgaacaaggattccttaggaccatgggagctatt

SEQ ID NO: 135289 - DNA, 626 bp, Homo sapiens
agtctccttttaaatttttttaaagaaccaaagaatcctacaagcccccgtaacacacatacttgagttccagatactcatcaatgccatacttggacccctctcgcccaaggccggactgcttcactccaccaaaagggcactccacagaggaaattaatccttcgttgacgccaaccataaatctggcatgagctggagaaaaatgattatgactggtattgaacaaggacaaacacctacctgctaacccaacatcagctgcgttagcgattgctatagcctcctcctctgtatcgaacctgccaaagttaagataggtcataaaaaatgtaagggggagaggaaaggaaaccagttttgttttcttctgatttgtttcccaaataatcacaaggagtaaatcagagttttgcaaagagatccaagagcagattgcagaagaaagcagcaccacagggtttcctatgttctcttctattcttcctcccatctccccgctggctggaggatcttacttgataactggtgccagaggcccgaaagtctcttcatgagtgcacagcatgtcctgggtgacattgcacagcagggtaggctcaaagaaattttttccaagttggtgt

SEQ ID NO: 135290 - DNA, 1764 bp, Homo sapiens
aagcagctcgcttgtattaggcgctcacgttctgcctcccctactgggcagtgcataacttgatgaggcttgagggcaggggtcgtgtccctagtgcccggctcaaagtggaagctccaaacttatttgtcggtcgtctcccttgttgctctgactttccactttgtataccctggggaactgagcacaggagggaggcgacgcggctggtgtcactttggggtaaagccccctctgctccccgccgtgtccccggccagctctggccccctgcatccgggctctctcaccttggcggagacctccctccagcggcagaaagcctcgtaggcagcgcgcacggcggcgcgggcctctcgcaccccgcagtcggctaccatgcccagagcggcgccgctggccgggtcttgcacggggaaggtggcggcggccgggagccagcggccgcccacgaagctgtcggtgcgcagcagcgccgcagagaggcccgccaggcgcccagcgtagcagcggagctgggccgggccgggcgcaggcccggaggcagggaccaggccgccggcgcgggggcggaggcggcagcctggaaacgtcgacccgaggcgccgggccccacagctccgcagccaaatgcaggtcgccatggcccgggcaacgacggcgacaggaaacaggcaagcgggcgcgcgcgcacgggaacgcaggggtcgcggggaagcaagaggagcgaggaggcgccggggacgcgcggggaaagcgtgggagctggcggaaggttgcagagccacagagcagcgccctctctccgcgtctttctcgctgcaccgccgcgccgccctctgcaccttgccctaagcgccgcgcggcttctctcctggcgcgaccttctcccgggggagggttgggttcggggatggagaaggctcgccagtagatgcacctgcggactgctgtcaccttttcacttttcgggtgctcatttgtcactaactgctcctgagcccccaatcgctgctagagacccactctctccccttagcatcccccaaattcggcatccccggaatttgtgcgcggtccatagatgcgctggtgcctgccctaaatgccaaggccgtgatcacgcttcttcagttgtagctcctgagcacgtagtattgattgggaggcctatactccccaggctgttgactcctgccccttaatctctgtattttcttgctctgcagctgttactagaacaccaaatagatgcatgctatgtttgtcactaatccaccaaatgtcaatatttttctcatctgttgttactattttcagcttcagaatcaaaacaactcttactttattctgcatttttcaggtatgtgccagtcaaagatctactgggaatttatgagaaactgtatatttgcttcatttctctgttacaaactggattataaagataccaggaatagtaccatattcattttattttttctttctctctgccatagttatatcccacttactctacaaagtccccgtttttggtggaacaattccaagagtattttcttggaggactggatgatcggtaaaattcatgcttgtgaagaagtagataaatggctaactcatttgactgtttcctcagtgactcagttttacagggggttgttttctcagtcgtaaccagtttattcctctttctcttcaacagctcaaaaatgcagaaaaatgattttcacagaaatttgactacatccctaactgaaagtg

SEQ ID NO: 135291 - DNA, 702 bp, Homo sapiens
atgagggggacaggcagttgttcattcccatcggcgaactggattttggggatgaggaagactcgagtacatgtgtctgtccagttggcaggtcatgctgatgcaagaggtgggctcctaaagccttgggcagctctgcctctgtggctttgcaaggtacagcccttttccccattgctttcattagctggtgttaagtgtcttcagcttttccagatcctgttgcaccacgcagcaaactctgtgaaaagggtctctatggagctgggcggccttgctccatttatagtatttgacagtgccaacgtggaccaggctgtagcaggggccatggcatctaaatttaggaacactggacagcttttggactcttggacttacgccagtggtttgccaggggctcttgggcctcgggccatgggccatagactgaaggctgccctgttggcttccctacttttgaggttttgggactcggactggcttccttactctgcagcttgcagacggtctactgtgggacttcaccttgtgatcctgagaccacagaccatggggtggtccttaactgtctatggaggatgtatagtgaggattttcatgtcctctgcttcaccttttgctatcgggggccaaaaagttcaccctgggatcatgttgacgctgccatttgtttgtacatgtgactcagatggggcatga

SEQ ID NO: 135292 - DNA, 6835 bp, Homo sapiens
  misc_feature (1)...(6835): n = a,t,c or g
gctgcaggcaccgcgccggaattcccgggcgcgccggggcactgtcactaggagatgaatttcagctcttccttctccttgggaccttgggaatgtggctagtacactccaggccagatgctaggcagctccctgtgtgcccagggtcttgccagacctttagttactcaaccatagcttcccagtggctcaatgagggatgttaaatcctaggtggggttcaggagtaattgcatccagcactactttcattcacattttccttccacaacccagaataaccacaagatgtaagtggagtctacacagacagagatggggaaaggaaggtgcttcgtctccacctacttggccgcctaattggatttgcatctgtttaagattacggagtctttctttcaaagtgagaggcaacgccggtcatagcggcttttgttttttgtgcgttatttgaatgatgagctgtaaaaactctcattagataaaaggtgcctgacattcaagggctcatgcctcttctacaaagtgggttggcaattacagaaattctttccctttttggttgactgtggtgaaagtacttttgctcttttggaggtgagggagcagcaccacaccaggacagaaagaacaggctcaggtgacagccacttactcaggctcaggtcggtgggcaagtgggcactggcctcctcccatcttggcaaagccactgacagtaggcaaggaagggctgggcggtgctgctcgtaacaatggctcttgtatgtccttagaattttcatttttttgtgaagtgcttttactttctctctggctcacagtatcgcaaggagctaagtaaggcctgtatggaatctccactgtatccatgggatgggaggtgctgaacacacgcccaaggcaacaaggccactcagggaaggagccaggccatgccactgcgtgccttccatcctaccaagctgcttctgctattctttgctttacacttcagctcatttactcaaggaaatgaaatgaagtgggcaaacagggacagaaatgaaaataggaattctttaagtgggtaaatttggggacaattaaagggcattcaatttaaaatatgggttcaggattaggggagaggtgctccttcgtgcctcacagaagcacggacaattctgtgctatttattgtctttgaaagagggttcactcaaacctctgccgcaacacctccagatgcacattcggtgtccttcctgtgcctnaacctggcaaaaagcccggggaaggggtgctgtgcccccctcaacctgccctgcccaatcaacaatccaagggtcctcccttcaaaggtgcctctgggccccatgttctgtagcgaacatgggggaatggttgtgccaatgccccaggcagtgatcaagcctttgtgacggcccatggggctgggcctgccttgtgctgtgcctgctctgaggcagctggggctgtggtggggatccagggcctcattctgtaaacccagtgctggttctctgggagtctgcagccacaggcacgtggcacatattggtccctagttacattaagggcaggggtaggatttgcatctgtttaagattacaaggactggatgagttctgaaaaattcataattctgaaaacctattagtttatttaaaataatggatggcatgtacctatatatgtagataagtctccttttaaatttttttaaagaaccaaagaatcctacaagcccccgtaacacacatacttgagttccagatactcatcaatgcccatacttgggaccccctcctccgcccaaggccggactgccttcaactcccacccaaaagggcactcccacagaggaaattaaatcccttcgttgacgcccaaccatgccccacttcccagcctgctctgcccactctcccagatctgggctgggtcttgagagtaaaaataacctgctaacccaacatcagctgcgttagcgatatgttataacctcctcctctcgtattgaacttgataactggtgccagaggcccgaaagtctcttcatgagtgcacagcatgtcctgggtgacattgcacagcagggtaggctcaaagaaattttttccaagttggtgtcgttttccacctgtcacaacggtggcacctttagaaacgggcatcattcacctgtttctccaccttttctaccgctttttcattaattaatgggccctgagtagttccttcctcaaatccattacctacgcgcaggttcttcttcatggcctcggcgaatgcttttacaaaggcatcatggatgcccctttgcaccaagaattggtttgagcaaacacaagtctgtccagtgttcctaaatttagatgccatggcccctgctacagcctggtccacgttggcactgtcaaatactataaatggagcaaggccgcccagctccatagagacccttttcacagagtttgctgcgtggtgcaacaggatctttcctgtagttgttgaaccagtaaaggaaattttggacaccagaggatcagtacaaattgcctcccctacttccttggcattctttcgagaacagggaataacattgtatacacctgaaggaatcccagcctggcttgcaagctcagcccagggccaaggcccgaaaagggcgtgtcttcggcaggcttcacccacgacagtacagcccggctgccagggcgggcccccccacctttccgggtgatcatgggcactggggaaattcccccgggggtatgactgcagccacgcctatgggctgcttgaggaccagggcctcgcctgtcctttgccggggtgtggataatgtctccgtaaacacggcgggcttcctcagagaaccactctaggaaaaaggcggaatagagaatttctccatgtgcctccttcagtggctttccactttcagctgtgattattctggcaaggtcatccttattttgtatcattaaattgtaccacttccgaagtaatgaactcctctccttggcggagacctccctccagcggcagaaagcctcgtaggcagcgcgcacggcggcgcgggcctctcgcaccccgcagtcggctaccatgcccagagcggcgccgctggcaggagtcttgcacggggaaggtggcggcggccgggagccagcggccgcccacgaagctgtcggtgcgcagcagcgccgcagagaggcccgccaggcgcccagcgtagcagcggagctgggccgggccgggcgcaggcccggaggcagggaccaggccgccggcgcgggggcggaggcggcagcctggaaacgtcgacccgaggcgccgggccccacagctccgcagccaaatgcaggtcgccatggcccgggcaacgacggcgacaggaaacaggttgtggcctggcctgctgatgatcgtgatggcttctctctgccatagaggttcatcgtgtggcctttcaacgcacatagaaatcggacacagagctctggagtttcttcatcttcacaatgggcatgttaactacaaagagctgttactagaacaccaggatgcatatcaggctggaaccgtgtttcctgattgtttttaccctagcctctgcaaaggaggaaaattccatgatgtgtctgagagcactcactggactccgtttcttaacgcaagcgttcattatatccgagagaactatccccttccctgggagaaggacacagagaaactggtagctttcttgtttggaattacttctcatatggtagcagatgtcagctggcatagtctgggcattgaacaaggattccttaggaccatgggagctattgattttcacggctcctattctgaggctcattcagctggtgattttggaggagatgtgttgagccagtttgaatttaattttaattaccttgcacgacgctggtatgtgccagtcaaagatctgctgggaatttatgagaaactctatggtcgagaagtcatcactgaaaatgtaattgttgattgttcacatatccagttcttagaaatgtatggtgagatgctagctgtttccaagttatatccctcttactctacaaagtccccgtttttggtggaacaattccaagagtattttcttggaggactggatgatatggcgttttggtccactaatatttaccatctaacgagcttcatgttggagaatgggaccagtgactgcagcctacctgagaaccctctgttcattgcatgtggtggccagcaaaaccacacccagggctcgaaaatgcagaaaaatgattttcacagaaatttgacttcatccctaactgaaaacattgacaggaatataaactataccgaaagaggagtgttcttcagtgtaaattcctggaccccggattccatgtcctttatctacaaggctttggaaaggaacgtaaggacaatgttcataggtggctctcagttgtcacaaaagcacgtctccatgccccttaggcatcattacttcttgtcatttccttatgcgaggcttggctggggcaatgacctcagctgaccttcaaccaggatggggcacggtgaccttcgtgggtggggcgcaccagggcttacagccgccccggcccacattccacattcggggcgcgtgtacctcatctacggcaatgacctgggcctgccacctgttgacctggacctggacaaggaggcccacaggatccttgaaggcttccagccctcaggtcggtttggctcggccttggctgtgttggactttaacgttggacggcgttgcctgacctggccgtgggagctccctcggtgggctccgagcagctcacctacaaaggtgccgtgtatgtctactttggttccaaacaaggaggaatgtcttcttcccctaacatcaccatttcttgccaggacatctactgtaacttgggctggactctcttggctgcagatgtgaatggagacagtgaacccgatctggtcatcggctccccttttgcaccaggtggagggaagcagaagggaattgtggctgcgttttattctggccccagcctgagcgacaaagaaaaactgaacgtggaggcagccaactggacggtgagaggcgaggaagacttctcctggtttggatattcccttcacggtgtcactgtggacaacagaaccttgctgttggttgggagcccgacctggaagaatgccagcaggctgggccatttgttacacatccgagatgagaaaaagagccttgggagggtgtatggctacttcccaccaaacggccaaagctggtttaccatttctggagacaaggcaatggggaaactgggtacttccctttccagtggccacgtactgatgaatgggactctgaaacaagtgctgctggttggagcccctacgtacgatgacgtgtctaaggtggcattcctgaccgtgaccctacaccaaggcggagccactcgcatgtacgcactcatatctgacgcgcagcctctgctgctcagcaccttcagcggagaccgccgcttctcccgatttggtggcgttctgcacttgagtgacctggatgatgatggcttagatgaaatcatcatggcagcccccctgaggatagcagatgtaacctctggactgattgggggagaagacggccgagtatatgtatataataggcaaatgagaccacccttggtgacatgactggcagatgcaaatcatggataactccatgtcccagaagaaaaggcccaatatgtattgatttctccctgaaagccagctcaaggtttggggagctcccctcatcacccgtgaggtcccaagggcaaagaacccaagtcgttcattggttgctgggaagggagttctttgggagcccgactctccggggcacttcacgtctatagccttggctcagattgaagatttcactgcatttccccactctgcccacctctctcatgctgaatcacatccatggtgagcattttgatggacaaagtggcacatccagtggagcggtggtagatcctgatagacatggggctcctgggagtagagagacacactaacagccacaccctctggaaatctgatacagtaaatatatgactgcaccagaaatatgtgaaatatcagacacactctgctcattcatgtctccttccacagtttatttcctcgcttcctttgcatctaaacctttcttctttccgaactttttgcctatagtcagacctgctgtaccacctatttcctcttcctcttgaatgtttttccagtggctggaaaggtccctctgtggttatctgttagaacagtcccctgtacaccaattccctcccctaaaaacatcccttttttaaaaaaagaattggttccagcccataaagaaagaacaagatccatgccctttgcagggacatgggatgggagctggaggcccattatcccttcataaactattgcaggaacagaaaacccaaacactcccatattcctcacttgtaagtgggagctagatgagaacacgtggacacatagagggaaacaacacacactggggcctatgagagggcggaaggtgggaggagggagagatcaggaaaaataactaatggatacttagggtgatgaaataatctgtgtaacaaacccccatgacacacctttatgtatgtaacaaaccagcacttcctgcgcatgtacccctgaacttaaaagttaaaaaaaagttgaacttaaaaataacaggattggcccatgccaatcaaagtataatagaaagcatagtatacaga

SEQ ID NO: 135293 - DNA, 403 bp, Homo sapiens; identical to SEQ ID NO: 96139

SEQ ID NO: 135294 - DNA, 1700 bp, Homo sapiens
cacccctactgccccagtgccaggccttttctagcagctctcatgggttcatccctgctgcgggcattgctccaccaaggggcagtgctctccctgccgggatggcctccactgtagagacctatgtcaccaaggccaggccctctcagggggctccatccaacgaccattctgcctcagggctgtcctgccacactgtgaagaaggtgccttgcttctcctttgccttctgccatgagtgtaagtttcatgaggcctccccagccatgctgaactacaggaacacagagacgcatttggaagccagtgtggacatcctgtggtctgcgcgtacacatgtgacaggcgcgtccttcaccgtggccaaatcagcctctcaactgctggagcccggcctcggacacttctcggcttacgccgccatacagtggcgcaccccgaaaccccggaaccgacagctcggctggccttgcgcacccacactctccaaggcagggctcgcgcggcttcggcggttgtcttggagaagcaagatggcggcgacggcggccgcagtggtggccgaggaggacacggagctgcgggacctgctggtgcagacgctggagaacagcggggtcctgaaccgcatcaagaacaaaactcctttagttaatgagagcctgaaaaagtttttaaataccaaagacgatgctatgttgcatgtggtggttgaggttgtacacagcaagactccagatggagccatccgcatgaaggccaatgatgaggccaatcagagtgatacaagtgtctccttgtcagaacccaagagcaaaagcagccttcacttactgtcccatgaaacaaaaattggatcttttctaagcaacagaactttagatggcaaagacaaagctggcctttgtccagatgaagatgatatggaaggagattctttctttgatgatcccattcctaagccagagaaaacttacggtttgaggaaggaacctaggaagcaagcaggaagtctggcctcgctctcggatgcaccccccttaaaaagtggactcagctccctggcgggagccccttctttaaaagactctgagagtaaaaggggaaatacagttttgaaagatctgaaattgatcagtgataaaattggatcacttggattaggaactggagaagatgatgactatgttgatgattttaatagtaccagccatcgctcagagaaaagtgagataagtattggtgaagagatagaagaagacctttctgtggaaatagatgacatcaataccagtgataaggtgtgcacacatttggaactcacagacaggaacacagagacgcatttggaagccagtgtggacatcctgtggtctgtgcatacacatgtgacagtgccagacgatgaggaagaagacgaagcagtgccagaaaacaaattgacattagacaatctggcagaagggttccacttattcaatatggcttttgacttctcttataacatggacttttctatgaaacaggcactgaatctaaagcaaatggtggaagaagaattggtgctaaatggaaacatgtttagagaaatggaaaagcaaaaaagtcagacaaattatgatgtatctccatcagattacacttattgtgcctccctctcctgcctcctcttccacctcttctacttctgccacccctga

SEQ ID NO: 135295 - DNA, 2419 bp, Homo sapiens
atgctcctcgacttaaaatggggttacatcccaataaacccatcgtttcccagtcacgcgttgtaaacgacggccagtgcaagctgcatgctgcagtcgactctagagatccccccgatggaaccaagaggcgcgtcagctccggcgggacggggcttccaggacccgggaggggtccaggactccccgccggcgcctggctgtcggcggagggccgcggggcaggagggagtggagactgcggccccagttcgggcagcgcggagcccacccaacgccctcctcggccctcggctcttcctggggccatcccgcccctgcacctcggcctggcacctttccggttagcctcggaggccgtggccgagcaggccccgcccccagcgccgaccctaagtttcggcgctcagtggtccggcgctccccaaggctcggtgtccagcgtcaaccccgagggggcagggccagcgcgctgcgcgtcggggcggggctttggctgcgtcggccgcgtagcccgcgcgcggagcgtaccctgctgcggccgttggccgttagcgcggcttcggcggttgtcttggagaagcaagatggcggcgacggcggccgcagttggtggcccaggaggacacggagctgcgggacctgctggtgcagacgctggagaacagcggggtccttaaccgcaatcaaggctgaactccgagcagctgtgtttttagcactagaggagcaagaaaaagtagagaacaaaactcctttagttaatgagagcctgaaaaagtttttaaataccaaagacggtcgtttagtggctagtcttgttgcagaatttcttcagttttttaaccttgactttactttggctggtttttcaacctgaaactagcacatattttaacttcttttctagctgcaaggtctcgaaggtcgagagaatttagcccgagatttaggtataattgaagcagaaggtactgtgggtggacccttattaattagaagtgatcaggcgctgtcaacagaaagaaaaagggccaaccactggggaaggtgcacttgatctatctgatgtacattctccaccaaagtcaccagagggaaaaacaagtgcacagacaacaccaagtaagataccaaggtataaaggacaaggtaagaagaagacaagcgggcagaaggctggtgacaagaaggccaatgatgaggccaatcagagtgatacaagtgtctccttgtcagaacccaagagcaaaagcagccttcacttactgtcccatgaaacaaaaattggatcttttctaagcaacagaactttagatggcaaagacaaagctggcctttgtccagatgaagatgatatggaaggagattctttctttgatgatcccattcctaagccagagaaaacttacggtttgaggaaggaacctaggaagcaagcaggaagtctggcctcgctctcggatgcaccccccttaaaaagtggactcagctccctggcgggagccccttctttaaaagactctgagagtaaaaggggaaatacagttttgaaagatctgaaattgatcagtgataaaattggatcacttggattaggaactggagaagatgatgactatgttgatgattttaatagtaccagccatcgctcagagaaaagtgagataagtattggtgaagagatagaagaagacctttctgtggaaatagatgacatcaataccagtgataagcttgatgacctcacacaagatctgactgtatcccagctcagtgatgttgcggattatctggaagatgttgcatagacacgaagaaggaagtattctaattaacaaggacagaggactgaccggttccatttttttttttttccagacaatcactcagctggaatgtctgctctctattggtgccttgcatttcaaaaacacctgcagatattttttaaaagtaattttcattttactaaaacaaaatacttcctatttgagcccaatgtgtggaagatttaatattcttaatttaactgtacatttctttatggaaattgattatctacactcagtttcattacagggaaggaacccatgaaaacatcagtgttaagagcatgatgaaaggtgtcaataaagccgtaggatcgcgcaaccctttgtgtgtgtggctgctggtacgtgtgatctttgaaaaccttggctttagccctctggaatcagagcttacccaccatagtatattttgatattaggtggttctacacatagttggcaaaatgacttggtaaatttgtaatgctgaagtatattagtataagttaaatttgatgtgtcaactttattttgtatttccttccatttggaaggtttgttagaccattaaggttatattaaagtactcttgtgtgtgctaaaaa

SEQ ID NO: 135296 - DNA, 651 bp, Homo sapiens
ctattgatacttgtgattacattgtgaagttctcatgttgtgtttttcagctctatcaagtcgtttatgttcctctaacattttatgatggttcttaacttctttgcactgggatagaacatactctgttagctcatcaaagttcattattacccacattttgaagcctgtttctgccagttcatccagctcagcctcagcccagttctggctccttgctggagaggtgttgtcatcatctggaggtgtcaccagtggaggctgcacagcagcaaagatggctgcctgctccttcctctgggagctcaatcccagagaggcaccagcctgatgccagcaggaatgctccagtataaggtgtctggcaaccctgttttcattcttctcagtgggagcctccaactgcagctgattgtagaccaatatattttcaagattgaatccacaaactaaaaatgtcttctgtgccagacaactgtcctcctgatctgtcactatctgaggggtcctaggacaggcagtcactagatacttctcccaggcactaagttgtgactggggaactttactcttttcacgtgcttttctaattatgcctgaaagccccactcctttgttagggagagacatcctagcaaaagcaggggccat

SEQ ID NO: 135297 - DNA, 888 bp, Homo sapiens; identical to SEQ ID NO: 128163

SEQ ID NO: 135298 - DNA, 1428 bp, Homo sapiens; identical to SEQ ID NO: 130423

SEQ ID NO: 135299 - DNA, 906 bp, Homo sapiens
tcagctgcaggtcttggagtaagtgtcaaagacagaaagataaggtgtaattctagaagctagaaaagtactgtgggttcctaaaaacaatggtgtcgtttcttctaaagtagttgcattaggatctgccccagcttctaaaagaatctgtacgattttccaatgtccttgacttgcagcgagatgcaaagcacagaaaccttcaaaggtcttcatcttaatgtagttttcagatgaatcaatgtgggcaggcatcatgtaatccttcaaggactctcctgtcctggacaactgtcctccagatctgtcactatctgaggggatcctaggacaggcagtcactatatacttctcccagccactaagttgtgactggcgaactttactcttttcacatgtctttctaattatgcctgaaagccccactcctttgttagggagagacatccttttgtatgtgtgtataggacgttttcctatcttcagggcagactgccgaacttgaggagcatccatgaattttggtgtccgtggacattttgggaccaattcccttgaatttactttacctgcattaattaacatttgcaaacattctacagagttgtgataagctgcttcatgaattggcatccatcccctgttatcagcaacatcgacacttcggccctttttgagcagtttccttaagactttaacattgccttccctggcagcaagtccaactgtagagcacgtgtccgcgtaagcctctgtaaaatccatttgtttgaccagtatgactgacgaagaagggcccacaatacagaaagtgactgccatgccacagtctctgctggtgcctaaagcaggaagtttctctgtttggcagattggaattccttggaaggttcccactaaaaacat

SEQ ID NO: 135300 - DNA, 1434 bp, Homo sapiens
ctaacgagtgtggccagcccattccgtcggcacccataataactgctgggtgcgttgcaggggagacatctcatgcagatagggggatcctctagagtcgacctgcagacatcgacgatcataaagcagttgtgtccagtcagtgatgaatgtgagacctcggaaattaaggtgagtcttcttattgatgttactagaaggcgggaggggctgtgggaagctgatctcttgcacagatctacaggggcggagaggtgagctaaagtccagagcttgctcagagagggcagtgggtgttggagggggactggggttctcacgccccagggaccaggcatccccctctccatgaatgctgtggccatgcaaattaggctctcgtttgcaaaagggaaagattttttcaaaacatttgagatgatgtgtgctgggggagttctgtatatctattctttcgatgaaggaaataaaagcaaaatcctccttgcgtccactcctgtaaaggcaaagaaggttgctgtgaggctcaagcttgcccatgcatgcaaagtagtcagcaccagcatctcgacgctctacgtaatctaatgggtcagcatgtccaaaggtgtatccaggtctgccgagagcaatgactttggtttgaggacagtcaatattgagcggttctttaggacagccattgatcttccagccaaagtggaacccattactttcctggctatgctctttagcacaggagggaatgttggagaaagtggcattggttgtgttgaccagtttgaagctacctggtaagttgtctgctttcatcatttcccaggcaatcgaagtgtggggaaagtgttgtgactctttgataagccttgtggcactgcctagtggagctgtgagaaaagcagcaccatcctctggaccccagaatggtagatccactaacagcttgcaccgtgcaccctcacagagccccgggtatgcttgaccattgagggccaggaggttaactgtttcctggacactcgtgcggccttctgtcttactctcctgtcccagacaactgtcctccagatctgtcgctatccgaggggtcctaggacaggcagtcacttgatacttctcccagccactaagttgtgactggggaactttacgcttttcacatgcctttctaattatgcccaaaagccccactcctttgttagggagagacatcctagcaaaagcaggggccattatacacgagaagagaaaggctttcatgagaaagagagaaattaagaagcaggcaagatcatccaaagtccataccagtgctgcttctagctgtgctcggacagcccctctcggtgagagctttgctgagcaccttattaaaattgcagacttcaccccaccctcatcctcctctccctgcactactttattcttctccat

SEQ ID NO: 135301 - DNA, 1542 bp, Homo sapiens
ttattcattcagtatgatgttcgctgtgagtttgccatagatcgctcttattgttttgcggtatgttcctttgatgcctagtttgttgagggtttttatcatgaagggatattggattttactgaaagctttttctacatctattgacatgatcatatggtttttgttctcaattatctttacatcttgaatgtggtgaaataactttttcatgtgcttctggatttggtttgctagtattttgttgatgatttttgcttcaatggggatattgacccgtaattttgttgttgttgttgttgttgttatttctttggcagattttggtatcgagtgatactggcttcccatcgtttttgatcccaaaagtgtttgctcattattattttttacctcccaaatatttagcttaaaatcccacttctgatgttttccagctgaagttctgttgggaggaaactttttctctaccaaatgagtacttaggtcaaagtgattgagggcctggatggcctctttatcgatcttcagggttacgtgtcttccggccagggtagctgtctttcggtcggctctctttctgcttctgatatattgctggcgcacgccgctgacgtaagtagccttgcgccttcgtactgggcctggccccaggcttggtcggtaggaaaaggtagcggccagagggagccttggggtgacactgagtggcagatagagccagactgggtaatttctcagacatggctggaaaggtgaggacaagtgagaatagggtggaaaagttgcaagagaggtttgtaaccgacatggaaagagttgtggagtctttggaggtgaggaagattttgagagtgaggaagaacaaagcacctttccttgacataccatggtccttgcttttgaaggttttgggctcagaagtcctgcttttcttccttggctcggatgaagagatggtagttgccagggtgtccatttcagggcaccgtcactcttcagtggcaaggccgatgagatcctaataggaggttttggccagcttcggaagggatgggggcggtccttgtggggtccgctgacagtccaacctccggtggggtcctccgcaaagggggcatggcctggtgggcttacctgggtttgggcattgtctggaccagtagccttcattgccacacttgaaacaggcgcaggtggaggtggattgtaggaggcttccctgttgagctgcagcctgcgggctggtggaggtaagcatttgagactacctgtgttttgcctttcattttcctcatcacgattgttaaagactttgaaggctaaattaagaaggtctccatgtggggtttgagggccgtcatcaagcttctgaagtttgcgtggaatattgggggtggactctgtgtaacaagatcctagatcaagaaacataacattgccagcacttgggaaaactgcctcgtaccccctttcaggaactccttctttagggttaaccagtttttctgtagccagtatgcgagtatcaacttgtggcat

SEQ ID NO: 135302 - DNA, 2744 bp, Homo sapiens
atggagcctgcaaagggcactgtggaaatccctgaatttacagctggcccagtaccaaggtgcaaggccacatatatcagcagggtacaccagcaaaatagcagaagcaggaagagagctggccagaagatagctaccctggttggaagacacatactcctgaagatcgagaaagaggccatccagtccacccccaatattccacgcaaacttcagaagcttgatgacggccctcaaaccccacatggagaccttcttaatttagccttcaaagtctttaacaatcgtgatgaggaaaatgaaaggcaaaacacaggtagtctcaaatgcttacctccaccaggcccgcagggctgcagctcaacagggaagcctcctagcaatccacctccacctggcgcctgtttcaagtgtggcaatgaaggctactggtccagacaatgcccaaacccagtacagtcacactcgtctacctggaaaaaacggggtttcctagctgcaaaaaacactcctgtcataaatggctctctcatcaacaaactccttcaagctatcaggctcctgcagaaagttgccatcattcattgcaggggccaccaaaccccagacaatcacatatcggctggaaatgcgctaacagatcagaagaaaagcaggacttctgagcccaaaaccttcaaaagcaaggaccatgccatgtctgagaaattacccagtctggctctatctgccactcagtgtcaccccaaggctccctctggccgctaccttttcctaccgaccaagcctggggccagaaattacctcccctccttaatccagacacagtctttcattcgtgaagcagcaaatgaggctatacctctccctgttgacacctccttgtcctctcaacataactgtcttgcaggcacagacgcgtttccagacaatacagatgatgctcctactacaaggacaatgtggataccaacccgtctctcaagaatacccaaaaaattaaggcccagtacgaaggcgcaaggctactacgtcagcggcgtgcgccagcaagatatcagaagcaggaagagagccgaccgaaagacagctaccctggccggaagacacgtaaccctgaagatcgagaaagaggccatccaggccctcaatcactttgacctaagtactcatttggtagagaaaaagtttcctcccaacagaacttcagctggaaaacatcagaagtgggattttaagctaaatatttgggaggtaaaaaataataatgagcaaacacttttgggatcaaaaacgatgggaagccagtatcactcgataccaaaatctgccaaagaaataacaacaacaacaacaacaacaaaattacgggtcaatatccccattgaagcaaaaatcatcaacaaaatactagcaaaccaaatccagaagcacatgaaaaagttatttcaccacattcaagcaagcacgacttcggaggctctggaacagggaaagtctggacaaattgaatgcctaatagggcttgcttccagtgcgatctacaaggacactttaaaaaagattgttctaatagaaataagccacccccctcgtccatgccccttatgtcaagggaatcactggaaggcccactgccccaggggacgaaggtcctctgagtcagaagccactaaccagatgatccagcagcaggactgagggtgcccggggcaagcgccagccgatgccgtcaccctcacagagccccgggtatgcttgaccattgagggccaggaggttaactgtctcctggacacaggtgcggccttctcagtcttactctcctgtcccggacaactgtcctccagatctgtcactatctgaggggtcctaggacagccagtcactagatacttcccccagccactaagttgtgactggggaactttactcttttcaaatgcttttctaattatgcctgaaagccccactcccttgttagggagaggcattctagcaaaagcaggggccataatacaccatgctgttttggttactgcagccttgtagtacagtttgaaggtagcatgatgcctccagctttgttgtttttgcttacgagtgtcttggctatatgggctcttttttggttccataagaaatttaaagtagtttttcctaattctgcctgtatcactgccaccatggccgcttttttcatgagcccactgaatcttatcttcctccaccaagtgaatgtagagaacttccagtgaggccataggtgcaggctctaggggcctgccaagggctccaaatggcttccctatctgctgcagacacttccaacaccactggattgcaggatcatatggccctggcaaagaagttgcaaggcagcctggatctgtggcagaacctccttttgttctgagtctcagacaaaactggctgtttttccgatcattcactagatgggctctacgtctttcaagtccttgaatgggggcactgatctctgcaatccctttaggaatgtgctctggcttttgttttattgtatccctaggtagacgtaattctacttggcctttgccaccggaatagcccacactccacaggtcagggcaccaatgtggggattctgtcagctgttgagtatatttatgccaatgatgcttttggggttcacgagggaccccattgacatttaggggttcaatggcactgaggttcatcagggccttcccacacgggcccat

SEQ ID NO: 135303 - DNA, 1694 bp, Homo sapiens
  misc_feature (1)...(1694): n = a,t,c or g
gggcggagctggtcccgttgtgctgcggcgccgcgcggcctgcagtcccgggcccgcgccccgcgccgcccgcccgcccgccatggagcccggccccgacggccccgccgcctccggccccgccgccatccgcgagggctggttccgcgagacctgcagcctgtggcccggccaggccctgtcgctgcaggtggagcagctgctccaccaccggcgctcgcgctaccaggacatcctcgtcttccgcagtaagacctatggcaacgtgctggtgttggacggtgtcatccagtgcacggagagagacgagttctcctaccaggagatgatcgccaacctgcctctctgcagccaccccaacccgcgaaaggtgctgatcatcgggggcggagaaggagggtgtcctgccgggaggtggtgaagcacccctccgtggagtccgtggtccagtgtgagatcgacgaggatgtcatccaagtctccaagaagttcctgccagggcatggccattggctactctagcttcgaagctgacacctacatgtggggtgacggtttttgagtttcatggaaacagaaacaagaatgcattcgacgtgattcatcattgactcttcagaccccatgggccccgcctgaaagtctcttcaaggagtcctattaccagctcatgaagacagccccttaagggaagatggtgtcctcttgctgccagggccgagtgccagtggctgcaccctggacctcatcaaggaagatgcggcagttctgcccagtccctgttccccgttggttggcctatgcctactgcaccatccccancttacccccagcgggcagatcggattcatgctgtgcagcaagaacccgagcacgaactttccaggagccggtgcaagccgttgacaacagcagcaaggtggcgaagatgcagctgaaagtacttacaactccgaacgtgcaaccgctgcggcctttgtgctgcccgaagtttgcccggcaaggccttgaatgaatgtgagctgagcccagggggccaaccacttgatgcaacccaaggaccttcggaccttggaagcttgcggggtgcctcgggcccctccagcccccgggccggacctcctgctggctctcgcccaccaaccaagtgttacaagccccagaatgctgcccggcgctgccctgctgggcggactgtctgtgtgtctgtctctctggcgttccacctccaagcctataccagctgtgtacagccgccatctctctgccttctgttgcccctcactcaccaaacacgtgtatttatagcaaagattggagtcctgtgtctcctgaccttggctgggcccaggcagggccacattcaccattgggtgcctctggggtgagggtctgcagaggccttgctggctgacccccaagtgtctgctgcagggctgaggctgcaggcgggccatcgtggatagcctggggcacagagggtcaccgcagtcgtcacgtgggacccagagctgtcctgggaagctgacttagctgtccttttaccaagcccttcacaaggccactggtgacagccccccagggcagtggggtgggtgagatcagggtggggctgcccgggagcattctcagaaaaattggggacactcacaggtgtaagtcaggtcccatccaggtactccagggcaaataca

SEQ ID NO: 135304 - DNA, 418 bp, Homo sapiens
aattttcgtacgaaaagcttttgaattggcaggaattcgcagtagacttggagcaccactcttacaggagcttcctgggactgacctgcctgaagcaaatttctactcggacggaagactttatcattgacaccctggagcttcgaagagacatgtacattctcaatgagagcctcacagacccagccatcgttaagccctctggccgaggagatgcttagctacgcccgggatgacacccattacctgctatatatctatgacaaaatgaagctgcaaatgagggagcgcggcaacaggcagaccgtgcaactgcatgtggtgtggcaacggagcagggacatctgcctcaagaaattcatcaaacctattcttcacggatgagtcctaccttgaactatataggaagctgaagaag

SEQ ID NO: 135305 - DNA, 1707 bp, Homo sapiens
ggtattttactggatgaagcctcaggtgtaaacaagaatcaacagcctgtcctccctgccggcttgcaggtccccaaaacggtagtgtccagctggaaccgtaaggcagcagaatatggcaaaaaagcaaaatctgaaactttccggctgcttcatgcaaaaaatatcatccgacctcagctcaagtttcgagagaagattgacaattccaacacaccatttcttcctaaaatcttcatcaaacccaatgctcagaaacctctccctcaagctctctctaaggaaaggcgggaacgcccacaggatcgtcctgaggacttggacgtcccccctgcactggctgatttcatccatcagcagagaacccagcaggttgagcaagacatgtttgcacatccttatcaatatgaactaaatcactttaccccagcagatgcagtgcttcaaaagccacaaccccagcaccactcttacaggagcttcctgggactgacctgcctgatgcaaatttctactcggacggaagacttcatcattgacaccctcgagcttcgaagtgacatgtacattctcaatgagagcctcacagacccagccatcgttaagaagaatcaaatagacgcaataaaaaatgataaaggggatatcaccactgatcccacagaaatacaaactaccatcagagattactacaaacacctctacgcaaataaactagaaaatctagaagaaatggataaattcctcgacacatacactcttccaagactaaaccagaaagaaattgaatctctgaatagaccaataacaggagctgaaattgtggcaataatcaatagcttaccaaccaaaaagagtctaggaccagatggattcacagccgaattctaccagaggtacaaggaggaactggtaccattccttctgaaactattccaatcaatagaaaaagagggaatcctccctaactcattttatgaggccagcatcatcctgataccaaagccgggcagagacacaaccaaaaaagagaattttagaccaatatccttgatgaacattgatgcaaaaatcctcaataaaatactggcaaaccgaatccagcagcacatcaaaaagcttatccaccatgatcaagtgggcttcatccctgggatgcaaggctggttcaacatacgcaaatcaataaatgtaatgcagcgtataaacagaaccaaagacaaaaaccacgtgattatctcaatagatgcagaaaaggcctttgacaaaattcaacaacgcttcatgctaaaaactctcaataaattaggtattgatgggacgtatctcaaaataataagagctatctatgacaaacccacagccaatatcatactgaatgggcaaaaactggaagcattccctttgaaaactggcacaagacagggaggccctctctcaccactcctattcaacatagtgttggaagttctggccagggcaatcaggcaggagaaggaaataaagggtattcaattaggcaaagaggaagtcaaattgtccctgtttgcagatgacatgattgtatatctagaaaaccccattgtctcagcccaaaatctccttaagctgataagcaacttcagcaaagtctcaggatacaaaatcaatattcaaaaatcacaagcattcttatacaccaataacagagagccaaatcatgagtga

SEQ ID NO: 135306 - DNA, 3106 bp, Homo sapiens
atgtttgatactcatcaggcagcacgccttcttaacctgggcaggcactcactcgatcatctcctgaaactctactgcaacgtggactcaaacaagcaatatcagctggctgattggagaatacgccctctgcccgaggagatgctcagctacgcccgggatgacacccattacctgctatatatctatgacaaaatgaggctggagatgtgggagcgcggcaacgggcagccggtgcagctgcaggtggtgtggcaacggagcagggacatctgcctcaagaaattcatcaaacctatcttcacggatgagtcctaccttgaactctataggaagcagaagaagcaccttaacacacagcagttgacagcctttcagctgctgtttgcctggagggataaaacagctcgcagggaagatgaaagttacggatatgtactgccaaaccacatgatgctgaaaatagctgaagaactgcctaaggaacctcagggcatcatagcttgctgcaacccagtaccgccccttgtgcggcagcagatcaacgaaatgcaccttttaatccagcaggcccgagagatgcccctgctcaagtctgaagttgcagccggagtgaagaagagcggaccgctgcccagtgctgaggagggaaaacgtcaagtcacagccagtgcaagtacacctctgacagaggcctgtgctgacagctggcagaaagctactgccggcttgcacgttttacatgccagcctgctggggtcttttaatgcctatattgaagaatgctctctttggacctcacgactggtcccatgccccttcggatggctatccaatcatcccaaccagtggatctgtgccagttcagaagcaggcgagcctcttccctgatgaaaaagaagataacttgctgggtaccacatgcctgattgccacagctgtcatcacgttatttaatgaacctagtgctgaagacagtaaaaagggtccattgacagttgcacagaaaaaagcccagaacatcatggagtcctttgaaaatccatttaggatggcagcgaagttcgatccatcaaccaaaatctatgaaatcagcaaccgctggaagctggcccaggtacaagtacaaaaagactctaaagaagctgtcaagaagaaggcagctgagcaaacagctgcccgggaacaggcaaaggaggcgtgcaaagctgcagcagaacaggccatctccgtccgacagcaggtcgtgctagaaaatgctgcaaagaagagagagcgagcaacaagcgacccaaggaccacagaacagaaacaagagaagaaacgactcaaaatttccaagaagccaaaggacccagagccaccagaaaaagagtttacgccttacgactacagccagtcagacttcaaggcttttgctggaaacagcaaatccaaagtttcttctcagtttgatccaaataaacagaccccgtctggcaagaaatgcattgcagccaaaaaaattaaacagtcggtgggaaacaaaagcatgtcctttccaactggaaagtcagacaggtatgtggtggacggcggtgtggcccagggagcccaacacccatccaacctgatgctggaccgtctgagtgggaagatcctgcacattgactttggggactgctttgaggttgctatgacccgagagaagtttccagagaagattccatttagactaacaagaatgttgaccaatgctatggaggttacaggcctggatggcaactacagaatcacatgccacacagtgatggaggtgctgcgagagcacaaggacagtgtcatggccgtgctggaagcctttgtctatgaccccttgctgaactggaggctgatggacacaaataccaaaggcaacaagcgatcccgaacgaggacggattcctactctgctggccagtcagtcgaaattttggacggtgtggaacttggagagccagcccataagaaaacggggaccacagtgccagaatctattcattctttcattggagacggtttggtgaaaccagaggccctaaataagaaagctatccagattattaacagggttcgagataagctcactggtcgggacttctctcatgatgacactttggatgttccaacgcaagttgagctgctcatcaaacaagcgacatcccatgaaaacctctgccagtgctatattggctggctgctgaccctcctgggccttctgtgtggctcggtggccacccccttgggcccgaagtggcctgaacctgtgttcgggcgcctggcatcccccggctttccaggggagtatgccaatgaccaggagcggcgctggaccctgactgcaccccccggctaccgcctgcgcctctacttcacccacttcgacctggagctctcccacctctgcgagtacgacttcgtcaagctgagctcgggggccaaggtgctggccacgctgtgcgggcaggagagcacagacacggagcgggcccctggcaaggacactttctactcgctgggctccagcctggacattaccttccgctccgactactccaacgagaagccgttcacggggttcgaggccttctatgcagccgaggacattgacgagtgccaggtggccccgggagaggcgcccacctgcgaccaccactgccacaaccacctgggcggtttctactgctcctgccgcgcaggctacgtcctgcaccgtaacaagcgcacctgctcagccctgtgctccggccaggtcttcacccagaggtctggggagctcagcagccctgaatacccacggccgtatcccaaactctccagttgcacttacagcatcagcctggaggaggggttcagtgtcattctggactttgtggagtccttcgatgtggagacacaccctgaaaccctgtgtccctacgactttctcaagattcaaacagacagagaagaacatggcccattctgtgggaagacattgccccacaggattgaaacaaaaagcaacacggtgaccatcacctttgtcacagatgaatcaggagaccacacaggctggaagatccactacacgagcacagacccttaa

SEQ ID NO: 135307 - DNA, 2870 bp, Homo sapiens
  misc_feature (1)...(2870): n = a,t,c or g
acaagctctcgcgagacgagccgtgcaggctgaaaaaatggcgccacccagtacccgggagcccagggtcctgtcggcgaccagcgcaaccaaatccgacggagagatggtgctgccaggcttcccggacgccgacagctttgtgaagtttgctcttgggtccgtggtggcagtcaccaaggcatctgggggcctaccacagtttggcgatgagtatgatttttacccgaagttttcctgggcttccaagcattttgcgaaacacagggagacaggtttgctttcagtgcatgagcagagtaatgcaagtacccatgggttgttcgcagcaaccattaaggatcgaagtaaagttgactgagctggaagacaagttttgatttactaagttgatgccaatgaatgtaattctggagagagtgggtattttactggatgaagcctcaggtgtaaacaagaatcaacagcctgtcctccctgccggcttgcaggtccccaaaacggtagtgttccagctggaaccgtaaggcagcagaatatggcaaaaaagcaaaatctgaaactttccggctgcttcatgcaaaaaatatcatccgacctcagctcaagtttcgagagaagattgacaattccaacacaccatttcttcctaaaatctttcattcaaacccaatggttcaggaaacctctccctcaagctctctctaaggaaaggcgggaacgcccacaggatcgtcctgaggatttgggacgtcccccctggcactgggtggattttcattccatcaggcaggggaacccaggcaggtttgaggcaagacatgttttgtacatccttatcaatatgaactaaaatcacttttaccccaagcagatgcaagtgctttcaaaagccacaaaccccagttatacagacctatagaagaggacaacatgccactttcatattcctccctggagtgaactcgtggaactcaacgaaaagctcttgaattgtcaggaatttgcagttgacttggagcaccactcttacaggagcttcctgggactgacctgcctgatgcaaatttctactcggacggaagacttcatcattgacaccctcgagcttcgaagtgacatgtacattctcaatgagagcctcacatgacccagccatctttttggtctttcatggtgctgattcagacatagaagggcgtacagaaagactttgggttggatgtagtaaacatgtttgatactcatcaggcagcacgccttcttaacctgggcaggcactcactcgatcatctcctgaaactctactgcaacggtggactcaaacaagcaatatcagctggctgattggagaatacgccctctgccccgaggagatgcctccactacgccccgggatgaacaccccattaccctgcctatatatcctatgacaaaatgaaggnctggagatgtgggagcgcggcaacgggcagccggtgcagctgcaggtggtgtggcaacggagcagggacatctgccctcaagaaattccatcaaacctatcttcacggatgagtccctaccttgaactctataggaagcagaagaagcaccttaacacacagcagttgacagcctttcagctgctgtttgcctgggagggataaaacagctcgcagggaagatgaaagttacggatatgtactgccaaaccacatgatgctgaaaatagctgaaggaacttgccttaagggaaccttcaggggcatcataggtttgctggcaacccagttaccgccccttgttgcggcagcagattcaacgaaatgcacctttttaatccagcaggccccgagagattgccccctgctcaagtctgaagtttgcagccggagttgaagaagagcggaccgctgcccagtgcttgagagattggagaatgttctctttggaccgcacgactcctcccatgcccctacggatggctatccaatcatcccaaccagtggatctgtgccagttcagaagcaggcgagcctcttccctgatgaaaaagaagataacttgctgggtaccacatgcctgattgccacagctgtcatcacgttatttaatgaacctagtgctgaagacagtaaaaagggtccattgacagttgcacagaaaaaagcccagaacatcatgggagtcctttgaaaaatccatttaggatggttcctgccctcactggggacaccgtgctccgcgtctctcaggcagcgaagttcgatccatcaaccaaaatctatgaaatcagcaaccgttgggaagctggcccaggtacaagtacaaaaagactctaaaagaagctgtcaagaagaaggcagctgagcaaacagctgcccgggaacaggcaaaggaggcgtgcaaagctgcagcagaacaggccatctccgtccgacagcaggtcgtgctagaaaatgctgcaaagaagagagagcgagcaacaagcgacccaaggaccacagaacagaaacaagagaagaaacgactcaaaatttccaagaagccaaaggacccagagccaccagaaaaagagtttacgccttacgactacagccagtcagacttcaaggcttttgctggaaacagcaaatccaaagtttcttctcagtttgatccaaataaacagaccccgtctggcaagaaatgcattgcagccaaaaaaattaaacagtcggtgggaaacaaaagcatgtcctttccaactggaaagtcagacagaggcttcaggtacaactggccacagagatagtcctggaagacacgtggcgcctgtggaccggaagcaccaaatgctggtgctgcttttgtacatacatatttttaaaccattaaaattcttcctg

SEQ ID NO: 135308 - DNA, 2787 bp, Homo sapiens
gacaagctctcgcgagacgagccgtgcaggctgaaaaaatggcgccacccagtacccgggagcccagggtcctgtcggcgaccagcgcaaccaaatccgacggagagatggtgctgccaggcttcccggacgccgacagctttgtgaagtttgctcttgggtccgtggtggcagtcaccaaggcatctgggggcctaccacagtttggcgatgagtatgatttttaccgaagttttcctggcttccaagcattttgcgaaacacagggagacaggttgcttcagtgcatgagcagagtaatgcagtaccatgggtgtcgcagcaacattaaggatcgaagtaaagtgactgagctggaagacaagtttgatttactagttgatgccaatgatgtaattctggagagagtgggtattttactggatgaagcctcaggtgtaaacaagaatcaacagcctgtcctccctgccggcttgcaggtccccaaaacggtagtgtccagctggaaccgtaaggcagcagaatatggcaaaaaagcaaaatctgaaactttccggctgcttcatgcaaaaaatatcatccgacctcagctcaagtttcgagagaagattgacaattccaacacaccatttcttcctaaaatcttcatcaaacccaatgctcagaaacctctccctcaagctctctctaaggaaaggcgggaacgcccacaggatcgtcctgaggacttggacgtcccccctgcactggctgatttcatccatcagcagagaacccagcaggttgagcaagacatgtttgcacatccttatcaatatgaactaaatcactttaccccagcagatgcagtgcttcaaaagccacaaccccagttatacagacctatagaagagacaccatgccatttcatatcctccctggatgaactcgtggaactcaacgaaaagctcttgaattgtcaggaatttgcagttgacttggagcaccactcttacaggagcttcctgggactgacctgcctgatgcaaatttctactcggacggaagacttcatcattgacaccctcgagcttcgaagtgacatgtacattctcaatgagagcctcacagacccagccatcgttaaggtctttcatggtgctgattcagacatagaatggctacagaaagactttgggttgtatgtagtaaacatgtttgatactcatcaggcagcacgccttcttaacctgggcaggcactcactcgatcatctcctgaaactctactgcaacgtggactcaaacaagcaatatcagctggctgattggagaatacgccctctgcccgaggagatgctcagctacgcccgggatgacacccattacctgctatatatctatgacaaaatgaggctggagatgtgggagcgcggcaacgggcagcccgtgcagctgcaggtggtgtggcaacggagcagggacatctgcctcaagaaattcatcaaacctatcttcacggatgagtcctaccttgaactctataggaagcagaagaagcaccttaacacacagcagttgacagcctttcagctgctgtttgcctggagggataaaacagctcgcagggaagatgaaagttacggatatgtactgccaaaccacatgatgctgaaaatagctgaagaactgcctaaggaacctcagggcatcatagcttgctgcaacccagtaccgccccttgtgcggcagcagatcaacgaaatgcaccttttaatccagcaggcccgagagatgcccctgctcaagtctgaagttgcagccggagtgaagaagagcggaccgctgcccagtgctgagagattggagaatgttctctttggacctcacgactgctcccatgcccctccggatggctatccaatcatcccaaccagtggatctgtgccagttcagaagcaggcgagcctcttccctgatgaaaaagaagataacttgctgggtaccacatgcctgattgccacagctgtcatcacgttatttaatgaacctagtgctgaagacagtaaaaagggtccattgacagttgcacagaaaaaagcccagaacatcatggagtcctttgaaaatccatttaggatgatcagcaacccgttggaagctggccccaggtacaagtacaaaaagactctaaagaagctttttcaagaagaaaggcacttgggcaaacagcttgccggggaaccggccaaaggaggccctgcaaagctgcagcagaacaggcccatctccgtcccgacagcaggttcgctgctagaaaatgctgccaaagaagagagagcgaggcaacaagccgacccaaggaccacagaacagaaaccaaggaggaggaaccgactcaaaaattttccaaagaagcccaaaggaccccagggccccacccagaaaagagggtttacgcccttacgacctacagcccagtcaagacttcaaaggcttttgcctggaaacagcaaatcccaaagtttcttcctcagtttgatccaaattaaaccagacccccgtctgggcaagaaatgcattgccagccacaaaaaattataacacgtcggtggggagaacaaaaagcgatgtcctttccaactggaaagtcagacagaggcttcaggtacaactggccacagagatagtcctggaagacacgtggcgcctgtggaccgggaacgaccgaaatgctggggctgcttttggacaaacatattttttaacccattaaaattcttcctgaagaaaaaaaaaaaaaaaaaaa

SEQ ID NO: 135309 - DNA, 402 bp, Homo sapiens
gatgtaacaaacaaacaaaacctgaggaggctcaacccaccggcaaatggcctgccggtgacgcgtgcgcatgctgagcgggacgtgccggggctgacacgcgaggccccgccacggcccgcgtctacgctgcgaggtgggccttcggtgcgcgccgggctacgccggcgccagcgcgcgcccaacttgcgaatgcggggacaccaggtactgcccccaagacccgaaccagacatgaagccgacctgtcccgattatagcgcatcgttactgcctgactggctaacctgtaccttcacaaaaagtggtcatcacgtacccgggtttacctcaactttggtcggtgtgctggctttcaatgaccaacacaacaaagaaaaaataattgtttctgagacttag

SEQ ID NO: 135310 - DNA, 1956 bp, Homo sapiens
atgactgggcgctaccacgaggttgtattgccagggcggggtgctggctatggccgttttggcgtacggggccgaacgaaggacaatagccggtacaaccggccatgccctggaacggcacccaggaacgcccgccggcaccaaggaggcgaaccgggaaagcgagccgaacaaagactgcccttaacagccttgagaaggccggatagcgaaaacaatggtgggcaagagaaagtacgtaagaagaggtgcccggctacagtgttgaggcgcatgaccgctgatatgcacgggtccacagcgggcgatcatccatacgaagaagcatacccgtttccatttgtatcagatcatccatacgaggatgcgtacccgttgtccattgtatcagatcatccatacgaagaagcatacccgttgaccatttgtatcaatcatccatacgaagaagcatacccgttgtccatttgtatcagatcatcatacgaagaagcccccgattatagcgcatcgttactgcctgactggctacctgtaccttcatcaaaagtggtcatcacgtacccggggtttacctcaatttgtggatactatacgacttctagcaaggcttgcttttcggtgtttgcttggtgtttcgttacatccgatgttccgggccgtttcagtgacgaggacgaagatgatagtgagatgtggtcactcaccgccttgatgggtgtcatgggaggatggaagacgtctgccagatcagaagtatcgatactgtgttccacgtcgtcaaaggtgattcacagcagctatccatacgcagaccgagcttttcaagtttggtcacttgatgcccggtttgctcatatcaacaaaccattcggtgtagacaggttttccggagaagccccgtcgcgcgccatcaccacgatgtacggggtgaaggtgttgaaccgcccggcaactggtacagcacataggttggtgcccccagacgtcccagtccatccacacggcggcgagagtaacaaaccccgcgtccagaccaccgtctcttcagggatcagcagactgtcgatacccatatccgccagtgctttgcaaaacgttccggacaagacacacgacatcagcaacatcaccgacaccgtttatcactgtccgctgagccagagctcccgctggtactggcgctttgtgcctgtgcgttcgccacctttatcgaatgggcaaactgccgttcgacctggcggaagccgagcaggagctgcaggaggcccgctctctgaatacagcggcagcggctttggcgtcatgaaatggaccaaagatcagctgactgtcaccgtaaaggtgaactacctccggaagtggtggagtttctttactacaacagggtggctggctgtcggtctgtttggtaacgacgaacgcaaactgaatggtcattacgccgtttactcgtgctgtcgatggagaagggcactaagtgttggattacgacagcatggattatcgtcagcgtccgcaccgaccaacgatgctgaaacctacgagttcatcaacgaactgggcgcaagaaaaacaaccgtcgtgccgattggtccgctgcacgtcacttctgagaaccgggccacttacgtctgttcgtcgatggcgaaaacattatcgaagccaataacgaatgaatacaccgtacacagtgctgaaagcagcaaccggccacgtccaaaacagcatggtagtaagttccgcatgaacgaagacaccaacgcaccgctagcgcggacccgaagaacgggcaagccaaaggaacgtaatcggtataggttgtgttgctcaaccgaaccacacactcaccgaataaccaccgcgacgtacacacaaggaataagcacacaacagagcagcgcaacacaccggaccaacaccacgcactggctactgactacagccatcgtatag

SEQ ID NO: 135311 - DNA, 4351 bp, Homo sapiens
gggctcggggtccgcccgcgggctgccggtgcgagcgggcggcccggctcccctcctcccccgcccgccgccgccgctgtgattgggtggaagatggcgctggccggatggaaatcctaatgacagtctccaaattcgcctccatctgtaccatgggcgccaatgcttcggcattagagaaagagattggtccagaacagtttccggtcaatgagcactattttggattagtcaattttgggaatacctgctactgcaattcagttcttcaagcactttatttttgtcgtccatttcgggaaaaagttcttgcgtataagagtcaacctaggaaaaaggagagccttcttacatgcttagcagatctcttccatagcatagccactcagaagaaaaaggttggagtaataccccctaagaagttcatcacaagattacggaaagaaaatgagctttttgacaactacatgcaacaagatgcccatgaattcttaaattacctactaaatacaattgctgatattttacaagaagagagaaagcaggaaaaacaaaatggtcgtttacctaatggtaatattgataatgaaaataataacagcacaccagacccaacgtgggttcatgagatttttcagggaacattaactaatgaaaccagatgtcttacttgtgaaactataagcagcaaagatgaagattttttagacctttctgttgacgtggaacaaaatacatcaattactcactgcttaaggggtttcagcaacacagaaactctgtgcagtgaatacaagtattactgtgaagagtgtcgcagcaaacaggaagcacacaaacggatgaaagttaaaaaactgcgccatgattctagctctacacctgaagagatttaaatatatggatcaacttcatccgatatacaaaactctcttacccgggtagtttttcctttagaacttcgtctgtttaacacttcaggtgatgccaccaatccagacagaatgtacgaccttgttgctgttgtggttcactgtggaagtggtcccaatcgaggccattatattgcaatagttaagagtcatgatttttggttgttgtttgatgacgacattgtagaaaaaatagatgcacaagctattgaagaattctacgggttgacatcagatatctcaaagaactctgagtctggttacatccttttctatcagtctcgggactgagagggaaccgtgatgaagagacactttctgcctcatttcttctctggttattttggaaaggatcaagcactgatttttcaagaaaagagaaatgcaggaagctcagggggcagtagcacactttgcacacgataaagcaaagacgatggattgacaagcccttccgatcatggtagttgatttatttgctcaggtatcatgctgtctgtacagttccatacaacaaggaggtgaaatcagagataccagctcctcttttaaaacagccttccagtcattggcacgcattttctctttattaattgcaccaataatgctttgaattccttgggggtgcagtagaaagaatcggaatctgtgccgtattgataaggagatgatgttgaacacactgcataaatttgcctggttcagtatgtatagaaggcatattcagtggtcttttcaagagtaaaccagaaatacttttgggcccaacacttgcagttgccttcctgatgtaaaaactaacatgctagataatccagtgtcgggaagacaaagatgttttgcttctctgaagaagcttataataatatacagtatatgtatatgtagggagcaattggtcaaaagtggctttttgtttccccaagggaaagactggctttgtaattataattttttccttatttattttacttaaaactggtagagtctaagtattatatgaagtgcccatgattctgtcagtaaatttgaacatatttttattagttaatgtcagtttaagttgtccttttgtttgtttctatttttaaggtgaattttaatttctatctgaaatcagttaagataccttgagaaaaactgcagtgagaggagataaatatcctttttcaggaggaactgatatctctggctaaatatttgtccttttattatggtttctaaatcagttattttcttcagctttaatttcataaaattaaaaaactattttaaaaattcctgtagttgttggaataattaaaaattctggtgcagtggtggtataccaatctttagaattcttaagtattctaatgtttcaagttgagatcatgcttgggaaaatcatgtcatagcatttatgttattttcagatgccattttttaccctggaaagaagtcataatgttcatcataaccctagcagcctggatagtgagctaaacaaacccttcaaagattaaattttaatcaagtagaccgggaatacaaaagacaagtccttccttcccttccccccacctttacaaatcttactggaagggtgttcagaaattaaaatctgtgtttgctaagacttcattctgttgggggttttaagaagtaatatatgtaacataaaatatatgtaaacgattgcagtttttttggacgtttttccatgcatcagtaagttgtctgacagtagccaaatgtaacttgcagaaaattattgaaaattatattcagaataatagcaatcaggccttggatgttctttattaaactcttttcaggcagtaaatttaaaaaaaattgtcattttctaaagtccttttgctaaaactgttgactatggaaaacaacaaaaaggaattttttagtctgctgctattattaacatttattatctgtatcttttggctcaggaaatgacttcacctattttttccataagcagacctttaacagagtcacttaattgggctgcttaaacggatgttctgggagaaaattataatatttagtatttgtacaaaatatcaaaaagtattttgacaagtttctttttaagatagttcctaaagccttaccctggctagaggtgttttgtacaaattatatataagccagcctgatctaccaacatgccacagagaatcacaatcaacagtgtggggaaagtcagggcagtggaagtggatgcactctttttattttgaaggcttaaaccaaattgtcttggaattaaagctgtatttctgcagctttcggtacagagaaaaagaggaaagtgaagctgtgtcagttttaacattagctatatcaacatgtttaagaaagatagatgaagtcatttgcataaaggtacagcattgaaatactatgttgtgtttgtttttacatttttgcattaaaaaaaaacatgccgtaaaagccaagttaaatttcatattaaagcaagttctagtgtatgtgttgagttcctggtaatcacatacttgttcacatctacaccgtacttcatagtatgatttgtcaggggagggattgtggggtgacagttttacatttactttttcttcttaatgcagctggatctaagtaaaatgttttgaagtttatcagaaactaaatgtacttttaaaacgtatagggtcagggttgggggaaaaatacaggtatagtaagtaagaaaagtgacccatgaagaaagcatcgtgaggttgtatgttggttgactgtgattaaaatgcggggctggtgtaagttgtaagtggtggctgattgccgtgtaactatgtacatgattgttgggatggctgtcccatattttgtatattggaataaaaatttctataaattattgtaactaaaagtaaatattctaaattaagtcccacttcttaagtcacatggcttctgtcttggaaattttacctttaaaagattatttaagacaggaaccaggaggcttgggaacagggaaagagggaaatgttgtattatgtgggtcttggggcctctaaccatcagtatagggttttttctttccttgatggcagtagaaagacctcattttcataacataactactcttgatactttctttaaaaacactttttattaaagattctatcatgaggtatttggctgggagctgggaggctaaagcgctcatgtcctggctcttcagtgaatttaactgtgtgaccttgggcaagtcacttaacctctctgtgcttcagtctccctgtcttgtaaaatgggagtaatacctacctcacagggttgttgtggggattaattagagataatgtctgtaaagcatttaaggttcttgaagaaggcactatataaatacaaaataatatctattaaagttggtttatttgtga

SEQ ID NO: 135312 - DNA, 582 bp, Homo sapiens
gttgacggaggacccttaaatgccgtggtacccactgacgctaaattggcctgccgccggggacttgaaactagaccgagcattgtgggctgtaaagacgataatacaacaatgcaaacggcgcagccgggggagggtattgacttcataataaatagcccaatgttagatggtgccccagttcgctatcggaatcaggatgaccatgagctacaaattacacacgggaacaagattctatgtggaattgtgtggaaaaagatagcccaagtcgaacagatgagaaagttcagtcgtcttgaaaagcaaagaacccatgtcctcagctgttcggatcttcaggctgttcgccggtttcgaggagtggtgtcagagggcagttttgaaatgggagaaaaggtttataaaaggaaagacatgttccagctcagcctgctgacagagcagcacggtgactcaacgctcggtagtggcagcagctacacacagatgccagccgaaaacggctcgctggtgcacaccttggtaacagctgctcctccattttttgctgagaaaccacacagcatcacagcaggatag

SEQ ID NO: 135313 - DNA, 1293 bp, Homo sapiens
atgggggcctcacgcagccagaagcccggaccttcgcgcgactatagctacacagcggggtgtgacgtagaccagcgcaggcgcggcgcccagaaactgagtcgtagcgacacaaagcggattgtgatgagttacgggaagaaagcattaaagaatgacaaattcgaaataagggcgttttcatcaagtctggaggttcgctatcggaatcaggatgaccatgagctacaaatacacacgggaacaagattctatgtggaattgtgtggatttgctgtaacccggcttcgcgacccaccgatgttacgccatgccgcaatggcgttgctaccttggagaccccccgattatagcgcatcgttactgcctgactggctacctgtaccttcatcaaaagtggtcatcacgtacccggggtttacctcaatttgggctttcagcaacacagaaacccatgcagtgagtacaagtattactgtgaagagtgtcgcagcaaacaggaacacacaaacggaggaaagtttaaaaactgcccatgattctagctccacactgaagagatttaaatataaggatcaacttcatcgatttacaaaactctttaccagggcatctttacggggccccagggatgagcggctgaaacgcgtgtctcggcaactcttttctctggttgtggtcacatctcgtgtcttcgacgttctcttaagaattctacaccgcctagggcaatatgtgtcaagtgaatactacgtggctttaatgtgcagtgaaggacacgggccaggagctgaagatgtgactgaattgctccagtctcatgaaaaaactgaatggatgaggagttgcttcttctggatgaccaaaagtggtgtcttcgatggaatctacttgtggaatgcatttaaccaagaaggtgaagatctctacaaggaaaactgcaaaacactgatgaaagaagttgaagatgcacaaataaatggaaaaacatcctatgctcatggatcggaagaatattgtaaaatgtccatattgcccagaatccttcttcagaagatctcaagagatgattgttttaaaattgtacttaaattctgcgttgaccatcagaagacaaagaaatgttgtatgatcaccctaaaatcttctgtagtacagttagcatttacaatcaagatttctgtttctgaaatgtgtgctagagaggactttgttgttgttattagcttccaacactcagaagtaccctctagacaacttgcaagatgtacttttaaagagggatacacatag

SEQ ID NO: 135314 - DNA, 425 bp, Homo sapiens
aggtggagtatgggccgctacaggcacagatgcaccctggcatcggtacactgctcactgggcctcctggctgcccgggcgggattgcgctcgctttcatgggaccagacgtgatgctggaaggtgggcgtcgtcacggttaaagagaaatgggctcgtccgagggtagtgcctgatcaatgagggcggggcctggcgtctgatctggggccgcccttacggggcagggctcagtcctgacgcttgccacctgctcctacccggccaggatggctcgagggcggagtctattttacgcgtcgcccaatgacaggacctggaatgtactggctggggtaggcctcagtgagtcggccggtcagggcccgcagcctcgccccatccactccggtgcctccatttagctggccaatcagcccaggagg

SEQ ID NO: 135315 - DNA, 1578 bp, Homo sapiens
atggacgtcttcactgacccagacctgcttttggacttggtggatgctgccacgcgccgctgggtacctgtctacctgctcctggaccgccagcagctgcctgccttcctggaactggcccagcagctgggggtgaacccctggaacacggagaacgtggatgtccgtgtcgtgcggggctgcagcttccagagccgctggcgacggcaggtgagcggcaccgtgcgggagaagtttgtgctgctggacggcgagagggtcatctcaggatcctacagatttgagccagccctgggcctcgacctgttgctcaactgctcactgttgctgtgccggggtggtggccacccactggacctgctctccgtgacgctggcctcgggctcccgctgtttctccttcctgtctgtggcctggggcttcgtgtcagatgtggatatccagagcgagcgcttcagggccttgggcagtgcccgcttcacactgggcacggtgctgggcctcgccacactgcacacctaccgcggacgcctctcctacctccccgccactgtggaacctgcctcgcccacccctgcccatagcctgcctcgtgccaagtcggagctgaccctaaccccagacccagccccgcccatggcccactcacccctgcatcgttctgtgtctgacctgcctcttcccctgccccagcctgccctggcctctcctggctcgccagaacccctgcccatcctgtccctcaacggtgggggcccagagctggctggggactggggtggggctggggatgctccgctgtccccggacccactgctgtcttcacctcctggctctcccaaggcagctctacactcacccgtctccgaaggggcccccgtaattcccccatcctctgggctcccacttcccacccctgatgcccgggtaggggcctccacctgcggcccgcccgaccacctgctgcctccgctgggcaccccgctgcccccagactgggtgacgctggagggggactttgtgctcatgttggccatctcgcccagccacctaggcgctgacctggtggcagctccgcatgcgcgcttcgacgacggcctggtgcacctgtgctgggtgcgtagcggcatctcgcgggctgcgctgctgcgccttttcttggccatggagcgtggtagccacttcagcctgggctgtccgcagctgggctacgccgcggcccgtgccttccgcctagagccgctcacaccacgcggcgtgctcacagtggacggggagcaggtggagtatgggccgctacaggcacagatgcaccctggcatcggtacactgctcactgggcctcctggctgcccggggcgggagccctgaaactaaacaagcttggtacccgccgggggcggggcctacattccaatggggcggagcctgagctagggggtgtggcctggctgctagagttgtggtggcaggggccctggccccgtctcaggattgcgctcgctttcatgggaccagacgtgatgctggaaggtgggcgtcgtcacggttaaagagaaatgggctcgtcccgagggt

SEQ ID NO: 135316 - DNA, 2422 bp, Homo sapiens
atggaggaagtagcagaagcaccgcagccaatagaccccaaaccgctggcaacacaaccccagtccatcatcatcactaccatcaccaccatcatcaccatcaccaccaccaccatcaccatcaccaccactaccatcaccaccaccatcaccatcatcaccactaccatcaccatcaccaccaccatcaccaccaccaccatcaccatcatcaccactaccatcaccatcaccaccaccatcaccatcaccaccatcatcaccatcatcaccaccaccatcaccatcaccaccatcatcaccaccaccatcaccaccacagtcatcaccattatcaccaccaccatcaccaccatcatcaccattaccaccatcacaccatcatcatcatcatcaccatcatcacaggctgatgagtgttggggagaggctgagcccctcatgagcagacaggcccatgtgtggctgagatacaggactggctgcagggaggagaggccagaccaggagctgaccgggagctggggccacgggcctaggagcaccctggtcagggctaaggccatggccccgcccccaccgccactggctgccagcaccccgctcctccatggcgagtttggctcctacccagcccgaggcccacgctttgccctcacccttacatcgcaggccctgcacatacagcggctgcgccccaaacctgaagccaggccccggggtggcctggtcccgttggccgaggtctcaggctgctgcaccctgcgaagccgcagcccctcagactcagcggcctacttctgcatctacacctaccctcggggccggcgcggggcccggcgcaaagccactcgcaccttccgggcagatggggccgccacctacgaagagaaccgtgccgaggcccagcgctgggccactgccctcacctgtctgctccgaggactgccactgcccggggatggggagatcacccctgacctgctacctcggccgccccggttgcttctattggtcaatccctttgggggtcggggcctggcctggcagtggtgtaagaaccacgtgcttcccatgatctctgaagctgggctgtccttcaacctcatccagacagaacgacagaaccacgcccgggagctggtccaggggctgagcctgagtgagtgggatggcatcgtcacggtctcgggagacgggctgctccatgaggtgctgaacgggctcctagatcgccctgactgggaggaagctgtgaagatgcctgtgggcatcctcccctgcggctcgggcaacgcgctggccggagcagtgaaccagcacgggggatttgagccagccctgggcctcgacctgttgctcaactgctcactgttgctgtgccggggtggtggccacccactggacctgctctccgtgacgctggcctcgggctcccgctgtttctccttcctgtctgtggcctggggcttcgtgtcagatgtggatatccagagcgagcgcttcagggccttgggcagtgcccgcttcacactgggcacggtgctgggcctcgccacactgcacacctaccgcggacgcctctcctacctccccgccactgtggaacctgcctcgcccacccctgcccatagcctgcctcgtgccaagtcggagctgaccctaaccccagacccagccccgcccatggcccactcacccctgcatcgttctgtgtctgacctgcctcttcccctgccccagcctgccctggcctctcctggctcgccagaacccctgcccatcctgtccctcaacggtgggggcccagagctggctggggactggggtggggctggggatgctccgctgtccccggactccactgcaggcttcacctcctggctctcccaaggcagctctacactcacccgtctccgaaggggcccccgtaattcccccatcctctgggctcccacttcccacccctgatgcccgggtaggggcctccacctgcggcccgcccgaccacctgctgcctccgctgggcaccccgctgcccccagactgggtgacgctggagggggactttgtgctcatgttggccatctcgcccagccacctaagcgctgacctggtggcagctccgcatgcgcgcttcgacgacggcctggtgcacctgtgctgcgtgcgtagcggcatctcgcgggctgcgctgctgcgccttttcttggccatggagcgcggtagccacttcagcctgggctgtccgcagctgggctacgccgcggcccgtgccttccgcctagagccgctcacaccacgcggcgtgctcacagtggacggggagcaggtggagtatgggccgctacaggcacagatgcacactggcatcggtacactgctcactgggcctcctggctgcccggggcgggagccctga

SEQ ID NO: 135317 - DNA, 1543 bp, Homo sapiens
  misc_feature (1)...(1543): n = a,t,c or g
atggactccacaaagaggcttctgggctggggactgtgtgtgctttgctccccggttcatctgcaggcacatacccgcagccagtcagtggcccccaaggaactccccaccatccctctgaaagccagctgcaccggcgtcatcctgccctcaaatctgaggctgcatttagaacctgaagcagcagaaatgagcgtcccgctgtcctgcatcatcctacagggtcaggacgaaggggacaaagggatgggctgccactatgtcaaaaagaaggtacaacaagttcgctacctggcaatttcagaagccaccttgagggcaatgcacccctcctccaagttcaagaatgccactgggcgccccctacctggaaggacagttctttctaccagtaaattccacgtgcctggagagccgcagaacttcagggatgagtcagccaattaccgctgggcccctccccaccacgagagtgtgtttatctatctcaggcagagtgtagcttttcagtctggcaaatggaaaccagctcaacgtactaaagcatatttgtgtggctatgaaactcctagaggaagcagagccacgaagatgaatggagatctacaaataaaactgtggggcaccccagtgcccgactgtatgagcccccctggtgggcacacacctggacgcctcctggtggaagcaaggcgccttctgatccacactgagccatcagctgtccccaccagctggtcagccgcacttcgcatccccagaaccaacctccaagaccccggacccctggcctggaaatgtcttttcctccttcccattgccccagtctctcccagagctcagacacactctataccttcccatgggaacaaaaaagcccccaggatcatccatgattttctacacataggctcagtatccaggtacaaattcttccgcaaccatttgcagactgctgagttacaaatcggggcaagtttatccaaacacaggccaagctcctccacagcagcgccgtgggagatgaatgtggctgagaccttgccatctaagagtttgcggtctggcaagtgtccacagagacccaagctagactataacaacacacagaaaagaaacattgttaacgaattacaaaagggaaagggacgacttcaagttcacggaggaaagcnagaacatcgaggaaaactgttaagaaagaatggcctgatttcaacccacaccctagaagaggaggtagattttgacgtgccagaaatagaaatgtcccagatctggaaacagtgtgagcaaaagaataagaaaacaggatatatccccgaggagaagtaactcctgtttcactggctcaaaggatttgaacaaggagtcctgtcagacaagattgaaaaacaaggtctggaccagtagggctagccatagccaccgaaagtttaaaacacaggtggcgtatcagagctaagctttcagaaaatcaagcttcttagcactgaggacatatccatattacacgtccttaaccaatttaaataggcagtct

SEQ ID NO: 135318 - DNA, 478 bp, Homo sapiens
  misc_feature (1)...(478): n = a,t,c or g
acccgccgcctgcttcccagccttgacgcccgagcccatgccggacngaggagcttgaggcgctgaggagaccagaggctggccgagctgcaggccaaacacggggatcctggtgatgctggcccaacaggaagcaaagcacagggaagcagaaatgagaaacagtatcttagcccaagttctggatcagtcggcccgggccaggtgtatcagaacaaggtttaatagaaatccttaaaaaagtaagccaacaaacagaaaagacaacaacagtgaaattcaacagaagaaaagtaatggactctgatgaagatgacgattattgaactacaagtgctcacagactagaacttaacggaacaagtctaggacagaagttaagatctgattatttactttgtttattgtctatatgccttttaaaaaaataaacttgttatgcaaaataaaacatttgggtaagttgttttagtatcat

SEQ ID NO: 135319 - DNA, 400 bp, Homo sapiens
ggaaaggatgtctttattcaagggaacaggattaaattaggagctggttttgcctgtcttctctcagtgcccattctctttgaagaaactttctacaatgaaaaagaagagagtttcagcatcctgtgtatagcccatcctttggaaaagagagagaggtcagaagagcctttggcaccctcagatcccttttccctgaaaaccattgaagatgtgagagagttcttgggaagacactccgagcgatttgacaggaacatcgcctctttccatcgaacattccgagaatgcgagagaaagagcctccgtcaccacatagtcagtagccgtgctgtcctctgcctggcgtgccctgtctcggttcagtgcagggtgctgggagccctcaatttcctctgga

SEQ ID NO: 135320 - DNA, 1002 bp, Homo sapiens
ttttttttttttttttttatcgtgcataacaagtttatttttttaaaaggcatatagacaataaacaaagtaaataatcagatcttaacttctgtcctagacttgttccgttaagttctagtctgtgagcacttgtagttcaataatcgtcatcttcatcagagtccattacttttcttctgttgaactgggaggaaaattaaatgagtgtcagaacatttctaataaagcataactcagattttccgagaaaagatttctaccaattttaggcaagacatttgtgtctttaaaggcaacttaggcgtgaactaaaagggtgggaatgggagtcaaggggcctataaaaattaggaaccctcccccaacaggattcagcctttctccccaaactttcacgggtttgacaaaaggggaaatgtctctgggctgaaaaatatgtgtggtagatgtatactcaacattaatccttaaaagtatccatcttttcatttgccacaagcatctggggacacttactttcactgttgttgtcttttctgtttgttggcttacttttttaaggatttctattaaaccttgttctgatacctaggagaaccagaaaagataagaaaaacagtacttttttaaacaaagaatttacctctgcagatggaatcactttgtactctttttgaggtgtggggaaagagctcaggaagagtacaaagtgattccatctgcaaaggtaaattctttgtttaaaaaagaactgattttcttatcttttctggctctcctaggtatcagaacaaggtttaatagaaatccttaaaaaatgatgccaactaacagaaaagacatcaacagtgaaattcaacagaagaaaagtaatggactctgatgaagatgacgattattgaactacaagtgctcacagactaaaacttaccggaacaagtctaggacacaagttaagatctgactatttacttgcgacatgtgctatatgcctttaaa

SEQ ID NO: 135321 - DNA, 1500 bp, Homo sapiens
  misc_feature (1)...(1500): n = a,t,c or g
atgctgctaggctcccagactaggcccccggagcctacttaccccattaaatcagacaactcaataaaagaaccaagttcaatctcctttgaaatttttgtttttcctgtaggcaaaggggccagtctcctggtgcacctgggaaacctggaggactttcaactctgcactaaagccccagggacgcagacctgcccagcctgctttgaggacgccacagaagagcctttggcaccctcagatcccttttccctgaaaaccattgaagatgtgagagagttcttgggaagacactccgagcgatttgacaggaacatcgcctctttccatcgaacattccgagaatgcgagagaaagagcctccgtcaccacatagactcagcgaatgctctctacaccaaatgcctccagcagcttctgagggactctcacctgaaaatgctcgccaagcaggaggcccagatgaacctgatgaagcaggcagtggagatatcgttccatcatgaaatttacaacctgatctttaaatacgtggggaccatggaggcaagtgaggatgcggcctttaacaaaatcacaagaagccttcaagatcttcagcagaaagatattggtgtgaaaccggagttcagctttaacatacctcgtgccaaaagagagctggctcagctgaacaaatgcacctccccacagcagaagcttgtctgcttgcgaaaagtggtgcagctcattacacagtctccaagccagagagctcgaccgcctgaaatcggggaatcgggcctctgccggcgccctggcagcggcgcggggcgtggctccgggctggattggtggcgcctgggccccgcgagcgcctgcgcagtggtcaaagccgcgctcgcgccgcaggggctgcgagagtgaccgcggctgctccagcgctcgactccgagcccatggcggaccgaggagcttgaggcgctgaggagaccagaggctggccgacgctgcaggccaaaacacgggggatcctggtgatgcggccccaacaggaagccaaagcaccagggcaagcagaaatgagaaacagtatcttagcccaagttcctggatccagtccggccccggnccccaggttaagtaaccttagccaccttgtaaagccctgaaaaaacctaaagccagtagacgaattacccttatacaagattggcaagatattggacaacctaagtgatgangggtatcaggaaccaaggttttaattagaaatcccttaaaaaagttaaggcccaaacaaacagaaaagacaacaacagtgaaattcaaccagaagaaaaagtaatggactcttgatggaaggtgacggattatttgaactacaagtgctcacagacttagaactttaaccggaaccaagtctaggacagaagttaagatctgattatttactttgtttattgtctatattgcctttttaaaaaaataaacttgttatgcaaaataaaaaaaaaaaaa

SEQ ID NO: 135322 - DNA, 828 bp, Homo sapiens
atgaagggaaccctcccgtggtccttgatcaccccgggtaatgaacggggacaggaactgcttactggggacgcgctggatggtatcatcccttctgttctactgactggtcaacagacaccggcgttcggtcgaagagtatctggtgtcatagaaattgccgatgggagtcgccgtcgtagagctgctgcacttaccgaaagtgattatcgtgttctggttggcgagctggatgatgagcagatggctgcattatccagattgggtaacgattatcgcccaacaagtgcttatgaacgtggtcagcgttatgcaagccgattgcagaatgaatttgctggaaatatttctgcgctggctgatgcggaaaatatttcacgtaagattattacccgctgtatcaacaccgccaaattgcctaaatcagttgttgctcttttttctcaccccggtgaactatctgcccggtcaggtgatgcacttcaaaaagcctttacagataaagaggaattacttaagcagcaggcatctaaccttcatgagcagaaaaaagctggggtgatatttgaagctgaagaagttatcactcttttaacttctgtgcttaaaacagcaggggatcctttagacccctacaggcgccactattttccgcgcccgctactaccgcgtaaccgcgaaacaccggttcgcttaaaacgcggaaaacgggttaatcgtggggacctgctagaagtgcccgaagatgaatccccagcagcaacgcatggccgctatagggaccgacaaggaaatgagcgacctacggacttcagggggatcctctag

SEQ ID NO: 135323 - DNA, 5227 bp, Homo sapiens
  misc_feature (1)...(5227): n = a,t,c or g
atgaagtaccacaagaatttttctaaaatgacacccaagtttttcttggcagaagttataattcctggcaaacagttcactgcagctctaattatgatgacagctttaatggagaagataatcatattaaatggttcttattcacttccatgtgatgaattagtgattaccataaaatgtgttaagcagctaaaattttacgactggacatctccctcagttccaggaatatgggcccgaccttatattcaagaaatcaatgaagctatagaaaggacagttctggagacagatcctgaagaatgggacctgctagaagtggccgaagatgaatccccagcaacaacgcatggccgctatagggaccgacaaggagctgagcgacctactggacttcagtgcgatgttttccccacctgttaatagtgggaaaactagaccaactacactgggaagcagtcaattcagtggatcaggtattgatgaaagagggaggtacaacatcttggggaacaagtggtcaaccaagtcctttcctatgattcatctagaggttttacagacagccctcattacagtgatcacttgaatgacagtcgattaggagcccatgaaggcttgtccccaacacctttcatgaactcaaatctgatgggaaaaacatcagagagaggctcattttccctgtacagcagagatactggattaccaggctgtcaatctagtctcctgagacaagatctggggcttgggagcccagcacagctatcttcttcaggaaaacctgggacagcatactattcattctctgctacaagttccaggaggagaccactccatgactctgcagcgcttgatcccttgcaagcaaaaaaagtcagaaaggtgcctcctggtttgccttcttctgtatatgcaccatccccaaattcagatgatttcaaccgtgaatctcctagttatccatctcctaagccaccaaccagtatgttcgctagcactttctttatgcaagatgggacccacaattcttctgacctttggagttcatcaaatgggatgagccagcctggttttggtggaattctggggacctccacttcccacatgtctcaaatccagtagttatggcaaccttcattcacatgaccgcttgagttatcctccacactcagtttcaccaaccagacataaacacgagtcttccaccaatgtccagctttcatcgcggcagtaccagcagttcaccttacgttgctgcctcacacacctcctcccatcaatggatcagacagcattttaggaaccaaagggaatgctgctggatagctcacagacaggtgatgcacttggaaaggctttggcatctatttattctcctgaccataccagcagtagttttccgtcaaatccatcaacaccagttggatcaccttcacctctcacaggtaccagtcagtggccaagacctggagggcaagcaccttcatccccaagctatgaaaactcactccactccctgcagtctcgaatggaggatcgtttagacagactggatgatgcaatccatgtgctgcggaaccatgctgtgggaccttccaccagtttgcctgctggtcacagtgatatacatagtttattgggaccatcccataatgcaccaattggaagcctcaattcaaactatggaggatcaagccttgttgcaagcagtcgatcagcttcaatggttggaactcatcgggcaggactctgtcagtctcaatgggcaatcattcagtcctgtctagtacagtcactacttcaagcacagacctgaaccataaaacacaagaaaattattagaggtggccttgcaaaagtcagtctggaactggttgttccacaggaaatcaagactggaaaacaaagaaaaggatgaaaaccttcatgaacctccttcatcagatgacatgaagtcagatgatttaatcctcccaaaaagatatcaaggtttcatctagaggcagaacaagcagtactaatgaagatgaggatttgaaccctgaacagaagatagaaagggagaaggagaggcggatggctaacaatgccagagaacgcttacgcgtgcgggatattaatgaagcattcaaagagcttggccgaatgtgtcagcttcacttgaagagtgaaaaaccccaaacaaaactccttattcttcatcaagccgtggcagtcatccttgagtctagaacagcaagtcagagagaggaaccttaaccccaaagcagcctgccttaagagaagggaagaagaaaaagtttctgccgtatcggcagagccgccaaccacactgccaggaacccatcctgggcttagtgaaactaccaaccctatgggtcatatgtaaacatcagccagttccagagttatcagtaggctagatagaaggtgacctctcctcataaggacttggacaactcagattatctgaagccaccaaacctgacaggagggagaagaaaaaacaaaacacttgaaccaagaaactcaaatgtaatcctacgatcgtagcagcatggtcaacacttccatcagaagtgaagataggaagctcatcagatagaacatcagcccatgagatgtttgcaacaaatcttttgttgcaagcagtgtgtcgcttctgcacaatcagagactgtctcgatctctccactcaccgtgggaagttgccttgtgcctaaactggaattgacaaatgcattgttaactacaaattttattttattgttatggaaactgtaaggtctacatataaagggaaaaagttggggtgtaaggctgatctacactcatctgatgccagcatacattaaagcggttcacgtgcatagaacaaagcagttgacaaccattggcccttagcattcccggcaatacctattaagtgtcttaaaaaggaagggaaaagtcttttgttgccctctcctatcctcttgccatatgaatagcgttttccatgaaataggaaaatattacttggtatagcatttctcttgctctcattttttgatttatttttattttctctttgtgggtgttatatttgatctctaaatctgaacagtttatggtcacagtccagcctcctccgtgcagccctgtgtgctttgcacagtttaccttacagtggtaagcatagagccatgtgtgatcgtatcagacctagcagtttcaaagggaacattttgttctctaggttttcccccaaataaacattgctttatttctaataataaccgagacttttcaagcttctagatctcataggaaagcttgtaatagcaaaattgtaaattacaagggaagaatctactttttagaaatcgctttgttttccaagcagtaagtactacatacagtacttgtaaagtgttagctgtaagtaagcacaaaatacatttaaaatacaaagacggttttttccaggctgtggtttatgggtgaacataacaaaacccagtagtcaccaaggcaaggtagtgtgataaatgaacacaccactctgaggctaattacctaatggaatacaagagcaatggtcacccgtatttccttatcctagcctttatttctctgtcatttggatggctggtcaatggggaagaattgagtgggtgatttaatcaactgcaaaccatctgcccctgtcccaaaatgatgagccagattaggcattaaaccagtactttgtcagtccatcttaatactgttcattaagggcactctctgtctctaatccttagggagttgtttttaaaaggacataatcactttggaacttccatgaaacctgtcttccaccacaacaaccctggggagaggaaaaacatgctaaaggaggtatcttggcttaataattccttatagcccaatatcaacagtggcaatcagcacacagaggaaaggacccaaatcactatgtagctaaaaagattcctgttaatttgaaagaacaaaaacaagacagaacttctggtactctaatcagggtgattcctaacaagtcagtcctttgtggaacttagtgggactttttggttactttaatttgcatatattctccagttacatcggactctatctgtggccttgttcttcatttcagtgttaatcagctaaacagaagttgttgcttatgatgtgtgagtgaacatatgccactgcctggccttttttttcttcagagcttgttgtctttttcgctatattagactttgcagtatgcccagaagctttccttcataaaatagaaagaaaaaaacatttggcttatttttcactgtagctagtcttttatacaataatcttgtaagaaaatttcttgaattctaaatattactctttctaggatttttgaaatccaaaaagttttcaggtaaaaagtttcttaactttattttattatattagggtagtaaaakkatgtaggggttatttncccccataacccggttccattaatatccagaaatttaccaatagccattttaaagaccccatagtaggattcctagccatacccgtgtagtaccctatggagtattgtaagagcctaattgttggagatgaattgccttcctcatccttgttctcccagtttcccattgttggtttattgccagatttgtatcctgtgtcaaattcaaggtattattgataaaccttttcaaccagcagcaagaagttcaaatttttttctgtcactgtaacagaaaacacaatatgtatataacatttatgtagcaataaatgtgtccatctttttttttaacacagtaaaatagtgagttttttacatttctctttctcaaataataatgtattttgttttattttctccatctcattcgtcccagaaacactcacactgcttttcctaactgcattaccgacattatctgggaaacccttcaggacagaatcaggcttgtggagctaagttggcaatctggtctagagcttctctagcttgtgcttttctcctcttgccctcactactgacggcggccttttaaccttttcctaaagattgaccaaacagcaactagtagttatagaaaatctactcatttgtagatacagagaaaaatgaagaagatggaaaaagactcaaaagaggctttttaagttattcttcaaagcacttttcacatttccccataccctttctcacaaaaaaaaa

SEQ ID NO: 135324 - DNA, 392 bp, Homo sapiens
ccagaatgcctcttctccctccaaaggatcacaactcctcaccagcaagggaacaaaactggatggagaatgagtttgatgaattaacagaagtaggcttcagaaggtggctaataacaaactcctctggaggaagctaaaagggcagttctaatacaatgcaaggaagctaagaactttgaaaaaaggttggaggaattgctaactagaacaaccagttcagggaagaacataaatgacctgatggagctgaaaaacacagcacgagaacttcatgaagcatacacaagtatcaatagccaaatcaatcaagcagaagaaggtatatcagagattgaagatcaccttaatgaaataaagcatgaagacaagattaaaaaaaaaaaaaaaaa

SEQ ID NO: 135325 - DNA, 1233 bp, Homo sapiens
atgaggaaaacccagtgcaaaaatgcggaaagttccaaaaaccagaatgcctcttttcctccaaaggatcacaactccttgacagcaagggaacaaaactggatagagaatgagtttggtgaattgacagaagtaggcttcagaagactaaaccaggaagaagttgaattcctgaatagaccaataacaggctctgaaattgaggcaataattaatagcctagcaaccaagaaaaggaccagagggattcatagccgaattctactagaggtcattacttctttttatgtggagcgtggaggaaatgctatgtccttcatgggaaaaggtgttacaaagagcacaattctttgcttgcttcacttatcccatgagatgatggcccaggctgggagcttggagtggatgtcactttggttcttgcctttgggtagtcatagtgaagaacatattcctactcaacaaggattggcttggttgattccattatgggttgatcgggacccagaggtgagattcacttcactgggattaggatcagcactgaccacccttgaaacgggctgtgtggccttagcaaacagttgtcagaacatttccggtgggctctggggaactgtggtgaacattcttctggaccagtcagaatgtagtatggtgcgccgggagagtcagcaccatgtggatgttgccaaggtttatcacttacaccctccagagtggtggcccaagctgtacctgggcccacttgaccacagcagggagctaaggagctctgtgctggaatgcatggagcagagacttgaggtgactctaggcaccacaccctacttctcagtaccaatttccaagttcattcaggctgttacaacaaaatgccttagactgggtgccagcagattcagtgtctgtcttgctgggctgtctgcagcccccgaacaaaagatacatcccccacccccaacacagcagttccaacagctcccccatgactcagttggtttcttacaattctctctccatcctaaaggaaattttgggagcgggatcagcagtcctgacagaagcggggatgccagtcattactcttacccatcactctggcaaatccgaggaacatcacgggtcaagaagcagacctggggctctggcaacctcaagaaatggggaatacacaaggtgcagccccaaagactgatgatgcaaaatgacacggatgaagagtccatttaa

SEQ ID NO: 135326 - DNA, 990 bp, Homo sapiens
atgtgtttggtacgcgattgcgacgtgctagaagacgtatttccaccggtgatcggggttgctgcccataaaggtggcgtttacaaaacctcagtttctgttcatcttgctcaagatctggctctgaaggggctacgtgttttgctcgtggaaggtaacgacccccagggaacagcctcaatgtatcacggatgggtaccagatcttcatattcatgcagaagacactctcctgcctttctatcttggggaaaaggacgatgtcacttatgcaataaagcccacttgctggccggggcttgacattattccttcctgtctggctctgcaccgtattgaaactgagttaatgggcaaatttgatgaaggtaaactgcccaccgatccacacctgatgctccgactggccattgaaactgttgctcatgactatgatgtcatagttattgacagcgcgcctaacctgggtatcggcacgattaatgtcgtatgtgctgctgatgtgctgattgttcccacgcctgctgagttgtttgactacacctccgcactgcagtttttcgatatgcttcgtgatctgctcaagaacgttgatcttaaagggttcgagcctgatgttctgtgtgtcaggaattcagatggggcatgctgctgctccacagtgtctggggcctcagctgggcaaactgaaatgactgagggagatgtgaatggccaggaactggaatcctctggagccatctttacttacatgtctggtgcctggatggtgatgactttgaaagctgggctcagctgggactgccgctgggagccgcgggtcggacgagccgccgcctccttctctgcgtccatgtatgaggggaagaagacgaagaacatgttcctgacccgggctctggagaagatattggccgacaaggaagtgaagaaggcgcatcactcccagctgcgcaaagcttgcgaggtggcgttaggtttaccgacttaa

SEQ ID NO: 135327 - DNA, 466 bp, Homo sapiens
gcggtgcctctgagagccgccgccacctcgtcactcagttcccggcagacagccgcccgggccggcgtccctcaccgccaccagggcacggaggacgagtaaaaggtggcggccgggacgcgacccccgggcacggagaaaacgggtccccgacgggcgcggccctcgaccccgtttgagcccgcgggtcggaaagagccgccgcctccttctctgcgtccatgtatgaggggaagaagacgaagaacatgttcctgacccgggctctggagaagatattggccgacaaggaagtgaagaaggcgcatcactcacagctgcgcaaagcttgcaggggtggcgttagagggaaataaagcggaaactgaaaaacagagtcctcctcatggtgaagcaaaagctgggataagcacccttccaccagtgaaatcaaagacaaattttattgaagcagacaagtacttct

SEQ ID NO: 135328 - DNA, 1227 bp, Homo sapiens
atgactgagggagatgtgaatggccaggaactggaatcctctggagccatctttacttacatgtctggtgcctggatgaaacttattgcttatgggcacttgactggcaatgctccagatagtacaacaccaggcaaaaaattaattgatagaattattgaaacaatatgtggctgctttcagggccctcagacagatgaaggagttcagctgcagataataaaggtaggaggtattgtttggattttccctgctgcgggcttcattacactagatctcttccatctgaactataaatcacaattcaagcttgagagcagctgccactgtccagacatgtggctgagcccgggtcaggaacatgttcttcgtcttcttcccctcatacatggacgcagagaaggaggcggcggctcgtccgacccgcggctcccagcggctggaggggaggaggaggagaggaaggaagagaagagagaaaggagagggggtggagtgcacggaactgctgtccaggactctgctctccgactacctcagggaggattctgttttgggaaaagtaagccaaaacctattgataagggttcaaaaatgtttcacttttttctctctctgtcggataaatcggtcaactctagatttcaggtcccttctgaattgactcagttaagcgcaggggcacaagctgagcttgtaaaagcccacagatgttgggggctggagaaggggcaggagagcatcacactcagccccagcctcctcaacctcttggggccctgtgatggggaggagacggcagcaccaccacctcttccaccaatccccacagtattaactccacttccactctgtccgacatcacccccctcaacccttctgctccgcctcttcaatctggaccagcagcagcccctactgccagaacgacaccacagccacccagcatggcagagcaagcttgcacagggaaggtatgctaggaaatggctgcacactgtcccactagggaattccatcctctgccaactaaggaattccatggaaaagattcacgtcagtggacagatccagatggtgcctgatcctttaggtggtatgctgaaagaaggcattgttgtcataggagaggacagctccatgcgtgttattgcccctgaaaaccttccagtaggacaagatgtggaggtggaagacagtgacattgatgatcctgacccagtgtag

SEQ ID NO: 135329 - DNA, 7285 bp, Homo sapiens
gcggtgcctctgagagccgccgccacctcgtccctcagttcccggcagacagccgcccgggccggcgtccctcaccgccaccagggccggagtgacgagtgagaggggcggccgggacgcgacccccgggccaggagaagcggaggcccgacggcggcggccctccgaggtacggcttcttgggggcggcgaggacctcgacgcccttcgccgacaccgcggctggtcccgctcgcccgccccttcctgatcctgccgctgccctccacgcctccaatcccccacctccaccccctctcctttctctcttctcttccttcctctcctcctcctcccctccagccgctgggagccgcgggtcggacgagccgccgcctccttctctgcgtccatgtatgaggggaagaagacgaagaacatgttcctgacccgggctctggagaagatattggccgacaaggaagtgaagaaggcgcatcactcccagctgcgcaaaagcttgggagggtggcgttagaggaaataaaagcggaaactgaaaaacagagtcctcctcatgggagaagcaaaagctggatcaagcacccttccaccagtgaaatcaaagacaaattttattgaagcagacaagtacttcttgccttttgagttgggcatgccagtccaaatgtccttcgcatagtttagtacatctctagattgcttacagaaactttattgcttatggggcactttgacttggcaatgctccagatagtacaacaccaggcaaaaaattaattgatagaattattgaaacaatatgtggctgctttcagggccctcagacagatgaaggagttcagctgcagataataaaggctttacttactgcagtaacatcacaacacatagaaattcatgaagggactgtactgcaagctgtgagaacatgttacaatatctacttagcaagcaaaaatctcatcaatcagacaacagccaaagctactctcactcagatgctaaatgttatctttgcacgcatggaaaaccaagcattacaggaagcaaaacaaatggaaaaagaaaggcatcggcagcatcatcatctgttaccgtctccagtaagccatcacgagcctgaatcacctcaacttagatatttgccacctcagactgttgatcatatatcccaagaacacgaaggggaccttgacctccatacaaatgatgtagataaaagtcttcaggatgacacagagcctgaaaatggatctgatatttccagtgcagaaaatgaacagactgaagctgatcaggcaactgcagctgaaacattatctaaaaatgaagtgttatatgacggagaaaaccatgattgtgaggaaaagccacaagacattgtacagaacattgtagaagaaatggtgaacattgttgttggagatatgggagaagggactactataaatgcaagtgcagatggcaacattggaactatagaggatggtagtgacagtgaaaatattcaagcaaatggaattccaggaacaccaatttctgttgcatatacaccatccttacctgatgatagattgtcagtctcttccaatgatactcaggaatctggaaattcttcaggaccttcacctggtgctaagttttcccacattttacaaaaggatgcctttctagtattcaggtcattgtgtaaactgtcaatgaaaccactgtcagatggaccaccagatccaaagtctcatgaactacgatccaagattctttcattgcagttacttctatccattctgcagaatgcaggacctattttcaggacaaatgagatgtttattaatgctattaagcagtatctttgtgttgcactctcaaaaaatggagtctcatctgttccagaggtttttgagctttctctttctatatttcttactttgttgtcaaatttcaagacacatctgaagatgcaaattgaggtgttctttaaagaaattttcttatacattttggaaacttctaccagctcatttgatcacaaatggatggttattcagacactgacgaggatttgtgcagatgctcagagtgtagtggatatttatgtaaactatgactgtgacttaaatgcagccaatatatttgaaagactagtaaatgatctatcaaaaattgctcaaggaaggggcagtcaagaacttggtatgagtaatgttcaggaattgagcctgaggaaaaaaggtttagaatgcttagtgtcgatttcgaagtgtatggttgaatggagtaaggatcagtatgtgaatcccaactcccagacaactcttggtcaggaaaaaccctcagagcaagagatgagtgaaatcaaacaccctgagacaataaacagatacggaagtttaaattccctggagtcaacatcatcatcaggaataggcagctacagtacacagatgtctggcactgataatccagaacaatttgaggtcctaaagcaacaaaaagaaataatagaacaagggatagatttatttaataagaaaccaaagagaggaatacagtacctccaagaacaagggatgcttggcaccacacctgaagatattgcccaattcttacatcaagaggaaagattagactctactcaagtgggtgaggttcccggggggataatggataaatttaaccaaagaagtcatgtatgcatatgtggaccaacatgacttttcaggaaaagacttcgtttcagcccttcgtatgtttctagaaggatttcgtcttccaggggaagctcagaaaatcgatcgattaatggaaaaatttgctgcaagatacctagaatgcaaccaaggacaaactctctttgctagtgcggatacagcttatgttttggcttattcaattatcatgttgaccacagaccttcacagtccacaggtgaaaaataaaatgacaaaggaacaatacattaagatgaatagaggtatcaatgacagtaaagaccttcctgaagagtatctatcagccatctataatgaaatagctgggaaaaagatatcaatgaaagaaacaaaagaactaacaatccctacaaaatcaagtaaacagaatgtagccagtgaaaaacaaagaagacttctgtataacttagaaatggagcagatggccaagacagctaaagcactcatggaggccgtgagccatgttcaggcaccctttacaagtgcaacacatttggagcatgtgaggcccatgtttaagttggcttggacgccttttctggctgcattcagtgtgggtctacaagattgtgatgatactgaagtagcctctctttgcctggaaggtataagatgtgcaatcagaattgcatgcattttcagcattcagctggagagagatgcatatgtccaggcactagcaagatttaccttactcacagtgagttccggtattactgaaatgaaacagaagaacattgacacaataaaaacacttatcacagtggctcatacagatggaaattatttaggaaattcatggcatgagattctgaagtgcatcagtcagttgaagctggcacagcttataggaactggagtgaaacctcgatacatttctggaacagtgcgaggcagagaaggatctcttactggaacaaaagatcaggctcctgatgaatttgtgggtttagggctagttggaggaaatgtggactggaaacagatagcaagtattcaggaatccattggagaaaccagttctcagagtgttgttgttgctgtagatagaatattcacaggatctacaaggctagatggaaatgccattgtggattttgtccgttggctctgtgctgtgtctatggatgaattactttccacgacacacccaagaatgtttagtctacaaaaaatagtagaaatatcatattacaacatgggaagaataagattacagtggtctcgaatttgggaagttattggagatcattttaataaggttgggtgtaatcctaatgaagatgtagctatttttgcagtagactccttgaggcagttgtcaatgaagttcttagagaaaggggagcttgctaacttcagattccagaaggatttcttaagaccttttgaacatataatgaaacggaacaggtctccaacaattcgagatatggttgtacggtgtatagcacagatggttaattctcaagctgctaacattcgatctggatggaagaacattttctctgtatttcatctagctgcatctgatcaagatgaaagcatagtggaacttgcattccaaacaaccgggcacattgtcacccttgtatttgaaaaacactttccagcgaccattgattctttccaggatgcagtgaagtgtttgtctgaatttgcgtgcaatgcagctttcccagacacaagtatggaagcaattcgacttattcgccattgtgcaaaatatgtgtctgatagacctcaggctttcaaggaatacacaagcgatgatatgaacgtagcacctgaagacagggtgtgggtgagaggatgggttcccaattctctttgagttatcctgtatcatcaatagatgcaaattagatgtaagaaccaggggtttaacagtaatgtttgaaataatgaaaacatatggccacacttatgagaaacactggtggcaggatttatttagaattgttttcagaatctttgacaatatgaaattgccagaacaacagacagagaaagctgaatggatgacaacaacttgcaatcatgcactttatgcaatctgtgatgtattcactcagtatttagaagtactcagtgatgtacttttggatgacatttttgctcagctctactggtgtgtgcagcaagacaatgagcagttagcgcgatctggtacaaactgtttagagaatgttgttattctgaatggtgaaaaatttaccctagaaatctgggataaaacttgcaactgcacactggatatcttcaaaaccacaatcccacatgcgctgttgacctggcgacccaattctggagaaactgcccccccacctccatctcctgtaagtgaaaagccattggataccatatcacaagaaggccggagatatatcatggatctatttcacccaaggctgtgggataacagaacccaaggcccccctgggttctgcggctggttgttaatggagaaaatccgccaaaattaaatctacagcaaaatttccagaacaaaaattgtttgctgccctgttgattaaatgtgttgtgcagctggaactcatccagactatcgacaacattgtcttcttcccagccacaagtaagaaagaagatgcagaaaacttagctgcagcacagagagatgcggtggactttgatgttcgcgttgatactcaagaccaaggaatgtaccgctttttaacatcacaacaactttttaagctactggactgcttattagagtcacatagatttgcaaaagcgtttaattccaacaacgaacagaggacctgcccttgtggaaagcaggattcaaaggcaaatccaagccccaaccttcttgaagcaggaagaccagcaagcctggcctgtgggctgccgcatttctccttccggatgtacatggatgagagccgcgttagtgcctgggaggaggtccagcagaggcttttgaatgtctgcagtgaagcactaagttacttcctcactctaacatcagaaagtcatcgagaagcctggactaacttactgcttttgtttctaactaaagttctaaagataagtgataataggtttaaagctcatgcatcattctactaccctctcttatgtgaaattatgcaatttgacttgattcctgaacttcgtgctgttcttaggaagattttttctgcgaatcggagtagtttttcagatatcacaaccacctgaacaggaacttgggaataaacaaggcaatgatgggggaacttaatattttttgttgggccatttacatccctctgctctttaaaaggaccgctggagctgaggttttcccacctgaaaaaatgatttctcctgggattgcaagtgtctgagttactggtaaagatgcttagaagtcttactcaaacttgcaacactccagtccccttttagtgctggtggattttgtgtgttatattggcctcatgttgagcagaaagcctgtttaaacaggtgtcagctccatggctcacgggtccttccctgtcttccacggcaggaaaagccccacgtttttggcaggtgtggaagtgaaacttacccaaagaactatagatgtaaagattgaacttctacaagaagtacaactcagggagagctgtattttgaaggataaaatgtttatatttggcgagtgactgagagaagaagaaatttattgttcatggtaaaagatatttaggcaactatggtattcttaattctgaaagatttttggcacacttcagggctatctggagattactgggtaatcattcccgtggaaaaatgtacagagatggcaggtctgtaattataaaaatcttaaaacattatatagttcttcctgcactgttttctttattttcttattcatttgctaaatacccataatattttgtcaaatgcactaaacatttgggtggaactttcttttttattttatagggatttttagttttgccctttttggtaggtggtgattttgaggctgtaacatgcccagaagctgttgtggccgacacttcaacaatagggaaaaaaaggtagaaaatatccctactgacagtaactacctgtcacatatttctcttaggacttttaaagatgagccattaaaatagaatgatcctttatggaccaaaacttgaaatcactgccaaaatgaatccagattgcctgtccattttcttttccttttgggtggtggggccttgatgtagattttacctctatgtaccagaatttaaccgttgaatatattaaaataacaaatctggccatggtttgcggaggttagatttactggaaatgtattcatactgtgaattgtgctctgatggttaaaagacaagattgtcaagcattccgtattaacagtgggatgtaggaaaattttttcagatgggacaaaatgtatatgggtacagatgtaaagttttctatggtaaaaaattctgtaccaactttctgtacaatattgattcccatctggcatattctaatcaggttataggtcaataaagtttttgaattatttcaaa

SEQ ID NO: 135330 - DNA, 315 bp, Homo sapiens
tcgtcttttgtttcaatgtgcaaagtcttttatttaaaattttagaagttaagacttacgaccacctcagtatatgccattcctaatagaaggaggtatgacggtttcaaactcgtgcagagctgcattttcatttacaagtctctgtaggcactttagaagtgaagcttggcttcaaaatacaaacactgggggctttggctcaaccttttaatataaaaaaattcactgaaatcctgtgactgaaagtcccctcgagtgcactctgtggtgcacatgcgcccgcccacacaaactctggcattgaaacaaaag

SEQ ID NO: 135331 - DNA, 617 bp, Homo sapiens
gagcgtgagaaccctccccaactaatcctgggtcgccgcctcggagaagggccgcggggccgagcgcgggaagtggcgtacagtcggtttttggcaggcgagagccagagcgtgagaaccctcccacggcgaggccaagccctgagactggactagcaaggtcgtgagtctctctgtcagctctccgcagcgaaggggcgcggggggcggggaccgtgcccgaccgtgccagctcccgccccggaagcggaagtgcaagcactgcggggtcctgtccagtgtgagcccgacccgagctccagtagatccgcccgctggtcatcgcgccctttcccctgccggtgtcctggctcgccgtccccgccatgctgtctctagactttttggacgatgtgcggcggatgaacaagcggcagaaagaaagaggagaggagaagagaaaagaaaaagaaaaagaaaaagcggaagaaagtggaatgaacagacttgctgagtctggttatctttatctttctccagtgctgaatgcttcctgccctcggacacctcagcttttggactcctggacttacgtcagtggtttgccaggggctcttgtgctttctgccacagactga

SEQ ID NO: 135332 - DNA, 1197 bp, Homo sapiens
aggagtttttttttttttttttttttcaatgtgcaaagtcttttatttaaaattttagaagttaagacttacgaccacctcagtaatatgccatttccctaaataggaggaggtatgacgggtttcaaactcggtgcagagctgcattttcatttacaagtctctgtaggcactttaggaagtgaaggcttgggcttcaaaattacaaaccactgggggggctttggctcaacccttttaatataaaaaaattcactggatgtacaaaaaatttgaaaagtgtgaacaatgacaattatggaaatcctgtgacttgaaagtccccctcgaagtgcactctgtggtgcaacatgcgccccgccccacacaaactcctgggcatgggaaacataaactaaatgcaaacccagtgctaccccagaagcacccaacacgtgtggttcctcccattcccaccaatccacagaccgagtatctactcccaaacatcccagtaacggaaaactatgggcatcttccccaggaacagcaagggagggcttctttactcacgatggaccagcacggaataaaccccagcaaaaagagaactgcatacttaaatttaggatagtcattcatggagggatcgtcaacaattcccaatataagggaccaattcccctgggctctccccccacaacatcttttttcctcctagcccaatgttgtcccttgtttaaaagaggcctcgggtcatcaacccggatgattattctccctttgggtcaaaaaacttggatatgccccatttttgcttatcatgaatccttcaagactcggtgaactataggaatctctcttgcttctatcctaaaaacaacaatttctccccactccgtatgggatcttcaacctcgattttgttagaaagagaagatctccctctatgaaatgcaggttccaatgctgccactgagcaccactacaatcggactttcacttccagttattaccattaaccccttccagatcattagtgccgatgagacaatcattccaaaatttaggacttgataatagagctgccgcttgttcatccgccgcacatcgtccaaaaagtctagagacagcatggcggggacggcgagcaggacaccggcaggggaaagggcgcgatgaccagcgggcggaactactggagctcgggtcgggcga

SEQ ID NO: 135333 - DNA, 949 bp, Homo sapiens
tcattccaacttcagttcaaggtccagagttatttctggcccgtcatagtcactcaataaatattcgtagaagatcttccctgaaggggtcagttgatctcttgcaagtgaattgaagattgtcttggcagaaccatgacccaaggctttgacgcctggagttttttctacggtgtatattctttttgcttgagcgtaagatctatctgattgtacagttttcttgtctcctcgccagttcgtccgtttgtctcggttatatcggctgcgtcgagtgctgagtggccagtggttgcgaaggctcgtggacgctcgggctgtctgttggccgttgagtggggcaggaggtggagggtgtgttgtggggcttttggagccgtgcgcgtggcgacgggggggctcgtgggaggcctggacggtgcggtcgcgtgtgcggtggagggcggtgagtgtgagctcgggtgcctcagggtgccgcgtgactgtcgtcaggggttgtgttggcaggcgccgagggggggctggtgcagaccaggaggttctggtagttgacgtggacatgaggatgttcgtggagtgctgcatctcccggaaggcagtgctcaggcaccactgggcctgggcacagggcttccggatgctgttatcttccctcctcacccaccctgggctggtgtgcagaaggcagcaggtgctactggccccaggccagcccgaactcgaaacaacacacacggatgtgggtcacaaggctagttccacaagtgtagatgaccgtgtccacctcgccatcgaagcacaccgtgcactcgccattcttgatcgtgccggctccggtggggagaacacgggggacaccggggggctcagcggggagctgggggccgtcactcgcctcgctgcgacaaacgtgctctcctttctcacaaacaaccacaaacattctcat

SEQ ID NO: 135334 - DNA, 213 bp, Homo sapiens
cccacgcgtccgtggaccacgccttgcgtaccatctcctacatcgccgacattgggaacattgtagtgctgatggccagacgccgcatgccccggtcagcctctcaggactgcatcgagaccacgcccggggcccaggaaggcaagaagcagtataagatgatctgccatgtgttcgagtcggaggatgcccagctcatcgcccagtctatcg

SEQ ID NO: 135335 - DNA, 3813 bp, Homo sapiens
cgctattcgggaagctattcagcttcccgggctcattagcagtcgcggtgtgcggctcggcgcgggctcacaaagagctcggcctcgcggactgagccggcggcagcggggcggggacggcggcgtacccgggcagcccagcgccctggccagtctcctgaatatttacgcgttgctgaatctcctgtggacaaaccaccaataggccaggactgtcctgtggacagacggggtgagcctcttcttgtgtctggagattctgaaaagatttgatcaccaggagatttttcgggacattaccaaaccactcattttagtggctgcctccgggtgatgatggctgtgtgaacgactgccatggcccaccggaagcttgagagcgtggggagcggcatgttggaccatagggtgagaccaggtcctgtccctcacagccaggagcccgagagcgaggacatggagctgcccttggagggctatgtgcccgagggcctggagctggctgccctgcggccagagagccccgcgccagaggaacaggagtgccacaaccacagccccgatggggactccagctctgactacgtgaacaacacctctgaggaggaggactatgacgagggcctccctgaggaggaggagggcatcacctactacatccgctactgccctgaggacgacagctacctagagggcatggactgcaacggggaggagtacctggcccacagtgcacaccctgtggacactgatgagtgccaggaggccgtggaggagtggacggactcggcgggcccgcacccccacggccacgaggctgaaggcagccaggactacccagaccgccaactgcccattccggaggatgagccctccgtccttgaggcccatgaccaggaagaagatggtcactactgtgccagcaaagagggctaccaggactactacccagaggaggccaacgggaacaccggcgcctccccctaccgcctgaggcgtggggatggggacctggaggaccaggaggaggacattgaccagatcgtggcagagatcaagatgagtctgagcatgaccagcatcaccagcgccagtgaggccagccccgagcatgggcctgagccagggcctgaggactctgtagaggcctgcccacccatcaaggccagctgcagccccagcaggcacgaggcgaggcccaagtcgctgaacctccttcccgaggccaagcaccccggagacccccagagaggcttcaagcccaagaccaggaccccagaagagaggctgaagtggccccacgagcaggtttgcaatggtctggagcagccaaggaagcagcagcgctctgatctcaatggacctgttgacaataacaacattccaaaaacaaaaaaggtggcatcatttccaagtttggtggctgttccagggccctgcgaaccaaaaaacctcatcgacgggatcatctttgctgccaattacctggggtccactccagctgctatcagaacggaacccttccaaaaacatcagaatgatgcaagcgcaggaggccgtcagccgggtcaagaggatgcaaaaggctgctaagatcaagaaaaaagcgaattctgagggggatgcccagacgctgacggaagtggacctcttcatttccacccagaggatcaaggttttaaatgcagacacgcaggaaaccatgatggaccacgccttgcgtaccatctcctacatcgccgacattgggaacattgtagtgctgatggccagacgccgcatgccccggtcagcctctcaggactgcatcgagaccacgcccggggcccaggaaggcaagaagcagtataagatgatctgccatgtgttcgagtcggaggatgcccagctcatcgcccagtctatcggccaggccttcagcgtggcctaccaggagttcctgcgagccaatggcatcaaccccgaagacttgagccagaaggaatacagcgacatcatcaacacccaggagatgtacaacgacgacctcatccactttctcaaactcggagaactgcaaggagctgcagctggagaagcacaagggcgagatcctgggcgtggtggtggtggagtcgggctggggctccatcctgcccacggtgatcctggccaacatgatgaatggcggcccggctgcccgctcggggtaagctgagcatcggggaccagatcatgtccatcaatggcaccagcctggtggggctgcccctcgccacctgccaaggcatcatcaagggcctgaagtaaccagatcacaggtgaagcttcaacattgttcagctgtcccccggttcaccacggttcctttattcaaagcggccagacctcaagtaccagctgggcttcagcgtgcagaatggaattatctgcagcctcatgagagggggcattgctgagcgagggggcgtccgtgtgggccaccgcatcatcgagatcaacgggcagagcgtggtggccacagcccacgagaagatagtccaagctctgtccaactcggtcggagagatccacatgaagaccatgcccgccgccatgttcaggctcctcacgggtcaggagaccccgctgtacatctaggccaccccagcctgggccacgcagccaggacaccgggcagggccgcccgggcccagaggagctgggagccgggccgcagacttgaccccgacgccacagcccagccacggacgctggctccccaaagggtgtgccctcaccacccacttgatttttttcattttgccaaaaaggggtatgtctttatcaaaggagagtcacagaacaaatgtttgtttgtaaagcgttccaagtattttgccacgttctggactgtcttctccctgcacaagccagggtgtgtctcggtagctgtgcgtggtgtggagtgtgtgtctttcctccctgaagctgtgcggagcgaactggcgcctccgagggacgcggctcccggggcagggcagccgtcacccctgcctcccgcccccttggctgggacgtctggggtcctgtggggcccccacaatggtcccaaacagctgcctctgccactgactgcagggacacgggcagcctggctcccaggacacgacttgtaatgaaagtttggggacatgtgattgattgattgattgattgtaaataaaggatgatggccacaacatgaaaactccatatttatttagatgctattattactgtttggacttttattttggcaggcttttttccagactctagggttttccaatgtgactaatgaccacacctgcctctcccgtcgtctcttctgggcaccctcccacccggctgcatacccggccagggctcccacagagacaaggagggcacaggtgtctgccccctctttaaaatcgatctacacacatccacgcacatgcgaccccgagggaaacgaaacccactctaaaaaaacgcgaccttggccgcacctaaagcagcccagccgtgagtgcagaccccttggccagcgtggcgcagtggccctgagcagtagtggcatgtgtgtagatcaagtcggatactagtccagctcggttcattagttagcgatccatgtaatctgacgtcatcttgtctcgaagtctctttttttggcccaggccttgaagaatacactgtgacttaagaagccttaccacgcagtaactaaagctttaggatgactgtattcgaggagtgccgtgtgttgcatgcagctacccgtaggaagacttcgcgcatatcactaataaacctgaagtcgtgatgacc

SEQ ID NO: 135336 - DNA, 771 bp, Homo sapiens
gtaaccgaagaagcagtagacgactccaaacaaacagcacatgatgcagacgagggccggcagtgcctggtacctgcgctccaggggctgttcacaaggtgcaccccagaaggcatcatctggctcagggggcagcagctggaaccgcagtgttgccacagtccccggcatagtgctgggctggaggcgacctgagcttctgagtgaaagaggctgtgcagaggcccgaggggccggggttgcggggcgccagaggctccaactgactggggtccagggaaagtccgtcgtgcgaggaagggggctgctgggccggagagaatggtgtcggcgcggtggcggcgccgctccacgtccaacaccggctggcactccagtcccgcggcgtccgggaactcgggctgggcctgaggaaggggaaggcgcaggagccggggctcgggccgccccagaaccgcggccccatgccctgagcccgcccgcggcctttggtgctgatggacagctccggcctctgctcctgacgtcactcagggcgcaccatccaggcaggggcgggctgcttctgacgtcacctgggacgcaccaaccacgccgcgggaggcaggggactccgcccccggcgtctccctctcccgcactgaggagggggcacttccgggggtccttcccctttaacctcccccttctcctccctctccggtagcgagagcccgagaccccaccccgggggcggggcccttgcagtgacacgtcggacagctgcggccg

SEQ ID NO: 135337 - DNA, 2659 bp, Homo sapiens
gcccttttttttttttttttatgagttggaaacaactttattgatacctgagaaaaagtgcaggaaaaatattcctcctgaccaggtggcctgtcccctgaggccagatcattctctcgcctctcccttaagccctgggtcatttgggacctcactggccagcacccagaggctgaagacatccacagccagagcctgggaagccagacccagagaccaggagagggaatgtctacagcgtggctcctgaggttcagggccaaggtcaagcgtggggaccctcatcggtcaagggccaacgccttcttggatcactgtccccggagtccgatggaaaacagctcctcccatggttccccggatccaggcaagcagggctgtcagctgctccctgaaacaccacacggagtgccccaaaagctctcccagccgggacaccctcatcgtagaagagcagccgcaagttcttcaggggctgagcggtagagcagcacggagctcaggctgctgagtggctgctgctccctgacacgcacagcagggcccggccccgagggaggcaccttctcagaggcttcgccagatgctgctggaggagagggctctgccggggaccctgcagcatcctcatctaacaggaacagggtggacggagtcagcaacagggatacgaggcaggtggaagggccttcaaccaggaacgcccgaaggtagaagaactggcgagcctccaaggatgagtctttttccagcaatggccagagccggtgctggggggtgacctcctcctctgtggcactgacacagttcctccaggcagggggcagagactgcaagacatcaaggagctcctctaggaaggcccggcaatgcctggcatctcggggcagcagcacatcagcggcccgccccagctgcccactctagccgcaggctctggcctgccaggcccagctctatgccactcagatcctgcaggggaacagccagggtcagctgcagccagctagctggaggctcacgcatctccccagtcaccttcaacaggtacagcctgcggtcagacacaaccacaaggcacatgaactccccagtgtggcctgccaatgccactggcaccttgaggcagcactggaactcctcctgggcatcgctgaacacctcaacatccaggaagagccggagtcggtggtcccacagagcggaggcccacagcgcctcaaggggggggactgaaggctcccaactaccatggtcacgggtgctcggtgcctgaggtgggctgttcttggccctgtcaaggtggtcaccatggccaggagggtggcagacagggctggcaaacggagaaggagccagagactgctctccctgtttccgctccctgttgggggttccccgagacacagcgaggagaaccacgtggtcactaccacagttaggacacacagcaggagattctgtcttttggaacagaggcctccagccttcctcactgtctaaatcccatcctgggctcctctggcttgaactcatggccacagcgtagacactggaatctacccagcaggaggtccctggcctccccaagctgttcccgagccacattggtgactggggtcaacacggcaagcagctcctggacagctgcgtgggcatcaggctccagcaccaaatagcgacgcaactgccggtcagggcagatgtaggagaagcgcagactgaggatggggctccagggagcagatctgagcccttccacttccttctggtcctgctcctcttcttcctcctctcctgcctcctcttctccctgttccaccatctccccctcctccttctcctccttcccctccttctcctcttcctcctcctgtggccgccctgacctcctctgacattttctgtggtgactcctgggggcctctggtgtcctcctcataggaaaagcctcaatccaaccagtaaaggtgtcaatgaatactaataaatatttaaaccttttacatgggggcatcttagtataatctctttgccaatcttcaccagggtacattcccttatgctgaacaggccttactgccacgtcaagggttacccaaggctcctctggagatatatgtagttgtccgacagggctgtggcagaaggtccccggtcccgtcactcttgagctggtcgaagaagcagtagacgactccaaacaaacagcacatgatgcagacgagggccgcagtgcctggtacctgcgctccaggggctgttcacaaggtgcaccccagaaggcatcatctggctcagggggcagcagctggaaccgcagtgttgccacagtccccggcatagtgctgggaatagaaggagtcaccctcccagttaacctgggctggaggcgacctgagcttctgagtgaaagaggctgtgcagaggccgagggccggggttgcggggcgcagaggtccaactgactggggtccagggaaagtccgtcgtgcgaggaagggggctgctgggccggagagaatggtgtcgcgcggtgggccgctccacgtccaacaccggctggcactccagtcccgcggcgtccgggaactcggctgggctgaggaaggggaaggcgcaggagccgggctcggccgccccagaaccgcggccccat

SEQ ID NO: 135338 - DNA, 501 bp, Homo sapiens
cacagcaaatgctgaggactcagaccagtctctgcaagagctgctcccggcagatcggcttctcctttgtacgacccaagctctgtgccttctctggcctctattactgtgacatctgccaccaagacgatgcctcagtgattccggccaggatcatccacaactgggacctcaccaagcgcccgatctgcaggcaggccctgaagtttctgacgcagatccgggcccagcccctcatcaacctgcagatggtgaacgcgtctctgtacgagcatgtggagcggatgcacctcattgggaggagccgggagcagctgaagctcctgggggattacctgggcctgtgccggagtggcgccctgaaggagctcagcaagaggctcaaccaccggaattatctcttggagtctccgcataggttccgtgttgctgacctccggcagatcgcagatgaggtatatgaaggattcctcaaggccctgattgaatttgcctcccagc

SEQ ID NO: 135339 - DNA, 2649 bp, Homo sapiens
atgaggaccattcaggaggaagcaggctggcagcaggaattcatcctggacatgtcagctgagatcctagtggacatgtatggcacaggtggatatatgaatgtggatttcaagaacaaggtccaggctggcgataaaaattgggagctaaagcctgagagcagtgaaatacaggatgcaagagcagcagtggacggactgtccaacccattccagggtctcatgaagctgggcaccgtggagcggcagggggcaatgggcatctggaaggagctcttctgcgagctctccccactggagttccgcctctacctgagcaacgaggagcacacctgtgtggagaactgctccctgcttcgctgtgagtctgtggggccagcccacagtgacgggcgctttgagctggtcttctctggcaagaagctggccctgcgcgcctcctcccaggacgaagctgaggactggctggaccgggtgcgggaggccctgcagaaggtccggcctcagcaggaggatgagtgggtgaacgtgcagtactcagaccagcctgaggaaccccccgaggcgccccagggctgcctctctccctcagacctgctctcggagcccgcggccctccagggcacacagtctgactggtcgtccgcccaggttccagagctagatgccatcaaggagtccctgctgtacttgtacatggacaggacctggatgccctatatattttctctgcccttggaggctctgaaatgtttccgcatcaggaacaatgagaagatgctgagtgacagccacggcgtggagaccatccgggacatcctgccagacaccagccttgggggcccatccttcttcaaaatcatcacggccaaggctgtcctgaagctgcaggccggaaacgccgaggaagccgccctgtggagggatctggtccgcaaagtcctggcatcctacttggagacagccgaggaggcggtgaccctgggcgggagcctggatgaaaactgtcaggaggtgctgaaatttgccacccgggagaatggcttcctgctgcagtacctggtggccatccccatggagaaaggccttgactcccaaggctgcttctgcgcaggctgctcccggcagatcggcttctcctttgtacgacccaagctctgtgccttctctggcctctattactgtgacatctgccaccaagacgatgcctcagtgattccggccaggatcatccacaactgggacctcaccaagcgcccgatctgcaggcaggccctgaagtttctgacgcagatccgggcccagcccctcatcaacctgcagatggtgaacgcgtctctgtacgagcatgtggagcggatgcacctcattgggaggagccgggagcagctgaagctcctgggggattacctgggcctgtgccggagtggcgccctgaaggagctcagcaagagggctggcccagagagcgcctctctgaagactgcctcctccatcctggctgcagtgctcccagagccgggcctcctcagggccaggatcgcagatgaggtatatgaaggattcctcaaggccctgattgaatttgcctcccagcatgtctaccactgcgacctgtgcacccagcgcagcttcatctgccagatctgccagcaccacgacatcatcttcccctctgagtttgacaccacagtcagcccagccccagtccgggaggaagttctgccgggcgctctccgccggtgcctcactggttatagtgctatacaggaaacctggcagcgccggagccgcgcggtcgaggagggagcgcgggacgccgagcccacgcgcgcctgccgggacaagtggagacgaggccggcgagcggacgccccgaggtgcccgggcaggcagtgggccgccgagcgggagttgaggttggcgaaggagctgtggccgggtccccttcttatccagcccgagacactgcgctccggtgggcgtccctgcgctgggaatccctctcggagtttttccaggcccggccgggttgctccgggaaaggccctgttgggggaggaaaatgccgcggccgcaatggcggcggatgtggagggggacgtgtacgtactggtggagcaccccttcgagtacaccggcaaggacgggcgccgccacagagcactgagcattggtggcacgtgcggcgcaagcccggcggccgccccttctacctgcccgcgcagtacgtgcgcgagctgcctgcgctgggcaaccctgccgctgacgcgccgccaggtccccccatcgggacccgcagcccctgagccgctcgcctacgactaccggttcgtgagcgcggctgtggcagcggcccccaacggccccccagcggagccccgaggcggggccagctccctgtgcggccctgcgcagcgcggcgccgcgagccagcgcagcagcctggcgcccggcctgcccgcctgcctgtacctgcggcccacggcgcccgtgcggcccgcgcagtccctggacgacctgacgcgcgccgtcgtctcgcctcccgccggcaacctcggaagcagcggcagcttcaaggcctgcagcgtagcgggctcctgggtgtgcctgctgcccctgtcgcgcagcgactcagagaacgtctaa

SEQ ID NO: 135340 - DNA, 411 bp, Homo sapiens
gcgcgcagcgacttttagaacgtcttttaggtcatccaggacttgcacgtcccgccgcgggaggagagcgcagagcaggtggacgacccaccggagcccgtgtacgcgaacatagagaggcagccccgggccacttcaccgggcgccgctgcagccccccttcccagcccggtgtgggagacgcacacggacgcgggcaccgggcgcccctactactacaacccagacacgggagttaccacctgggagtcgccctttgaggctgccgagggtgccgccagcccagccacctcccctgcctcggtggacagccacgtgagccttgagaccgagtggggccagtactgggatgaggagagccgcagggtgttcttctacaacccgctgacgggcgagacggcctgtgaggac

SEQ ID NO: 135341 - DNA, 490 bp, Homo sapiens
agaccaccgccggctcccgggtgtcgcaacttcttgtttccttgttgccctgtgccagcactggggtagtgcccctgacgtctacccccaaaaccttcccagggctctgtcccggcagttcagaggggccaggatggtggacataatcgccaaagtgaccaggaggcagagtcgagccttgccggcacaggtggacgacccaccggagcccgtgtacgcgaacatagagaggcagccccgggccacttcaccgggcgccgctgcagccccccttcccagcccggtgtgggagacgcacacggacgcgggcaccgggcgcccctactactacaacccagacacgggagttaccacctgggagtcgccctttgagggtgccgagggtgccgccagaccagccaccttccctgcctcggtggacagccacgtgagccttgagaccgagtggggccagtactgggatgaggagagccgcagggtgttcttctac

SEQ ID NO: 135342 - DNA, 668 bp, Homo sapiens
gactaccccgagtcgctgaccagttaccccgaggaggactattctcccgtgggctctttcggtgagcccggccctacctctcccttgaccacaccccccggctggtcttgtcatgtcagccaggacaagcagatgctctacaccaaccacttcactcaggagcagtgggtgaggctggaggacccccacgggaagccatacttctacaatccagaggactcctctgttcgatgggagctgccccaggtccctgtccctgcccctcgaagcatccataaatccagccaggatggtgacaccccagcccaggccagccctccagaggagaaggtcccagcagagctggatgaggttgggagctgggaggaagtctctcctgccacagctgctgtgaggaccaagaccttggacaaggcaggggtgctccatcgcaccaagacggcagacaagggaaagcggctccggaagaagcactggagtgcctcctggactgtgctggagggtggcgtcctgacattcttcaaggactcaaagacctcggctgcaggcggcctgaggcagccttccaagttttccacccctgagtacacagtggagctgaggggggccactctctcctgggcccccaaagacaaatccagtaagaagaatgtgctggagctacggat

SEQ ID NO: 135343 - DNA, 1803 bp, Homo sapiens
atggcggaaacagcggttatcaatcacaagaaacgtaaaaatagcccgcgaatcgtccagtcaaacgacctcactgaggcggcatatagtctctcccgggatcaaaaacgtatgctgtatctgttcgttgaccagatcagaaaatctgatggcaccctacaggaacatgacggtatctgcgagatccatgttgctaaatatgctgaaatattcggattgacctctgcggaagccacccatagtgatgggcgctttgagctggtcttctctggcaagaagctggccctgcgcgcctcctcccaggacgaagctgaggactggctggaccgggtgcgggaggccctgcagaaggtccggcctcagcaggaggatgagtgggtgaacgtgcagtacccagaccagcctgaggaaccccccgaggcgccccagggctgcctctctccctcagacctgctctcggagcccgcggccctccagggcacacagtttgactggtcgtccgcccaggttccagagccagatgccatcaaggagtccctgctgtacttgtacatggacaggacctggatgccctatatattttctctgtccttggaggctctgaaatgtttccgcatcaagaacaatgagaagatgctgagtgacagccacggcgtggagaccatccgggacatcctgccagacaccagccttgggggcccatccttcttcaaaatcatcacggccaaagctgtcctgaagctgcaggccggaaacgccgaggaagccgccctgtggagggatctggtccgcaaagtcctggcatcctacttggagacagccgaggaggcggtgaccctgggcgggagcctggatgaaaactgtcaggaggaaaagaataatacaaaacacacaactgcaagaaatgcctttgaagaaaatgattttatggaaaacactaacatgccagaaggaaccatctctgaaaacacaaactacaatcatcctcctgaggcagattccgctgggactgcattcaacttaaggccaactgttaaacaaactgagacaaaatgggaatacaacaacgtgggcactgacctgtcccccgagcccaaaagcttcaattacccattgctctcgtccccaggtgatcagtttgaaattcagctaacccagcagctacagtcccttatccccaacaacaatgtgagaaagctcattgctcatgttatccggaccttgaagatggactgctctgggacccatgtgcaagtgacctgtgccaagctcatctccaggacaggccacctgatgaagcttctcagtgggcagcaagaagtaaaggcatccaagatagaatgggatacggaccaatggaagattgagaactacattaatgagagcacagaagcccagagtgaacagaaagagaagtcgcttgaggcagcctctggaactcaagatggtgtccacgtgcaggagccgcgtccccaggcgcccagccccctggacttacagcagcctgtagagagcacctcaagccagcagccttctagtactgtcagcgagacagccagagaagtgggccaagggaatggcctgcagaaagcccaggctcatgacggagctggtctgaagctggtagtttcctcacccaccagtccgcagcaggtgtgcaagctctggtggtcagctggactccatactcccccaccagtcaccagcctggggaccgtggggctgcaaggacctcagcagcggtttcccaagtttcctgacttcttccatcctctggaaatcagctgtggtaaagtagcctga

SEQ ID NO: 135344 - DNA, 912 bp, Homo sapiens
ggctggcccagagagcgcctctctgaagactgcctcctccatcctggctgcagtgctcccagagccgggcctcctcagggccaggatcgcagatgaggtatatgaaggattcctcaaggccctgattgaatttgcctcccagcatgtctaccactgcgacctgtgcacccagcgcagcttcatctgccagatctgccagcaccacgacatcatcttcccctctgagtttgacaccacagtcagcccagccccagtccgggaggaagttctgccgggcgctctccgccggtgcctcactggttatagtgctatacaggaaacctggcagcgccggagccgcgcggtcgaggagggagcgcgggacgccgagcccacgcgcgcctgccgggacaagtggagacgaggccggcgagcggacgccccgaggtgcccgggcaggcagtgggccgccgagcgggagttgaggttggcgaaggagctgtggccgggtccccttcttatccagcccgagacactgcgctccggtgggcgtccctgcgctgggaatccctctcggagtttttccaggcccggccgggttgctccgggaaaggccctgctcctgttccgcgcagcctctccggcctcgcccctggaaaccccgcccagggcgatggtaggggcctaacctgcagccaccgccggctccgcccacccagcccatgggctccctgaggcccgcccagccgacgaaaacgccgcggctgcgatggcggcggacgtggtgggggacgtgtacgtgctggtggagcaccccttcgagtacaccggcaaggacgggcgccgcgtggccatccggccgaatgagcgctaccggctgctgcggcgcagcaccgagcactggtggcacgtgcggcgtgagcccggcggccg

SEQ ID NO: 135345 - DNA, 806 bp, Homo sapiens
acaggtaagaaatctttaatgaatctcaagcagcatttataaaaaatgcagtaggacagagaatatcagtgtgcattgtgtgacgtatgggtaagcactgtttcgagaatctcctgttccgggatggaaaggcacagcgtgcgtgcatgggttacacagtatgtcacagccatatcgtgggttctggtcaaaagtgctggccagcgtggccacaggtcaacctccagcccagccggcaccagcaggtgtgctgctctctccccaggtgtgccaagtgcaagaccgtcttccaccagagctgccaggctgtgggtgaagaagggctgcccccgctgtgctcgctgacgcaagtaccagcaacagaacgttttcgcctgatgcccctctgctgatcccactctgaaggccgggggtgagtgtggctcagccatcccagctgggtttcctatcagcccaggatactcaccgtgtcacagctgtgtccccttgtcaggaagacctcagatgtgaccagagcactggcctcctacagaaagcccaggaagtccccatgatgtcccctggccctccccccacccctctgctgcaggaggcgtggccaccaccagatgctccctgtctggggcaggcagggccgtttactcaccaggccctggctcaccagcgtcccggcgcctccgttagggctggccaaacactgtggaaaggggacttggggaacattttcaattccacattcctgattaaaaggtctggttttttaaggtgggtttttcccattcatatttcaaaaaaaaaaaaaaaaa

SEQ ID NO: 135346 - DNA, 1169 bp, Homo sapiens
tttcgtgcttcctgttgtcagtggccgagagaccgcatcgtcggctcggaggctgaggggctgccgcagccgggagcccccctcgcctcgctcctcgctccgcttggtgtcatgtgattctctgagggagcagctgcgtgagtggagatgctttcagtggtggagaatggactggacccccaggctgccatcccgacacatcatctcagagttggagcacctgacgtttgtcaacatggatgtgggccgctgccgggcatggctgcggctggccctgaacaatggcctgatggagtgctacctgaagctgctgctgcagggagcaggcccgcttgcgtgagtactaccagcccaccgccctgctccgggatgctgaggagggcgagttcctccttagcttcctgcagggcctcatgtccttgtccttcgaactctcctacaagtctgccatcttaaatgagtggacgctcaccccactggccctgtctgggctttgcccgctttctgagctggaccctctctctacctctggtgcagaactacagcggaaggaatctctggattccatttcccattcttcaggctctgaagacatcgaagtccatcactcgggccataagatacggaggaaccagaagccgactgcctcctccctcagcctggacacggccagttcatcccagctgtcctgcagcctaaactctgatagctgcttactccaagagaatggctccaagagtccagaccattgcgaggagcccatgtcctatgactcagacctgggcacagcaaatgctgaggactcagaccagtctctgcaagaggtattgttggaattcagcaaagcccaggcagcctctggaactcaagatggtgtccacgtgcaggagccgcatccccaggcgcccagccccctggacttacagcagcctgtagagagcacctcaggccagcagccttctagtactgtcagcgagacagccagagaagtgggccaagggaatggcctgcagaaggcccaggctcatgacggagctggtctgaagctggtagtttcctcacccaccagtccgaatattagctctatgatacagagcaccaggcctgttcacttctgtattgtcagcaccaagcactgtacctgggagaaagtaggcatggatgaatag

SEQ ID NO: 135347 - DNA, 813 bp, Homo sapiens
tttcgtgtggccgagagaccgcatcgtcggctcggaggctgaggggctgccgcagccgggagcccccctcgcctcgctcctcgctccgcttggtgtcatgtgattctggtgagggagcagctgcgtgagtggagatgctttcagtggtggagaatggactggacccccaggctgccatcccgggcatcaagaagaagctggtgggatccgtgaaagccttgcaaaagcagtacgtgtccctggacatggtgggcactagtgaagacggagatgccacacaccatgtgcagcgccctggaggccgtatttattcatggcctgcacaccaagcacatcgaagctgcagccgggaggaaaaaggaagaaaagtgcccaccagaagcctctgccccagcctgtcttctggcccctcctgaaagctgtcacccccaaacacatcatctcagagttggagcacctgacgtttgtcaacatggatgtgggccgctgccgggcatggctgcggctggccctgaacaatggcctgatggagtgctacctgaagctgctgctgcaggagcaagcccgcttgcaactacagcggaaggaatctctggattccatttcccattcttcaggctctgaagacatcgaagtccatcactcgggccataagatacggaggaaccagaagccgactgcctcctccctcagcctggacacggccagttcatcccagctgtcctgcagcttaaactgtgatagctgcttactccaagagaatggctccaagagtccagaccatgtattgcggccgctcagaggatcaagctt

SEQ ID NO: 135348 - DNA, 1271 bp, Homo sapiens
  misc_feature (1)...(1271): n = a,t,c or g
agcgtggtgtcgaccttagagcgggcaatcacccctcgttttaaagccaaggcttccctcgcagtcgatttggaccaagactacccacaatctccccaccgcaggactgaagcaagggtcaaatcttagaatcaaccccacagaacgaagggctgtcctaattccagcactgagtgtaagaatggaagccttacatgtgattttatgcaagttcccattttagagatgggaaaactgaggcccgaaggcgaacggcgagtgcaggatcgggactcgaacccaagtctgtccccgagtgcggggctattccaggctcggtggtcttgacctccgcggccctccttcttgttgcccgcaggaaaacgccgcggctgcgatggcggcggacgtggtgggggacgtgtacgtgctggtggagcaccccttcgagtacaccggcaaggacgggcgccgccacagagcactgagcattggtggcacgtgcggcgcaagcccggcggccgccccttctacctgcccgcgcagtacgtgcgcgagctgcctgcgctgggcaaccctgccgctgacgcgccgccaggtccccccatcgggacccgcagcccctgagccgctcgcctacgactaccggttcgtgagcgcggctgtggcagcggcccccaacggccccccagcggagccccgaggcggggccagctccctgtgcggccctgcgcagcgcggcgccgcgagccagcgcagcagcctggcgcccggcctgcccgcctgcctgtacctgcggcccacggcgcccgtgcggcccgcgcagtccctggacgacctgacgcgcgccgtcgtctcgcctcccgccggcaacctcggaagcagcggcagcttcaaggcctgcagcgtagcgggctcctgggtgtgcctgctgcccctgtcgcgcagcgactcagagaacgtctaagaggccatccaggaggtacgcggcccgccgcggtaggagatcgtgaagcaggtacgaccccgggcgcggaggcggggaggctcgctgaggacagcgcccgcagggagcctgggctcgaggagaaccactccgctcagcgtcgggcatgacggctcactctgtcggaagacttcggatgagcttcctcttcccagcccgcgaaacatgcagggccccattcctcatctggcattttccagctccaagctcccttgaagcccgaaggattgtcgtatcaaattgtggcaaatttgcgcttgactgaaaaanaaaaaaaactcgtgca

SEQ ID NO: 135349 - DNA, 5892 bp, Homo sapiens
tctaaacagcacagtggactatggcttgaatacctgcatttcgactctagagatcccctccctgaacccgggatcagcgcctccctctggcccagggctggacatcgacgggctgtaccgcatcagtggaaacctggccaccatccagaagctacgctataaggtggaccacgatgagcgccttgacctggatgacgggcgctgggaggacgtccacgttatcaccggagccctgaagctcttctttcgggagctgcccgagcccctcttccccttctcgcacttccgccagttcattgcggccatcagtgagcacctggggcaagtggggcggatggggtgtgccgagtgcaagaccgtcttccaccagagctgccaggctgtggtgaagaagggctgcccccgctgtgcccgccggcgcaagacagtagatggtaggcccggagaagagaagagaaactgggagagggaggcccagaggagggccacagcacgtgacctggtgctgccctgccgcccagccccagtccgggaggaagttctgcccggcgctctccgccggtgcctccctggttatattgttgaacaggaaacccggcagcgcgggagccgcacagtcgaggagggagcgcgggacgccgagcccacgcgcgcctgccggggcaagtggaggcgaagccggcgagcggacgccccgagggtcggggaaggaaccgaggtccggtccccttcttatccagcccgagacatcgagctccggtgggcgtccctgcgctgggaatcccgctcggagtttttccaggcccggccgggctgctccgggaaaggccctgcccatgggctccctgaggcccgcccagccgacgaaaacgccgcggctgcgatggcggcggacgtggtgggggacgtgtacgtgctggtggagcaccccttcgagtacaccggcaaggacgggcgccgcgtggccatccggccgaatgagcgctaccggctgctgcggcgcagcaccgagcactggtggcacgtgcggcgtgagcccggcggccgccccttctacctgcctgcgcagtacgtgcgcgagctgcccgcgctgggcaaccctgccgccgccgcgccgccaggtccccacccgagccccgcggcccctgagccgctcgcctacgactaccggtttgtgagcgcggcggcgaccgcgggccccgacggcgcccccgaggagtccggaggccgagccagctccctgtgcggccctgcgcaacgcggcgccgcgacccagcgcagcagcctggcgcccggcctgccagcctgcctgtacctgcggcccgcggcgcccgtgcggcccgcgcagtccctgaacgacctggcctgcgccgccgtctcgcctcccgccggcctcctaggaagcagcggcagcttcaaggcctgcagcgtggcgggctcctgggtgtgcccgcggcctctggcgcgcagcgactcagagaacgtctacgaggtcatccaggacttgcacgtcccgccgcgggaggagagcgcagagcagagagctgttgggggcatgttggaggagctgccctcccagaatcttgttggcaagagggaaatccaggagtgcttcctggaggaggaaggtgttggcagagttgaatttgaaaggtttctacagttcccgctcatgaaaccctctggaccgggcagtagcaggtcgcagttggcagcagaggggaaacagggcgtgtttaagtggccttattcccagaatcctggctccagagctgtgtctgaaagggagaggaactactttgtaacacttcgggggtggggggagctggaagggcaagtctgtttccagtttggggctggagccccctgggagacccccatcatgggggcccagcttcctactggggaagagaagcaggtgagatgccagggctctgtcccggcagttcagaggggccaggatggtggacataatcgccaaagtgaccaggaggcagagtcgagccttgccggcacagagccatggcccacagcctgccaagtagaaattcctgctccaaagagcctgttccttatcagctcatccacccctggtggagcctttcaactcctgccccagtgcgttcagctgggaggatgggaggtggacgacccaccggagcccgtgtacgcgaacatagagaggcagccccgggccacttcaccgggcgccgctgcagccccccttcccagcccggtgtgggagacgcacacggacgcgggcaccgggcgcccctactactacaacccagacacgggagttaccacctgggagtcgccctttgaggctgccgagggtgccgccagcccagccacctcccctgcctcggtggacagccacgtgagccttgagaccgagtggggccagtactgggatgaggagagccgcagggtgttcttctacaacccgctgacgggcgagacggcctgggaggacgaggccgagaacgagcccgaggaggagttggagatgcagccgggcctgagccctggcagcccaggggacccgcggccccccactcccgagacggactaccccgagtcgctgaccagttaccccgaggaggactattctcccgtgggctctttcggtgagcccggccctacctctcccttgaccacaccccccggctggtcttgtcatgtcagccaggacaagcagatgctctacaccaaccacttcactcaggagcagtgggtgaggctggaggacccccacgggaagccatacttctacaatccagaggactcctctgttcgatgggagctgccccaggtccctgtccctgcccctcgaagcatccataaatccagccaggatggtgacaccccagcccaggccagccctccagaggagaagaccaagaccttggacaaggcaggggtgctccatcgcaccaagacggcagacaagggaaagcggctccggaagaagcactggagtgcctcctggactgtgctggagggtggcgtcctgacattcttcaaggactcaaagacctcggctgcaggcggcctgaggcagccttccaagttttccacccctgagtacacagtggagctgaggggggccactctctcctgggcccccaaagacaaatccagtaggaagaatgtgctggagctacggagccgagatggctctgagtacctgatccagcacgactcggaggccatcatcagcacctggcataaggccattgctcagggcatccaggagctggctatgggaatccagtccgcagagctgcccccagaggagagcgagagcagcagagtggacttcgggtcgagcgagcgcttgggaagctggcaggagaaagaggaggacgcgcgaccgaatgcagccgcgcccgccctgggccccgtgggcctggagagcgacttgagcaaggtccggcacaagctccgcaagttcctccagaggcggcccacactgcagtcgctgcgggagaagggctacatcaaagaccaggtgttcggctgcgcgctggccgcgctgtgtgagcgcgagaggagccgggtgccacgcttcgtgcagcagtgcatccgcgccgtcgaggcccgcggggctggacatcgacgggctgtaccgcatcagtggaaacctggccaccatccagaagctacgctataaggtggaccacgatgagcgccttgacctggatgacgggcgctgggaggacgtccacgttatccaccggagccctgaagctcttctttcgggagctgcccgagcccctcttccccttctcgcacttccgccagttcattgcggccatcaagttgcaggaccaggcccggcgcagccgctgtgtgcgtgacttggtgcgctcgctgcccgctcccaaccacgacactctgcggatgctcttccagcacctctgccgggtgatcgagcacggcgagcagaaccgcatgtcggtgcagagcgtggccattgtgttcgggcccacgctgctgcggcccgaggtggaagagaccagcatgcccatgaccatggtgttccagaaccaggtggtggagctcatcctgcagcagctggctgtgggccagtttcatctgctttcctgttgggggtcccgggcctctgctgtccttgacccactggtgttctgtgcaaggcttcttcccattcaccaagtgcacaccttgcatctgccgctcggcatgcaccagttccacacaccatcccattttacagacaaggacgctgaggcctgcagcagcagtgtgacttgctcaaggtccaagccctcctcccccaagcagaggctcacgggcacatatgtggacatcgtagtccatgtgtgccaactgcccataccccctgcagccagctgccgcttggctaccccactgctcccaatcctggtgtcctctgacaacctgacatctgctctgggacggtcctcagcccaagactggatttgtgattttccccaaaccttgtactcctccagggttttacctgtcccaggcaaagggtccatcatcccccgagtcagcaaccaaggattctcccaagagaagtctccccagaccctggagcgtgtgctagcccctctttgctcccacgctctatacctggctcttgcctccctgcaagatgcctttccagatgccccaccgccccccactcagtgccttacccagcatgctgtgggctgcgtggatcccgcacttgtgcagggcgcagagtgggcgcttactgagctctggcacctgctaagtgctgaggagccaggaagaggtgctctgtccccagtatcccaggggccttggcattcagccgcctctgactcctgtctgcttggtggaacattcctgagcagcagggaggagaccagcttgttggaagcggagacgtctaaggagtttccaaataggaaaaccagcggctgcaggcctcaggacgtggccgggcgagccgcagcctcatcccgcgagcgggcgttcctgagctgcctgcaccgtgagtcacccggacggccgcgggcagcgcgcaggaatgcggcctcgccaatcggcggggagcggctaatgtcctacttggacctgcaggatggaggctcctggaagtcaggtgccatgatctcttgcctttgtgctcccacagcaccaagcacagggccagccgcacagaaagtttccacgagggtttgtagaaccgtctgtgggaggagtgaacacgctggctgtcctggccctccccaccccaaccaggagcccatctcgggcctgggactctccaccttctccccagacctgacctggcagtggacagcccagactggagcttcctgcctgccacactggctctccagtcagcagaggccagaaagtggtgatttcctgtattgcaggatcagatggcagaatcgcaagagctccgcatccccagggactcatctgaaagacaatgtgaagcaaagacaatgtgaggcgtggggagacttccaggaaatatttgtggaatccatcattttattacattacaatattaatccatacaataatgggttcaacaaatatttcctgggttcctctcgtgggctggctgagctgggcatagcatggaaaatgaggctaaatgcctcacctatgatcacagggataggaaatgaccgatatcaggcctgtgcccacaccacagccacctccctcctcacactgctgctgtggacagtgctgtctcagaacctggtgaatataggtttccctctgaaagaggctataggaatgtatcgtttgcacatgctgaagtacatctggaaaaatacacaaggaactggtaagaatgattgcttcgtctactgccataccaccctgaacacgcccgatctcatctga

SEQ ID NO: 135350 - DNA, 5430 bp, Homo sapiens
  misc_feature (1)...(5430): n = a,t,c or g
tttcgtgccgagagaccgcatcgtcggctcggaggctgaggggctgccgcggccgggagcgcccctcgcctcgctcctcgctccgcttggtgtcatgtgattctctgagggagcagctgcgtgagtggagatgctttcagtggtggagaatggactggacccccatagctgccatcccggtcatcaagaataatctggtgggatccgtgaaagccttgcagaagcagtacgtgtccctggacatggtggtcactagtgaagacggagatgccaacaccatgtgcagcgccctggaggccgtatttatgcatggcctgcacaccaagcacatccgagctgaggccggaggaaaaaggaagaacagcgcccaccaaaagcctctgccccagcctgtcttctggcccctcctgaaagctgtctcccccaagtgagatttagctggagaggttttgctttgcggaggagcagcagactatgggacacttggcttttcctccccagctgttcaggaagccaacagaggtgccctgtgttctagcatagagagaggacacatcatctcagagttggagcacctgacgtttgtcaacacggatgtgggccgctgccgggcatggctgcggctggccctgaacgatggcctgatggagtgctacctgaagctgctgctgcaggagcaggcccgcttgcatgagtactaccagcccaccgccctgctccgggatgctgaggagggcgagttcctccttagcttcctgcagggcctcacgtccttgtccttcgaactctcctacaagtctgccatcttaaatgagtggacgctcaccccattggccctgtctgggctttgcccgctttctgagctggaccctctctctacctctggtgcagaactacagcggaaggaatctctggattccatttcccattcttcaggctctgaagacatcgaagtccatcactcgggccataagatacggaggaaccagaagctgactgcctcctccctcagcctggacacggccagttcatcccagctgtcctgcagcctaaactctgatagctgcttactccaagagaatggctccaagagtccagaccattgcgaggagcccatgtcctgtgactcagacctgggcacagcaaatgctgaggactcagaccggtctctgcaagaggtattgttggaattcagcaaagcccaggtaaactctgtgccaaccaacggactgagccaagaaacagagatccccacaccacaggcctcgctctccctccatggcctcaacaccagcacatacctgcactgtgaggcacctgcagagccccttcctgcccaggcagcctctggaactcaagatggtgtccacgtgcaggagccgcgtccccaggcgcccagccccctggacttacagcagcctgtagagagcacctcaggccagcagccttctagtactgtcagcgagacagccagagaagtgggccaagggaatggcctgcagaaggcccaggctcatgacggagctggtctgaagctggtagtttcctcacccaccagtccgaaaaacaagagctggatctcagaggatgacttctaccggccttcccgggagcaacccctggagagtgcttcagaccacccaatagcttcttacagggggactccagggtcaaggcctggtctccacaggcatttttctcaagaaccaagaaaaaactgctccctgggggcgttagaccaagcgtgtgtaccttccccaggaagaaggcaagcccaggcagccccatcccaggggcataagagcttccgggtggtacaccggagacagatgggactgtccaacccattccggggtctcatgaagctgggcaccgtggagcggcggggggcaatgggcatctggaaggagctcttctgcgagctctccccgctggagttccgcctctacctgagcaacgaggagcacacctgtgtggagaactgctcgctgcttcgctgtgagtctgtggggccagcccatagtgatgggcgctttgagctggtcttctctggcaagttttctgttcttgcgcgcctcctcccaggacgaagctgaggactggctggaccgggtgcgggaggccctgcagaaggtccggcctcagcaggaggatgagtgggtgaacgtgcagtacccagaccagcctgaggaaccccccgaggcgccccagggctgcctctctccctcagacctgctctcggagcccgcggccctccagggcacacagtttgactggtcgtccgcccaggttccagagccagatgccatcaaggagtccctgctgtacttgtacatggacaggacctggatgccctaatatattttctctgtccttggaggctctgaaatgattccgcatctacgaacaatgacaagatgctgagtgacagccacggcgtggagaccatccgtgacatcctgccagacaccagccttgtgggcccatacttcttcaaaattatcacgaacaaggctgtcctgaagctgcaggccggaaacgccgaggaagccgccctgtggagggatctggtccgcaaagtcctggcatcctacttggagacagccgaggaggcggtgaccctgggcgggagcctggatgaaaactgtcaggaggtgctgaaatttgccacccgggagaatggcttcctgctgcagtacctggtggctatccccatggagaaaggccttgactcccaaagctgcttctgcgcaggctgctcccggcagatcggcttctcctttgtacgacccaagctctgtgccttctctggcctctattactgtgacatctgccaccaagacgatgcctcagtgattccggccaggatcatgcacaactgggacctcaccaagcgcccgatctgcaggcaggccctgaagtttctgacgcagatccgggcccagcccctcatcaacctgcagatggtgaacgcgtctctgtacgagcatgtggagcggatgcacctcattgggaggagccgggagcagctgaagctcctgggggattacctgggcctgtgccggaagtggcgccctgaaggagctcagcaagaggctcaaccaccggaattatctcttggagtctccgcataggttccgtgttgctgacctccggcagatcgcagatgaggtatatgaaggattcctcaaggccctgattgaatttgcctcccagcatgtctaccactgcgacctgtgcacccagcgcagcttcatctgccagatctgccagcaccacgacatcatcttcccctctgagtttgacaccacagtcaggtgtgccaagtgcaagaccgtcttccaccagagctgccaggctgtggtgaagaagggctgcccccgctgtgcccgccggcgcaagtaccaggaacagaacattttcgccttaatccccaatctgttgaccccgctctgaaagccggggttgagtgtggctcagccatcccggctgggtttcctaatcagcccaggatactcaccgtgtcacagctgtgtcccccttgtcagggaagaccctcaagatgtggccagagcaccggcctcccagaggaaagcccaggaagtccccgtggtgtcccctggccctccccccacccctctgctgcaggaggcgtggccaccaccagatgctccctgtctggggcaggcagggccgtttactcaccaggccctggctcaccagcgtcccggcgcctccgttagggctgccccaancactgtggaaaggggacttggggagcattttcaattccacattcctgattaaaaggtctagttttttaaggtgggtttttcccattcatatttcaacagaaagtatttttttattcttgaccctacgtgagtcacccatgaaatccagacattctcacccccagcggatgcacaggagccactcaggcctggcttagaggtagcgggtggctggtgggcaggccactgctgggacagggtctatgggcccacccagtgcctttccttggccctcacttgccagtgccaaaccgcccctgcagcagggcagggccagtcctgggcgaaccccacttcctctctgtgtcctctttactccccaccccagtgcgtctcgccttgctgaagcccaccgctttctcagcgtcagagcccctaagctcttctctagcctgggggccttggcatttttagggagaagggagaaatgacttggaaaccagcattgtcagcactttgagccctcctcggtttatggagggtcgccgtcttgcccacccccgatccccgtgcgctcctcacccctctacagacaggggcgctgctgcagatgctccaggcccaccttggtggggtgcccgggggtcacactctctgcctgactgacccctgccagggcacagataggcaggaccccagagagggcaggcagccacgccctgcactgtggagaagtgacctggtcctaagctgtgcagggcgtcggggggaactgccctgtggatgcagccaccacctcacaaagccatgaattcccaaagcatcactgaacttgcccagccgggacacttgagacttgaagaagtttcccggagcaggactgcctttgaaggggcctgggggctggggtggaagtctggaattgttttcaaagtgatggtcagacccttcacgctttcggggaaatgtgggtttgctggtctctctgtcgccttcccccacctctcctggacctagcaggccctcagtcctagctgtcttacctgcgctcagcttggagtctgaggcctcaggtggagatccacctgtcactgtcagagatgagcccacccccacccctccctgggggtgatcagctgctgagtcacccacccagctttggagctggatgccctgtgcagcagaacagatgctacggtggcaggcaaggtggaggcttggcacagcttctcccggacatgtgacacacctgtgcccagacgccaatgcctcctaagccaggagctgggtttatgcacccgccatggccccacattaacgctcccacccanaaagccccagccctagtcagagcccctcattgccccccatccctgagtgggcaggagccctggcccggggagggcttgggcctgtgaggattctcccccgaaggtgcccttcggaggcagcaggtttgaggccctggggggcccgttccccagaagctgccagtgctttcagatgcattgactcttcccacctcccctccctcagaaaggtagtgcccacactatttttaaaatgttattttatgcaatacactgttcctagtgaggcagggctctggccctgaggagtctttgcaatgtattgaaggaattgctgccgtgtgagttttgaatgattttgcagtaaagacctgatctttctcaaa

SEQ ID NO: 135351 - DNA, 3029 bp, Homo sapiens
cggcaaatgtccacaggcctttccgtggtcctccaacagcatccgccacgtccatgattctgactgtgcccacctgcccagcctgcggcatctcaacctcaagtggaactgcccgccggttggcctcagccccatgcacttcccctgccacatgaccatcgagcccagcaccttcttggctgtgcccaccctggaagagctaaacctgagctacaacaacatcatgactgtgcctgcgctgcccaaatccctcatatccctgtccgtcagccataccaacatcctgatcctcccctctgccagcctcgccggcctgcatgccctgcgcttcctattcatggacggcaactgttattacaagaacccctgcaggcaggcactggaggtggccccgggtgccctccttggcctgggcaacctcacccacctgtcactcaagtacaacaacctcactgtggtgccccgcaacctgccttccagcctggagtatctgctgttgtcctgaggggccgcatcgtcaaactggcgcctgaggacctggccaatctgaccgccctgcgtgtgctcgatgtgggcggaaattgccgccgctgcgaccacgctcccaacccctgcatggagtgccctcgtcacttcccccagctacatcccgataccttcagccacctgagccgtcttgaaggcctggtgttgaaggacagttctctctcctggctgaatgccagttggttccgtgggctgggaaacctccgagtgctggacctgagtgagaacttcctctacaaatgcatcactaaaaccaaggccttccagggcctaacacagctgcgcaagcttaacctgtccttcaattaccaaaagagggtgtcctttgcccaccttgtctctgggccccctttccttcgggagccctgtcgcccctgaaagaagctggacatgcaccggattttctttccgctcaactcatgagaccacgcttccggccactgggcccgcctgcccatgctccagactctgcgtctgcagatgaacttcatcaaccaggcccagctcggcattttcagggccttccctggcctgcgctacgtggacctgtcggacaaccgcatcagcggagcttcggagctgacagccaccatgggggaggcagatggaggggagaaggtctggctgcagcctggggaccttgctccggccccagtggacactcccagctctgaagacttcaggcccaactgcagcaccctcaacttcaccttggatctgtcacggaacaacctggtgaccgtgcagccggagatgtttgcccagctctcgcacctgcagtgcctgcgcctgagccacaactgcatctcgcaggcagtcaatggctcccagttcctgccgctgaccggtctgcaggtgctaaacctgtcccacaataagctggacctctaccacgagcactcattcacggagctaccacgactggaggccctggacctcagctacaacagccagccctttggcatgcagggcgtgggccacaacttcagcttcgtggctcacctgcgcaccctgcgccacctcagcctggcccacaacaacatccacagccaagtgtcccagcagctctgcagtacgtcgctgcgggccctggacttcagcggcaatgcactgggccatatgtgggccgagggagacctctatctgcacttcttccaaggcctgagcggtttgatctggctggacttgtcccagaaccgcctgcacaccctcctgccccaaaccctgcgcaacctccccaagagcctacaggtgctgcgtctccgtgacaattacctggccttctttaagtggtggagcctccacttcctgcccaaactggaagtcctcgacctggcaggaaaccagctgaaggccctgaccaatggcagcctgcctgctggcacccggctccggaggctggatgtcagctgcaacagcatcagcttcgtggcccccggcttcttttccaaggccaaggagctgcgagagctcaaccttagcgccaacgccctcaagacagtggaccactcctggtttgggtcccctggcgagctgccctgcaaatactagatgtaagcgccaaccctctgcactgcgcctgtggggcggcctttatggacttcctgctggaggtgcaggctgccgtgcccggtctgcccagccgggtgaagtgtggcagtccgggccagctccagggcctcagcatctttgcacaggacctgcgcctctgcctggatgaggccctctcctgggactgtttcgccctctcgctgctggctgtggctctgggcctgggtgtgcccatgctgcatcacctctgtggctgggacctctggtactgcttccacctgtgcctggcctggcttccctggcgggggcggcaaagtgggcgagatgaggatgccctgccctacgatgccttcgtggtcttcgacaaaacgcagagcgcagtggcagactgggtgtacaacgagcttcgggggcagctggaggagtgccgtgggcgctgggcactccgcctgtgcctggaggaacgcgactggctgcctggcaaaaccctctttgagaacctgtgggcctcggtctatggcagccgcaagacgctgtttgtgctggcccacacggaccgggtcagtggtctcttgcgaccgagctatcctgctggcccagcagcgcctgctggaggaccgcaaggacgtcgtggtgctggtgatcctgagccctgacggccgccgctcccgctatgtgcggctgcgccagcgcctctgccgccagagtgtcctcctctggccccaccagcccagtggtcagcgcagcttctgggcccagctgggcatggccctgaccagggacaaccaccacttctataaccggaacttctgccagggaacccacggccgaatagccgtgagccggaatcctgcacggtgccacctccacacacacctaacatatgcctgcctgatctgaccaacacatgctcgccaccctcaccacacacc

SEQ ID NO: 135352 - DNA, 386 bp, Homo sapiens
cccgtccggactcccccgatcccagctttctctcctttgaaaacactaagaataatgtcactgcatcagtttttactagagccaaactgtggccgaccgcagctgtgccgtggcacgatggcgaggaagccagccccaaggaaacactgaaaacacatatcacgccaatgccgtgtggttttgtttgaatataaaattggtgaaagtgttggtttttttaaggcagtaatttttttgtttgtttttttgcgatttcattccattcttgaccaaagcttctctttaagtagtttattatggaaaattgtcacactaacttaaaagacagggtgagggagatatgtaaattgtccactagaaaattaaataaaagaactgaaagtgga

SEQ ID NO: 135353 - DNA, 647 bp, Homo sapiens
atgtcactgcatcagtttttactagagccaatcacctgtcatgcctggaacagggatcgtactcagattgccctcagtcccaataatcacgaagtgcacatctataagaagaacgggagccagtgggtgaaagctcatgaactcaaggagcacaacggacacatcacaggtattgactgggctcccaagagcgaccgcattgtcacttgtggggcagaccgcaatgcctatgtctggagtcagaaagatggtgtttggaagccaaccctggtgatcctgagaattaatcgcgcagctacttttgtgaagctgagtgagcctccgccatccagcatgacaaactgtggccgaccgcagctgtgccgtggcacgatggccgagaaagccagccccaaggaaacactgaaaacacatatcacgccaatgccgtgtggttttgtttgaatataaaattggtgaaagtgttggtttttttaaggcagtaatttttttgtttgtttttttgcgatttcattccattcttgaccaaagcttctctttaagtagtttattatggaaaattgtcacactaacttaaaagacagggtgagggagatacgcaaattgtccactagaaaattaaataaaagaactgaatgtgaaaaaaa

SEQ ID NO: 135354 - DNA, 1062 bp, Homo sapiens
ggcggacttcctcatgagctcaaggagcacaacggacacatcacaggtattgactgggctcccaagagcgattgtattgacacttgtggggcacaccgcaatgcctatgactggagtcacaaagaaggaggttggaagccaaccctggtgattctgataattaatcgcgcagctacttttgtgaagtggtcccccctacagaacaaatttgctgagggaagtggagcacgactcatttctggttgttactttgagactgaaaatgactggtgggtgagcaagcgcattaaaaagccgattcgctccacagtcctcagcttggattggcattccaacaacgttttgctgtcagcaggatcatgtgacttcaaatgcagagtgttttctgcctacattaaagaagtggatgaaaagccagccagcacgccctggggcagcaagatgccttttgggcagctgatgtcagagtttggtggcagtggcactggtggctgggtccacggggtaagcttctctgccagtgggagccgcctggcctgggtcagccacgacagcaccgtgtctgttgctgatgcctcaaaaagtgtgcaaagcccctgtgagaatgggtcctttgtgatcatctgtgtctgtaaagaagctaatagtctgttgcatcttgggataacacatgttcttgtgttcagggtctcgactctgaagacagagttcctgccgctcctaagtgtgtcatttgtctcagagaacagcgtcgtggctgctggccatgactgctgcccaatgctctttaactacgatgaccgcggctgcctgaccttcgtctccaagttagatattccaaaacagagcatccaacgcaacatgtctgccatggaacgcttccgcaacatggacaagagagccacaactgaggaccgcaacacggccttggagacgctgcaccagaatagcatcactcaagtctctatttatgaggtggacaagcaagattgtcgcaaattttgcactactggcatcgatggagccatgacaatttgggatttcaaggtattttctacctaa

SEQ ID NO: 135355 - DNA, 1951 bp, Homo sapiens
  misc_feature (1)...(1951): n = a,t,c or g
atgccgcttcgccagcacttgccaggcgttccgtggggcagcatctcctctgaagggccgccgacagtaccacgccaatggaacggcgtaccctcctccactgcagcctgcctaaccccggactgcgcgcccgagctgtgcgcatgcgcggaccgtccgcgcggtcgcaacgcgcaggcgccgtgtccacttccgggatctgtcagccgctccctctgggctttccgtcctccgcccgcgcccgacggagcctgttcgcgtcgactgcccagagtccgcgaatcctccggtccgagcccgtccggactcccccgatcccaggatgttcgagctcctagccgcctccgatgcccgaattaacggccccttctgcgcccccagggtcctacttgcacctctgctgggggcatttgtcaccgtctctaaaattgtgtcaaagattgccctcagtcccaaataatcacggaggtcacatctattaagaaggaacgggagccagtggggtgaaagttcatggaactcaaggagcacaacggacagcatcacaggtattgactngggctcccaagagcgaccgcatttgtcacttttgggggcagaccgcaattgcctaatggtctggagttcagaaaagatggtgtttggaagccaaaccctggttgattcctgaggaatttaattgggggaggtaactttttgtgaaagtgggtcccccctagaagaacaaaatttggctgtgggggaagtggagcacgactcatttctgtttgttactttgagtctgaaaatgactggtgggtgagcaagcacattaaaaagccgattcgctccacagtcctcagcttggattggcatcccaacaacgttttgctggcagcaggatcatgtgacttcaaatgcagagtgttttctgcctacattaaagaagtggatgaaaagccagccagcacgccctggggcagcaagatgccttttgggcagcatgatgtcagagtttggtgggcagtggcactggttggctgggtccacggggtaagcttctcctgccagtggggagccgcctgggctggggttcagccacggacagcacccgtgtctgttgcttgatgcctccaaaaagttgtgcaggtctcgactctgaagacaagagttccttgccgctccctaagtggtgtcatttgtctcaagagaaccagcgtcggggctgcctgcccatgactgcttgcccaatgctctttaactacggatgaccgcgggctgccctgacctttcgtcttccaaagttagatattcccaaaacagagcatccaacgcaacatgtctgcccatgggaacgctttcggcaacatgggacaagagagccacaactgaggacccgcaacacggcccttggagacgctgcacccagaatagcatcactcaagttctctatttattgaggtgggacaagcaagatttgtcgcaaattttgcacttactggcatcggatggagagccatggacaatttgggatttccaagaccctcggagtcttccatcccagggcctccggataatgtgaaaaaaaaaaaaaacccccccgcccatcccagcatgaacaaacctgtggcccgacccgcagcctgtgcccgtggccacgaatggcgaggaagcccagcccccaaggaaacacttgaaaaacacataatcacgcccaatgcccgtgtgggttttgtttgaatataaaattggtgaaagtgttggttttttttaaggccagtaatttttttgtttgttttttttgcgatttcattccattcttgaccaaaagcttctctttaagtagtttattatggaaaattgtcacactaacttgaaaagacagggtgagggagatatgtaaattgtnccactagaaaattaaataaaagaactgaatgtggtaaaaaaaaaaaaaaaaagggcggccgct

SEQ ID NO: 135356 - DNA, 2226 bp, Homo sapiens
atgaagcactatacaagggtacagtctagcatatcaccaccagcggaaaggcaggaaacccatgcctgggccagccctgctgtaacatctcttgagtcagcagcatgtcatgaactgcaggaagcagacctcagtgagagtttatcatatcccagaattgtctcctcaagttcattacagcagtatgtcgcacaaggtggctcatttccttgtttcggtatgccatggaactttatcagtggaggtgctgaaagtaccaatgctgtcatctcatttgccaatgctactacagcagtacctatggcagttctgtcacgaagagaatccagtctggcaaataaccctggtgtggtgaattactctgctctaccagaaaatgaaaatgtgggcccagaaatgccagaaagaccagcaaacagcagtaaaaacagcactgagacagcgaattatccaactttaatgggaaattacaatggccaaaatactgcctctttatctgtcttcatccctccctattttgctgagaaaattatacttactgaaatgccaggaacaacagaaaccaacgtggaaaataactctcagacagtgtattacccagctttatcgggaaatacgagtgccccatatccagcctcttcatatcttcccatcacttctaattttgtacttgaaagagttgcagaaatgccagaaacagcaggaactaacgtaaaaaacaatactcagacagtgaattacccaccttcatcaggaaggggccgtagccaaggtaacgcctctttatcgctctccattcctcccaagtttggcattgaaagacatctaggttgtttcctggttttggctattagaagtaaagctgctatgaacactcatataccatataggctttgtgtgaacacaagctttcatttctctgagatactgcccaagagtgctgttgctgggtcctatggtaatgcactgcaaaatgttttacatattgaaatgttgttcaaaacagaatctggcccacaaatgagttatgggacaatgagttactcaactgaaatgaaaaataactgtgaccaagatgatgcttcagcatctgcctgcctcactcccgattttgcactgttacctctgaatattttggtaaaagtagacaccaacacggaaaacagcgtcaacacaatgaatcgctcaactttattggacagtgacagtggccaggattcttcctcatcatctgtctgtatccctcccaagtatggctatcttggtgatccaaaaagaaatgtcagagtacttaaaatccatttgctggccgtacaaaatatggccaaacctaagcaagcagcctgctacttggttcgtattttgttctccaaggaaatcctgattagcagctcagtggatatccatttgaaagacagccaatccctcgacccgaacaaaatggctgcattgagagaatatctggcaacaacttttcccacctgtgatttgcatgaacatggaaaagactggcaggactgtatttctggtatcaattctatgatctactgtttatgttctgaaggcaagagtactccaaaaactgttcgcaaaaataaaaaacgtaccaaccgtgttgcatcggcatctgcagatagaaatgaccaaaggggcagagatggtggtgaaggctgttcttggatgtttcagccaatgaataactccaaaatgagagaaaagaggaacttgcagccaaacagtaatgctatccctgaaggaatgcgagaaccttccactgataatccagaggaacctggtgaagcatggagctattttggaagaccatggagaaatatacggatgccatgttcagtactgactttggcaaaaactaagtcttgcgcaagcctgtcggctagataccttattcagaaactcttcacaaaagatgtcctggtccaaagtaacgtctatggcaatctgaagcatggcctgtgtgcccttgaccccaataagattagtgctctccgagagttcctccaagaaaactacccaatttgtgatctctcggaaaatggaagagactggaagtcgtgtgtgacctccatcaacagcggtatccgtagccttagacatgacgtcagaagggctgaagccaggtctcagtcgcttccagcagtgacccctccagagctggagcaggagtcaaagccaggagatcccgacgccactgacccaagcacctga

SEQ ID NO: 135357 - DNA, 357 bp, Homo sapiens
caggccaagatgttaaccacggactcccagagaatctttcccatggttgaccggctgtacatcggctgccccatggtgactgatgactttgtggtcagtggcacttgcgccgaacaaatgtacggaatgtgtgagtccctctgggagcccaacatggatccggatcacctgtttgaaaccatctcccaagccatgctgaatgctgtggaccgggatgcagtgtcaggcatgggagtcattgtccacatcatcgagaaggacaaaatcaccaccaggacactgaaggcccgaatggactaaccctgttcccagagcccacttttttttctttttttgaaataaaatagcctgtctttc

SEQ ID NO: 135358 - DNA, 192 bp, Homo sapiens
gacgtccagacagttgcccagcgcctcaagttccggctgaacctgtatgagttgaaggaaggtcggcagatcaaaccttataccctcatgagcatggtggccaacctcttgtatgagaaacggtttggccctgttcccagagcccacttttttttctttttttgaaataaaatagcctgtctttcaaaaaaa

SEQ ID NO: 135359 - DNA, 212 bp, Homo sapiens
  misc_feature (1)...(212): n = a,t,c or g
atggccatgnaaggggaagaactgtgtggccatcgctgcagacaggcgcttcgggatccaggcccagatggtgaccacggacttccagaagatctttcccatggtgcccagcgcctcaagttccggctgaacctgtatgagttgaaggaaggtcggcagatcaaaccttataccctcatgagcatggtggccaacctcttgtatgagaaacg

SEQ ID NO: 135360 - DNA, 624 bp, Homo sapiens
acgtccgaaatacggtgaatatatattctactataatcatctattaaattcggccgctcgaacccagattactggattgctctgccatcgaggaacctagaccccgcaataatgtctattatgtcctataacggaggggccgtcatggccatgaaggggaagaactgtgtggccatcgctgcagacaggcgcttcgggatccaggcccagatggtaaccagggatttctagaaattctttcccatggggtgacccgcttgtacaccgggtatggccgggttcgcaattgacgtccagacagttgcccagcgcctcaagttccggctgaacctgtatgagttgaaggaaggtcggcagatcaaaccttataccctcatgagcatggtggccaacctcttgtatgagaaacggatccggatcacctgtttgaaaccatctcccaagccatgctgaatgctgtggaccgggatgcagtgtcaggcatgggagtcattgtccacatcatcgagaaggacaaaatcaccaccaggacactgaaggcccgaatggactaaccctgttcccagagcccacttttttttctttttttgaaataaaatagcctgtctttcaaaaaaaaaaaaa

SEQ ID NO: 135361 - DNA, 825 bp, Homo sapiens
aaggctagacccggtttactggaattgctctggcgatcgaggggtcctagtacaccgcaatcatgtctattatgtcctataacggaggggccgtcatggcaatggaaggggaagaactgtgtggccatcgctgcagacaggcgcttcgggatccagggcccggttgttgaccacgaacttccagaagatctttcccatgggtgaccggctgtacatcggtctgggcggggcttcgccacttgacgtccagaccagtttgcccagcgcctcaagttccgggctgaacctgttatgagttgaagggaaggtcggcagattcaaaccttatacccttcattgagccatgggtggccaaccctctttgttatgagaaaaggtttttggcccccttacctacactgaggccagttcatttgccggggttgggacccgaaagaccctttaaagccctttcaatttgcttctctaagaccctcattcgggttggccccatgggtgacttgaatgacttttgtgggtcaagtggcaaccttgcgccgaacaaaatgtacgggaatgtgtgagtccctctggggaggcccaacatgggatccggatcacctgttttgaaaaccattttcccaaggccatggttgaatgctgtgggaccgggatggcagtgttcaggcatggggagttcattgttccacatcatcgagaaggacaaaaatcccccccaggacactgaaggcccgaatggactaaccctgttcccagagcccactttttttttctttttttgaaattaaaatagcctgtctttcactcctaaaaaaaaaaaaaaaa

SEQ ID NO: 135362 - DNA, 412 bp, Homo sapiens
  misc_feature (1)...(412): n = a,t,c or g
ccctcgcccgcctgggcagggcccggcgccgtccgtggatgagccacagaacctcttccaccttccgagcggagagaagtttccatnnnnnnnnnnnnnnnnnnnnnnnnnnnnnnnnctcctcggcctcccgtgctctcccggcccaggacccgcccatggagaaggccctgagcatgttttccgatgactttggcagcttcatgcggccccactcggagcccctggccttcccagcccgccccggtggggcaggcaacatcaagaccctaggagacgcctatgagtttgcggtggacgtgagagacttctcacctgaagacatcattgtcaccacctccaacaaccacatcgaggtgcgggctgagaagtgccagctgccggaggacgtggacccgacgtcggtgacctc

SEQ ID NO: 135363 - DNA, 395 bp, Homo sapiens
  misc_feature (1)...(395): n = a,t,c or g
ggtnnnnnnnnnnnnnnnnnnnnnnnnnnnnnnnnnnnnnnnnnnnnnnnntgtcccccttctttttcttttttttcagtgcaataaaagcaaaggcggctttgtcacagtgagctacttcttgcaggagtcaggatctgcatctgcagatgtgactggttgtcctgctttcctcaggttttcttctgccatctatgacagcttcttgatctgtccccaggtgggtggctgtgtttgacaggtgttgctcatgacagttggggtcctcctcagcatcagtctcgacatgactgcaactggtgggtcctcaggatcctcccggaatctcttctttggcatctggctcatgataaggtttcaggtgtcttgatggtatccaaattggctgcttgttt

SEQ ID NO: 135364 - DNA, 461 bp, Homo sapiens; identical to SEQ ID NO: 86076
  misc_feature (1)...(461): n = a,t,c or g

SEQ ID NO: 135365 - DNA, 717 bp, Homo sapiens
tcaatatgcccaataagtataattgttctctgtgtcagcccttgttgaaggaatactcatggcagtggtgataactgctattatagctaccattaaattactcgtgactgcttgtcccgctttcctcaagttttttccgccatctgtgacagcttcttgatctgtccccaggtgggtggctgtgttcaacaggtgttgctgaaagtgtctagcactagatattgcattagcaactaggcgatcagccatttgattcccttcagtcaaaggtcctggaagaggtgtatgagccctaatgtgagtgatgtaaaaagggtgcattctactcctaactgctgtttgtaattgggtaaataaagtcatcagttgttcatctgtatgaaatcgtaactgagcattttcaattaactcaattacagctacaagctctgctttttgagctgaagtataggacatctggaaaactttattttttgatccagaataagaagctttaccattattagacccatctgtaaaacaatgaaaacgcttagcaggctgcaggttatttaccacaggaattgtaaatgcaaaccattcacagtcttgctcagctaaagggatagtaaataaaccgtcttttaaatctatgactattaaaggccaattttttggaattatagcagaaggcaatcctggctgtaatgctcccatagattctataactgaattcat

SEQ ID NO: 135366 - DNA, 424 bp, Homo sapiens
  misc_feature (1)...(424): n = a,t,c or g
caacaccctctctgtcagccctcgccgcctgggttggcctggcgtccgccgtggatgagccacagaacctcttccaccttccgagcggagagaagtttccatnnnnnnnnnnnnnnnnnnnnnnnnnnnnnnnnctcctcggcctcccgtgctctcccggcccaggacccgcccatggagaaggccctgagcatgttttccgatgactttggcagcttcatgcggccccactcggagcccctggccttcccagcccgccccggtggggcaggcaacatcaagaccctatgagacgcctatgagtttgcggtggacgtgagagacttctcacctgaagacatcattgtcaccacctccaacaaccacatcgaggggcgggctgagaagctgcggctgacggcactgtcatgaacaccttcgctcg

SEQ ID NO: 135367 - DNA, 317 bp, Homo sapiens
ccttcagaattatatgggatatcagtaatgtgtttaatattccgtatagagaaaaatttagctagagcttgagaattaggttccaatcctcgaggattaactcctcctgtaaaagatgaggaatgtaccatttggcaagttgggcatcgctggataatagctttagcttctttccaggtactgctgtatctgcgtttgagaccagaggtattaacacgggttaaattgtgaaagtgtccagcattagatattgcagtagcaactaggcgatcagccatttgattccctgcagtcaaaggtcctggaagaggtgtatg

SEQ ID NO: 135368 - DNA, 1413 bp, Homo sapiens; identical to SEQ ID NO: 121395

SEQ ID NO: 135369 - DNA, 1470 bp, Homo sapiens
ttactcatagtgagtggttgtcctgctttcctcaggttttcttccgccatctgtgacagcttcttgatccgtccctaggtgggtggctgtgttcgatgggtgttgctcatgacagttggggttgtcaatctcaacatggctgcaactgggggatccttgggatactcccagagcctcttccttggcatctggcttatgataaggtttcagaagtcttgatggtatccaaatcgactcttgattttggcttctaactgctgtttgcaattgggtaaataaagtcataagttgttcatctgtatgaaatcgtaactgagcattttcaattaactgtgtgaaatgaaccacgtatgaagaatcagaaatcacattaataggcatattaaaagcagtcaatacctcaattacagctacaagctccgctttttgagctgaagtatagggcatctgaaaaaccttacttttccagccagaataagatgctttaccattactagacctatcagggacatgccccatttcatgcatcatatgtcgactttgagggctatataattgttctgcaattagaacttgtgctccccattgttgtaataaatctctcccacataaatttataggtacagaagttataattggttgaatagtcgcaggttgtccatcgggtcctttacaatgcaaaatataactactttgatatacttcaggggctttaccaacttcaactatgttaaattgagtgggttgaattggccacatggacggccagtgcatggggattgctttaagagtattcaggtgtcctccagctagttccacgttctccaaccgctgctccggtgacccttcgacctggatctgagcccccaagatggacgccacttgccgagaccagcttttttccagcacaattctctttgcatgaaaatttttttcaaagagaactaattgcaaagaattgaactttatggctgtgcttaactgggctttcttacgttgtttatcattgtaccccttggtggctaccaagcaatcctgcagtgtaaagcgcttcacatcttcctggactaattctttaaactggaagctataataccacctcttagcctctggcctctcaccactatcccacagatacctcttgggtattgctcttctgccttttctctggtagaatttggctgtgaatctgtctggtcctggactttttttggttggtaggctatgatttattgcttcaatttcagaacctgttattggtctattcagggattcaacatcatcctggtttagtcttgggagggtgtatgtgtccaggaatttatccatttcttctagattttctagtttatttgtgtagaggtgcttatagtattctctgatggtagtttgtgtttctgtgggattggtggtgatatcccctttatcaatttttattgcatctgtttgattcttctctcttttcttcat

SEQ ID NO: 135370 - DNA, 780 bp, Homo sapiens
tcaccaaatcagttgttctgcttctgtctttacagctggtttctgtagatgctgttcagctgctgataacatctggcctttgggcaggctcaaaaaatttaaagttaataatgctagattcagttgcatctgtggggttccatattctctgtctccctcagtctgcttttgcaactgctgttttagggagagattcattctttccactatggcttgtccttgagaattgtatgggataccagtaatgcgtttaatattccacatagagaaaaatgtagctagagcttggctagtataacctggggcattattgttgtagtagaagctggaatgcccatcaccgcaaaacattctaactgctgtttgcagttgagaaaataaagtcatcagttgttcatctgtatgaagtcgtaactgagcattttcagttaactgtgtggaatgaaccacgtatgtagaatcagaaatcatactaacaggcatatcaaaagcagtcaatacctcaattaccgctaccagctccactttttgagctgcagtatagggcgtctggaaaactttaccttttaatccaaaataagaagctttaccgttactagacccatctgtgaaaacattctcagcaccttcaattggtttaaatttagttattttagggagaatccaattagttaatttcaaaaactgaaacagctttgttttaggaaaattattgacattttcctgaagtgattttttcccaagctctaatgcacactcctctaagctgttctgtggcat

SEQ ID NO: 135371 - DNA, 577 bp, Homo sapiens
cccacgcgtccggaggcctgcgcccacaccctctcctgtttattcttcgcccgcctgggcagggcccggcgccggccgtggatgagccacagaacctcttgcaccttccgagcggagagaagtttccattcctcttcttgttcctgctcctcttccacctcctcctcggcctcccgtgccctcccggaccaggacccgcccatggagaaggccctgagcatgttttccgatgactttggcagcttcatgcggccccactcggagcccctggccttcccagcagcccatcccacagcccgccccggtggggcaggcaacatcaagaccctaggagacgcctatgagtttgcggtggacgtgagagacttctcacctgaagacatcattgtcaccacctccaacaaccacatcgaggtgcgggctgagaagctggcggctgacggcactgtcatgaacaccttcgctcacaagtgccagctgccggaggacgttgaccccaccgcggtggacttcggctctgcggaaggacggaagcctcactatccgggcacggcgtgacccgcatacagaacacgtc

SEQ ID NO: 135372 - DNA, 2139 bp, Homo sapiens
aagttactcattgtgactggttgtcttgctttcctcaggttttcttccaccatctgtgacagcttcttgatctgtctccaggtgggtggctgtgtttgacaggtgttgctcgtgacagttggggtcttcctcagcgtcagtctggacatggctgcaaccgggggtgggggtggggtccacagtttcctcccggaatctcttcctcagcatctggctcatgataaggtttcaggtgtcttgatggtatccaaatcggctgttgagtcagtcctggagaaacacaagcataacctttaccccaagttattattttacctatttcctaactttttgttattggatctctccaccaaactagttgttctgcttctgtctttgcagctggtttctgtagatgctgttcagctactgataggatctggcctttaggcaggctcaaaaaatttaaagttaacaatgctagattcagttgcatatggggtgtccccgtagtccttgttttccccccttttttttgctttttgcaactgctgtttcaggggagagattcattctttccactatggcttgtccttgagaattataagggataccagtaatgtgtttaatattccgtatagagaaaaatgtagctagagcttggctagtatagcctggggcgttatctgttttaatagaagctagaatgccaattaccacaaaacactgcaaaaggtgacgtttaacgtaggcagaagactctcctgattggcatgtagcccagacaaagtgagaaaaggtgtccacacatgcatgtacataagctagtctcccaaacgagggaacatgtgtgacatccatttcccaaagagaattaggttccagtcctctaggattaactcctcctgtaaaagatgaggaatgtaccacttggcaagttgggcatcgctggataatagctttagcttctttccaggtaatgctgtatctgtgtttgagaccagaggcattaacatgggttaaactgtgaaagtgtctagcattagatactgcagtagcaactaggcgatcagccatttgattcccttcagtcaaagatcctggaagatgtgtatgagcccttatgtgagtgatgtaaaatcggtgcattctacttctaactgctgtttgcaattgggtaaataaagtcatcagtttttcttctgtatgaaatcgtaactgagcattttcaattaactgtgtggaatgaaccacgtatgaagaatcagaaatcacattaataggcatatcaaaagcagtcaataattcaattacagctacaagctccactttttgagcagaagtatagggtgtctggaaaactttacgttttgatccaaaataagatgctttaccattactagacccatctgtaaaaacattctcagcaccttcaattggtttaaatttagttattttggggagaatgcaattagttaatttcagaaactgaaacagcttcattttaggaaaatgattatcgagaatacccacaaagtcagctaaatgggtttgccaagtaagactatttataaaagcttgctgtatttgtgccttcatgagagggacaataatttttccaggatcatatccatgtaatttaacaatccgagttctcccaattcctatcatagtagtgatttgatctaaataaggagttagagtccatgaatcagtatgtggaagaaaaaaccactctactaagtcctgttcttggacaataacaccagtaggtgaatgctgagttgaaaaaattagcaaatctggaatcttctctggatctattctatttatttgagctttatggacttgcttttcaatcagctgtaactctgcctcagcctcctttgttaattgccaatggctagtgagactaggatctcctccagtgtcctccagaaaagaaagatctggagggtcaggccactccttttcttcaaaataattaagaggtgcagaagggtagggatgaacctctttctcctttgctgcgttagctttagctggcaaacaaacctgctctgtcacctcttctgttacttcgttatactttgcttcctcctcattattagtgtgaaaaggttccaaggtggaatgaaccagaacccacacttgtcccat

SEQ ID NO: 135373 - DNA, 1680 bp, Homo sapiens
atgggtccagtaatggtaaagcttcttattctagatcaaaaggccaaaatcaacagcccatttggataccatcaagacacctgaaaccttatcatgagccagatgccaaggaagagattccgggaggatcccgaggaccccctggttgcagccatgccgagactgatgctgaggaggaccccaactgtcacaagcaacactcgtcaaacacagccacccacctggggacagatcaagaagctgtcacagatggcagaagaaaacctgaggaaagcgggacaaccagtcacaacgaacgcttgatggtggtgatgatggtggtcgtggtgatggtggtggtggtggtgatggtggtgatggtgacggtgacggtggtgacggtggtggtggtgacggtggtgacggtggtggtgacggtggcggtgacggtggtgatggtggtgacggtggtggtgacggtggtggtgacggtggtgacggtggtggtggtgacagtggtggtggtggtggtggtgggcaacatctgtcaaatgcagggcatcggggccaagtgctcagtggaggtctgttttcgtcctccttctggaaacctggaactgcacgccttcttccaagggacacagctctcagctgtggctctggcattcagtgcctgccctgcggaaactggccaagcggtgaagtacgtgggcctgcggggccttcccctgatagccagtgtccaggcgctgagtcagccctgtgtgtggaggcactgggcccctgggagccaagtggcccatggccccaacaacctcttacttctcttccatctaaagcctgggacccagggcctctcaatgaaaagtgggtccccaaagcgggacttcctaagagcactgctgaggtttctggcaagtgatccgggccctgaggggaggggaggtgcacagggaggggacgtctgctccagggcgccaccgaaggcgctgtggctgccggtcggcctggaacaggtgctgcacagcctgcagccatgtgtggccaccaagacagatgtggccacagggacagatgtggccatgaaaacaggcaacatcaagaccctaggagacgcctatgagtttgcggtggacgtgagagacttctcacctgaagacatcattgtcaccacctccaacaaccacatcgaggtgcgggctgagaagctggcggcctgacggcactgtcatgaacaccttcgctcacaagtgccagctgccggaggacgtggacccgacgtcggtgacctcggctctgcgggaggacggcagcctcactatccgggcatggcgtcacccgcatacagaacacgtccagtagtaccttccggacggagatcaaaatctgagtgcctctcccttccctttccctgtccccccgccccacgcctgccagcaaagcctcgctaaccccattacaacagctccagggacatctcagcccaggttctagcccccacggcaccccagaccccagggtgggaccatcctcccaaactaggggccctccactcttattccaggggcaggccaggggactccctggcttgaacaacatggatggcccagattttcaggatttgggcctccgttcactttaattccaggagttacagggggtttggggttcaggggaagggaagatttttaaaggaaccca

SEQ ID NO: 135374 - DNA, 631 bp, Homo sapiens
  misc_feature (1)...(631): n = a,t,c or g
agaaaaaattgacgcccgtggttcgatcgcgtgtggagcgcgacccacgcgtgcgcagaggcctgcgcccacaccctgtcctgtccagccttcgcccgcctgggcagggcccggcgccgtccgtggatgagccacagaacctcttccaccttccgagcggagagaagattccattcctctttctcttactcctcctcttcacacctcctcctcggcctcccgtgctctcccggcccaggacccgtccatggagaaggccctgagcatgttttccgatgactttggcagctatatgcggccccactcggagcccctggccttcccagcccgccccggtggggcaggcaacatcaagaccctatgagacgcctatgagtttgtggtggacgtgagagacttctcacctgaagacatcattgtcaccacctccaacaaccacatcgaggtgcggcctgagaagttggcggctgacggcactgtcatgaacaccttcgctcaacagtgccagctgccggaggacgtggacccgacgtcggtgacctcggctctgcgggaggacggcagcctcactatccgggcacggggtcacccgcatacagaacacgtncagcagacctttcggacggagata

SEQ ID NO: 135375 - DNA, 450 bp, Homo sapiens
tttcgtccgcggctgaggtacaggagcctcgcggagcacccgggtcgccttccattccgtccgcctcccgaccagggcccgcgccccgtcccgcctctctcccgcccagccaaatgcaggccgccgccctccctgaggagatccgttggctcctggaagatgctgaagagtttctggcagaaggtttgcggaatgagaacctcagcgctgttgcaagggatcacagagaccatattctacggggctttcagcaaatcaaagccagggggagacattggacaggacagctctgatgataatcacagcgggactcttggcctgtccctcacatacgatgcaccctttttgtcagattatcaggatgagggaatggaagacatcgtaaaaggagctcaagaacttgataacgtaatcaagcaaggatacttggagaagaaaagctaagatcat

SEQ ID NO: 135376 - DNA, 399 bp, Homo sapiens
attggacaggacagctctgatgataatcacagcgggactcttggcctgtccctcacatccgatgcaccctttttgtcagattatcaggatgagggtgagtccatcagatttcagatcattgggagaaattaaggacttggtgttgagtttactgtgataagggaatggaagacatcgtaaaaggagctcaagaacttgataacgtaatcaagcaaggatacttggagaagaaaagcaaagatcatagtttctttggatcggagtggcagaagcgatggtgtgttgtcagcagaggtctcttctactactatgctaatgagaagagcaagcagcccaaagggaccttcctcattaagggctacagtgtacggatggccccccacctgcgaagagattcca

SEQ ID NO: 135377 - DNA, 1570 bp, Homo sapiens
  misc_feature (1)...(1570): n = a,t,c or g
gtcgccttccagcccgtccgcctcccgaccagggcccgcgccccgtcccgcctctctcccgcccagccaaatgcaggctcgccgttctccctgaggagatccgttggctcctggaagatgctgaagagtttctggcagaaggtttgcggaatgagaacctcagcgctgttgcaagggatcacagagaccatattctacggggctttcagcaaatcaaagccaggtactattgggattttcagccccaagggggagacattggacaggacagctctgatgataatcacagcgggactcttggcctgtccctcacatccgatgcaccctttttgtcagattatcacgatgagggaatggaagacatcgtataaggagctcaagaacttgataacgtaatcaagcaaggatacttggagaagaaaagcaaagatcatagtttctttggatcggagtggcagaagcgatggtgtgttgtcagcagaggtctcttctactactatgctaatgagaagagcaagcagcccaaagggaccttcctcattaagggctacggtgtacggatggccccccacctgcgaagagattccaagaaagaatcctgctttgaactgacctcccaggataggcgcagctatgagtttacagctactagtccagcagaagccagagactgggtggatcaaataagtttcttgttaaaggatctgagctccttaaccattccatatgaagaggatgaggaggaagaagaaaaagaagagacatatgatgatattgatggttttgactccccaagttgtggttcccagtgcagacccactatcttgcctgggagtgtggggataaaagagcctacagaggagaaagaagaagaagatatttatgaagtcttgccagatgaagagcatgatctagaagaggatgagagtggcactcgacgaaaaggagtagactatgccagttactaccagggccctatgggattgcttatggtgaccagccagatgacttgtccctcccaacggggtgacctcatcctatttctgagcaaggagtataacatgtatggctggtgggtgggagaactgaacagcctcgttggggattgttccaaaggagtatcttcaccacttgcctttgaagtggaaggaaagatggaaacccagggaaatatatttcttcccttttnttcctgcctttattgaggaaactgattcatcaaaaaggtccccactcccctacttctggccacccccacccaacgcccttggactccctctctttgctgaagagaccccaagtctcttgacaccctcagagtgactgtaagctacccagtaagacaagtgggaagaggcacgttcatcaaacctgttactaaaccagcctagtcatagctcatccccatctctaaatgtgtccacacaaccacatctgccttttccacaagcttttcacaaagaaggtgagagagaaggaaaccttgggaggaggacattactggttgttctggctggtttgaaaagcacaaataaacttgggatgtggttccttgccaaaaaaaaaaaaa

SEQ ID NO: 135378 - DNA, 479 bp, Homo sapiens
  misc_feature (1)...(479): n = a,t,c or g
aggaagtgcgggntnnnnnnccatgagacatgagtacgtgcggnggaactcgcaccacgtaaggggccggcctcgctgcgctgattcgtcgagcccatccggcgacagaggacagccagaagcccagccagccccagactccagtgcaccagagcacgcacaggagcctgggcgcgctgctgtgaaacgtcctgacctgtgatcacacatgacaagacgcccctaagtcacctgcttcattagacggtttccaggttttctcccaggtgacgctgttagcgcctcagctggcggtgacagccggcccagcgtggcgccaccacacaccgcagagctgtccaggcacagctccgtccccagcgctcatggtgttgaaactgtctgtcatgcaccacggtgtctgtgtccacacagtaataaacggtttactgtccgcnnnnnnnnnnnnnnnnnnngcggccgttcaagtttagagggcc

SEQ ID NO: 135379 - DNA, 2182 bp, Homo sapiens
ctgaattcctgggtcgacgagttcgtctctggttcagcttccttttcctgtttggttttaagtaggctatattaatcattttgctgtcttcagagggtctgtggtcctctgatcaacataggctggtgggagtacaggactcgcctcctcagggttccctgggctgttacttttcagccatggccacaagtgaacagagtgtctgtcaagcccgggcttccgtgatggtctacgatgacaccagtaagaaatgggtaccaatcaaacctggccatgcagggattcagccggatcaacatctaccacaacactgtcagcaacaccttcagagtcgttggagtcaagttgcaggatcagcagcgttgtgatcaattattcaatcgtgaaagggctgaagtacaatcaggccacgccaaccttccaccagtggcgagatgcccgccaggtctacgggtttaaactttgcaagtaaagaagaggcaaccacgttctccaatgcaatgctgtttgccctgaacatcatgaattcccaagaaggaggcccctccagccagcgtcaggtgcagaatggcccctctcctgatgagatggacatccagagaagacaagtgatggagcagcaccagcagcagcgtcaggaatttctagaaagaagaacctcggccacagggcccatcctcccaccaggacatccttcatctgcagccagcgcccccgtctcatgtagtgggcctccaccgccccctccacccccagtcccacctccacccactggggcttaccccacctcccccacccccacttgccagccggaggagcccaggggtccagccacgacgagagcttccatgttcaggactggccgcttgccattagctgggggccaagcttgagaagagttccaaacgggccagaagacgcatctggaggctccagtcccagtgggacctcaaagtccgatgccaaccgggcaagcagcgggggtggcggaggaggcctcatggaggaaatgaacaaactgctggccaagaggagaaaagcagcctcccagtcagacaagccagccgagaagaaggaagatgaaagccaaatggaagatcctagtacctccccctctccggggacccgagcagccagccagccacctaactcctcaaagggctggccggaagccctgggagcggagcaactcgcgtggttatttttgtgtcctcgattctgtccagaaccccgctctgtggccaaagagccccgaaagctaagagcccccttcagtcagcagcctcactctaggatgaagcctgctgggagcggtgagtgacatggcccctggatgccttcgacttggacccgaatgaagcaggagatcctagaggaggtggtgagagagctccacaaaggtgaaaggaaggagatcatcgaccgccatcaggcaggaagcttgaagtgggatcaagcaccaccgtaaggggcccggccgcggctgcgcttgattccgtcgaagcccatcccggcgacagaaggacagccagaagccccagccaagccccaagactcccagtgcaccaagaagcacgcacaaggaagcctgggcgcgctgcttgcttgttgaaacgttccttgaaccttgttgattcacaccattgacaagtgaaggaaacccaagttgcaacttcctgggttttttttaaaattttgccttgacaccggaacacccaggtcttgctcgtctttatttgtgttttatatttgcttatttaaggtacatttcgtttgggtttctaagagacgcccctaagtcacctgcttcaattaagacggtttcccaggtttttttcccaggtggacgctgttaagggcctcagctgggcggtgacagccggcccaagcgtggcgccaccacactaccgcagagctggtccaggcacagctccgtccccagcgctcatgggtgttgaaactgtctgtcatgcaacacggtgtcttgtgtccacacaagtaataaaacggtttactgtccgcaccctcgggctcaggccctcgcattggtccatcacgctccgggctggggatgccccttttcagagaagggcccgggaccacggtgaccaggagtcgtaggagcaagatggcggtcttcgacaggaagctgggctcagaacattcccaagccccgggaagg

SEQ ID NO: 135380 - DNA, 1581 bp, Homo sapiens
tcagtggcggtcggcggcctcacctatcagtgtgtgaaagacggcagcgatggcccctgccaccaccatacacaggacggctttggtcctgtctctcttgctgttcacaaacaccaggcccacatttttgaagtcactcatgggacccgtgaagaacttcatgagggagtacgccagcccgtagctggccagcatctcgactgcatcctccttgacagcagcaatgccccggttcaaggcctgagctatgacatctgagattgaggcacatcccaccaggaaactgtatttgtgttttaagagaatgccagcatgggtccatgcctgttcaagaccaccagtgtgtcccacctggttgaggtggttcctcagaagctgtcctgggtcatttgatgtgtcccgagcaaacagaagcacagagaaaaatggtacttcctttcctttctctttatcattatatagttcaatggctctgtttagcattagaaattttacagcttcatagaggctatattcctccgcctcatttgtgaatagttcatcacaagctatctgtcttgcttcagcagttctcatttcagccaagcctgcccacttcttcctcagcagagtaagggactctttaattttatcaaccaggtcctcattcttcccatcaaatttcagtccaagtttccattgcttgatccagttgtatttgcttatgagtttttctggtaactggaatatttcatccttatgtgactcaaaggaatgcaacttaagtttcagatttctcagatcccacaaggcaacagtctcgtcagctgatcctgtggcaagaatgaactcactatgaggactgaaagaaaggcagttcacttcagcagtgtgagtgtcaactgagtggcttggtttggaagtattgtttgaacgagtatcccaaatcatcagtttctgatcatcagcaactgacccaaacagagactcacagagtagatgccaggaaacatcttctactattgccgtatgccctgtaaagatggtcttcgcatctaccacttttccctcctttggaacggcactgatgtcccacaggcagatggtgtggtcatctgaagcactaagtaagtgcccactgagatttaggttccaagaaagcccatagccttccttctgatgtccacggagacgcaagtctgggttgcattctccagaaggatctggtttagaaggatgttttgtatagtcaaagacaagaatatcactggaaggagtctttgttgtgatgatacaagggttctggggcatataacgggccctgtttacttttccttcatggttgatcttgatttctatttcaatttttccactaactgaaccaaaacctccaaattctcctttctctctgtcgtagtgtgatgcatcaaactgagcatcatcatcaggcagctgcacactggctataacaagatggttttgttcatccgatgtgtgtgtccccaggacaagtcgatgaaggctgaaatctttcccttctggtctggttacatctggaagccactgggcagttaggctgggccactccagagcatgggtcat

SEQ ID NO: 135381 - DNA, 1472 bp, Homo sapiens
cagcgcttggagatcttagagtatgcaatctgggcagagacattgccaaggtggtcatggtttccggctagcacgtaccagggcactttgcgaagggagcggtcagagaatacgtcctcaaaggtctctctgacggggatgttatagtgccgatcgtcctcagcaatgagcgttaccactggccagtccttgggtgggtcggtggggtagactgtgatgaattcttccgtgttgtacttggagagccggtacacctggatggtgtggcgcacagcataggcaagaaggaacatttcaacctcaaacagcagggggcgccatgcgccaagcccgcagagggttgtccaactcctattccttttctctgcagctttaatcctttcctggtttttctcacaggatctgaggactattgataaagttccacactccagcttctgtttagcctttccttctccttgactattaatagtcaacttggaacttgtttgggaagcctccgagctggtgctgggctcggaaagccaagaggccagaggcgccacatctttgctttctccacgttgatggcgcatgcgtgtcgggagtgtctggactaagcgccccgtcaggctgatgtctggtttctgtacactgtctttaagcgtgagtgacagagccatgcagacgaaggtgaacttcttgatgtgggctgccgtgactgtgttgctcgtgctcaccagtttgttgctggggttattcttgtcgaaagcaggatacacagcacggatttccgtcaaccagccgtatggcatgtgacccacagggtatgtggctgtcaaaatcgccactgcctctgtggctgcagaactgccaccaaggtcccgggaaacaaagaggttgacaataggccgactgattctctgtgtggccagaattagagccaaaggccaccagaagctcagcatctttcttattgttgcatctccccccagctccgggccacttctgtcagggatgatgtcgtgaatgttcttgtagtagcccaggcacagggtggtgcagcgcacaagtgcgcccatgtacaaggagaggatcgggatgagcaggggctcccggcattccaggtgactgtgaagcaaaatggctacaaaaacaaccagcatgagctccgggtcctgcagccagggcggcagccccacagcctggctcatggcctggaacagcgtggccctcagtgcacagtaattatcaccacggactcgccgtatggaggtgaacttctgagaaacctcttcatagcccttcacataagcaatgatcagacccccgattccccatactcctgcctcatgagcgcataccccatcctcacacaaggggtgctgcaggctgtacaagaagcatagtgctggcatccgtttggcttctgcagaggcctcaggaagcttccaatcatggcagaaggtgaacggggagtaggcaaaccacat

SEQ ID NO: 135382 - DNA, 1359 bp, Homo sapiens
  misc_feature (1)...(1359): n = a,t,c or g
tttattcaaggcacatttgcatttcacagtgaagaacacagagcctctccaacttattcacgcacatttaggagcagaatttgatttcaacactctaatcaataaatatttagcaaaatgtggtgaatattactgatgaggtaatgggagaaagctaaagtaacagtctgaatagttttgtgcatcctgagttttcttaactaagactttatttttaattaaaaacaaaatttacattttcaaaaacggtttgcctcaaaaaaaatagcttctaaactatattaaattggaccaaataaggattttaattattataaaacaaagctcagtacttcagggaaataccacctccacaaacgttgagccaattcaggggctgccagtagaatcctaaagagtgatgtctccggttcatgtgaacaccatctgcagtccacacccacactctgacggggatgttatagtgccgatcgtcctcagcaatgagcgttaccactggcccagtccttgggtgggtcggtggggtagactgtgatgaattcttccgtgttgtacttggagaagcccggttacaccctggatggtgtggcgcaccagcattaggcnaaggaaggaaccatttccaacctgttccaagaccaccagtgtgtcccacctggttgaggtggttcctcagaagctgtcctgggtcatttgatgtgtcccgagcaaacagaagcacagagaaaaatggtacttcctttcctttctctttatcattatatagttcaatggctctgtttagcattagaaattttacagcttcatagaggctatattcctccgccctcatttgtgaatagttcatcacaagctatctgtcttgcttcagcagttctcatttcagccaaagcctgcccacttcttcctcagcagagtaagggactctttaattttatcaaccaggtcctcattcttcccatcaaatttcagtccaagtttccattgcttgatccagttgtatttgcttatgagtttttctggtaacagcatgagctccgggtcctgcagccagggcggcagccccacagcctggctcatggcctggaacagcgtggccctcagtgcacagtaattatcaccacggactcgccgtatggaggtgaacttctgagaaacctcttcatagcccttcctgctctcctccctgcagtcctcattcctgtgcacaccaagacaagactgctcggccgggcactgcatctcgggccgcggctgcccgctggccgccgccttcccgccgtcccgcgccgtggccgccgcctcccgcgccggcgtctcggcgcagctcgcgcctggccacgcttcgggctggggcat

SEQ ID NO: 135383 - DNA, 399 bp, Homo sapiens
cccacgcgtccgagctgccctcatgtatatactgagtagagatccttacttctaaacgagcaggagactggtttaaagaagaactccggcttttgggtggtctggatcatattgtagataaagtaaaagaatgtgtggatcatttaagtagagatgaggatgaagagaaactggtagcctcactatggggagcacagagatgtttacgagttttacaaagtgtaactgtgcataatcccgaaaatcaaagctacttgatagcatataaagattcccaacttattgtttcatcagctaaagcattacagcattgtgaagaactgatctagcagtacaaccgtgctgtggacacgctatgcttagctgactgtaagcctctgccacacccgaccgtccttc

SEQ ID NO: 135384 - DNA, 180 bp, Homo sapiens
atcaatgtaaccactgtgcgggaatatctgccagaaggagacttttcaataatgacagagatgctcaaaaaatttttgagttttatgaatctcactaacatagtacgccagtgtaacgtgggaaccattgagattgtatttgccctgagtattaaagctagcttagcaaaatacttttaa

SEQ ID NO: 135385 - DNA, 353 bp, Homo sapiens
  misc_feature (1)...(353): n = a,t,c or g
ngttctttgagggttaaaaacacacaaatgcactgcagttggtgaagtgattatctcccccaccacctccccccaccaaaatctgcatctctatcagtgctcgacaattagttattatnnnnnnnnnnnnnnnnnnnnnnnnnnngttaaacactgaggtaaatcaattttcaaatgattaccagtgtaacagaaaaatgcagttcgccctgattgttctcatccaaatgttttataatattccttaccatctgccacaagtcaggttcaccaaaaatctgtccctttccctaaatccaatgattaataaatatcaatgtattttgcattttaaaataaaatataactaattt

SEQ ID NO: 135386 - DNA, 458 bp, Homo sapiens
gcatgttagggcaaataaactttatcaaacccacaatttaatctcggtgtactttgatttgtagtgttcagtttagtaaatctagaggtaaacttttatttatacttcttaaaatctgttaaatattaactgttacttcctttccccttcaccctgctttcagtgtgctgttggaacaactggccagaaatctatctctagagtgattgaatatttggaacattgctagctgctttacctttgcttcaggtgctcggtaatgctggagctatccttagacaaagaaaagtcaagtcatgaaagaagtccttgaagatataccaagaacattcatcagtatcattcgtgtttggatttttaaggccacctgatttcttcgtcatgcattcggcatttgctaaatgacagttactacatcaatctgcaactatcaaaaatgaggggaaaaggttcaagct

SEQ ID NO: 135387 - DNA, 466 bp, Homo sapiens
atgcctggcccctgcttaattttgattcaatttccagcagttgctgtccattgtggggtgcagtccggaagggagccctcgcagatcagtgagagaattcacagaccttcagatcttaccgcagatctgctattccttgagcgagagcgggcagcccagctagcagaaagtaaaacagatgagttgatcaaagatgctcccaccactcagcatgataagagtggagagtggcaagaaacaagtggagaaatacagtgggtgtcaactgaaaagactgatggtacagaagagaaacataagaaggaggaggaggatgaagaacttgacctcaataaagcccttcagcatgccggcaaacacatggaggattgcattgtggcctcctacacagcactacttcttgggtgtctctgccaggaaagtccactgtgggaactgtgggcttacaagttccccagggatcacg

SEQ ID NO: 135388 - DNA, 6396 bp, Homo sapiens
gcgagcggctgttggaggaaggaggtgggggccgggagcgcaaatggcgttgagatggttcagggccctgttcaaactccagcactgaccattcaccggcggaagcggcggcgcaggaggcggcggcggcccagcgggggcacacagcaggctctgttaccagctccagcagtggcggccagcgagagctaggcccgcgcccggccggcggcgctcgaggcggggagggaagttgcggggccgccgctcctgcccccccaaccgggcttcctatttaccgaaagcagagtccctcgcctctctcggctctcacctgccggccctgctctcccgcgcgagggttccgcgcccgcccgcgggccgtaaggagcgggagaaggcggaagcggccccgtggccaaagcacccgccaggcttccgaggagaatatgaaactggttgtcaaaatgacatccagatttgcgaaaacatacagtaggaaaggtggaaatggcagttcaaaattcgatgaagtcttttccaacaaacggactacccttagcacaaaatggggagagaccacatttatggctaaattagggcagaagaggcccaatttcaaaccagatatccaagaaattccgaagaaacctaaagtggaagaagaaagtactggagatccttttggatttgatagtgatgatgagtctctaccagtttcttcaaagaatttagcccaggttaagtgttcctcttattcagaatctagtgaagctgctcatttggaagaggtcacttcagtacttgaagctaatagcaaaattagtcatgtggtcattgaagacactgtcgtttctgataaatgcttccctttggaggacactttacttgggaaagaaaagagcacaaaccgaattgtagaagatgatgcaagcataagtagctgtaataaattaataacttcagataaagtggagaattttcatgaagaacatgaaaagaatagtcaccatattcacaaaaatgcttgatggacagtacttaagaaaccccaatgcagaaactacagtgggctttctggaaatcaagggaaacaaaatgatacttgggaactccccagtttggggaaaagaccaaaaatcgccatcagaaatatctccaatcaagggatctgttagaactggtttgtttgaatgggataatgattttgaagatatcagatcagaagactgtattttaagtttggatagtgatccccttttggagatgaaggatgacgattttaaaaatcgattggaaaatctgaatgaagccattgaggaagatattgtacaaagtgttcttaggccaaccaactgtaggacgtactgtagggccaataaaacgaaatcctcccaaggagcatcaaattttgataagctgatggacggcaccagtcaggccttagccaaagcaaacagtgaatcgagtaaagatggcctgaatcaggcaaagaaagggggtgtaagttgtgggaccagttttagagggacagttggacggactagagattacactgttttacatccatcttgcttgtcagtttgtaatgttaccatacaggatactatggaacgcagcatggatgagttcactgcatccactcctgcagatttgggagaagctggtcgtctcagaaaaaaggcagatattgcaacttctaagactactactagatttcgacctagtaatactaaatccaaaaaggatgttaaacttgaattttttggttttgaagatcatgagacaggaggtgatgaaggaggttctggaagttctaattacaaaattaagtattttggctttgatgatctcagtgaaagcgaagatgatgaagatgatgactgtcaagtagaaagaaagacaagcaaaaaaagaactaaaacagctccatcaccctccttgcagcctcccccagaaagcaatgataattcccaggacagtcagtctggtactaacaatgcagaaaacttggattttacagaggacttgcctggtgtgcctgaaagtgtgaagaagcccataaataaacaaggagataaatcaaaggaaaataccagaaagatttttagtggccccaaacggtcacccacaaaagctgtatataatgccagacattggaatcatccagattccagagaaactgcctgggccaccagttgtaaaccttagtgtttccagtgtgtcctttctcaaaaggaccacaaccaaaaagtatggttgggtttttaaggctcctgcaccaccatcccaaagtgataaacactgtgacaatacctactcagccctaccaagatatagttactgcactgaaatgccagacgagaagacaaagaattatatactgttgttcagcacgtgaagcacttcaacgatgttgtagaatttggtgaaaatcaagagttcactgatgacattgagtacttgttaagtggcttaaagagcactcagcctctaaacacacgttgccttagtgttattagcttggctactaaatgtgccatgcccagttttcgaatgcacctgagagcacatgggatggtagcaatggtctttaaaaccttggatgattcccagcaccatcagaatctgtccctctgtacagctgccctcatgtatatactgagtagagatcgtttgaacatggatcttgatagagctagcttagatctaatgattcgacttttggaactggaacaagatgcttcatcagccaagctactgaatgaaaaagacatgaacaaaattaaagaaaaaatccgaaggctctgtgaaactgtacacaacaagcatcttgatctagaaaatataacgactgggcatttagctatggagacattattatcccttacttctaaacgagcaggagactggtttaaagaagaactccggcttttgggtggtctggatcatattgtagataaagtaaaagaatgtgtggatcatttaagtagagatgaggatgaagagaaactggtagcctcactatggggagcagagagatgtttacgagttttagaaagtgtaactgtgcataatcccgaaaatcaaagctacttgatagcatataaagattcccaacttattgtttcatcagctaaagcattacagcattgtgaagaactgattcagcagtacaaccgtgctgaggacagcatatgcttagctgacagtaagcctctgcctcaccagaatgtaactaaccatgtaggcaaagcagtggaggactgcatgagggccatcatcggggtgttgcttaatttaactaatgataatgagtggggcagcaccaaaacaggagagcaggacggtctcattggcacagcgctgaactggtgtgcttccagggttccaaagtacctacctcaggagcagagatttgatattcgagtgctgggcttaggtctgctgataaatctagtggagtatagtgctcggaatcggcactgtcttgtcaacatggaaacatcgtgctcttttgattcttccatctgtagtggagaaggggatgatagtttaaggataggtggacaagttcatgctgtccaggctttagtgcagctattccttgagcgagagcgggcagcccagctagcagaaagtaaaacagatgagttgatcaaagatgctcccaccactcagcatgataagagtggagagtggcaagaaacaagtggagaaatacagtgggtgtcaactgaaaagactgatggtacagaagagaaacataagaaggaggaggaggatgaagaacttgacctcaataaagcccttcagcatgccggcaaacacatggaggattgcattgtggcctcctacacggcactacttcttgggtgtctctgccaggaaagtcccaatccaatgtaacccactgtgcgggaatatcttgcccaaaggaaccttttcaataatgacagagatgctcaaaaaaatttttgaggttttatgaatctcacttggtgctgttggaacaacctggccagaaatctatctctagagtgattgaatatttggaacatttactagctgctttaccttggcttccaggtgctccggtaatgctggagctatccttagacaaagaaaagtcaagtcatgaaagaagtccttgaagatataccaagaacattcatccagtatcattcgtgtttggatttttaaggcccacctgatttcttcgtccatgcattcggcatttgctaaaatgacagttactacatcaatctgcaactatcaaaaatgaggggaaaaggttcaggctgttaacaattccatgcagtatttaaatacatttactttggcagagtttataccctccccttgttttcttgctttattctgggcaagtttgaaggggaaaatttgtgctgctgttagtgcaactgctgtgtatgttgagccactgttgtcatgccagccaggtgcaaaggcagcttagctactgaggtagcgaatgttctgaggacattctagacaacagcttagttcctttttcaggctcatttgcttttgcttttttgttgaatgattccaatcgtaaataaagcttttaataattttgtgaattttttggttgttgttccctgaactactgtctatatttaaaattagatggaatccaaagatacacgggattaatagtatatttttttattcttgattaggtttgggttattgaactattttttacttttgagaccacaaccatattcaatatcataccataatgtgtcatagctataggcaccaagaaaaacaacagtttgaggaggaatattatataagatgatgtgccctgttaaaaggaggaggcaaaatagtcaaacccagggtagtttacacttaatgctagggaggctcttaaaacattattagattttgaggaaagactctctagatatattttctaatgttcagtacaataaatataaggaagctaaaacaccaatgtggaattcctgtttccagataacatgtatattcttctatagagtgacaggatcaattgcataagcgcaaagccttaaattgctggtttagagaagacccttttttcattcagattctttgttcgtagagcagttatttgaaaaacagttatggaacacaaaacattttatagatttaatatcataacattgcaaatttttcttgtattattgttcacaccactggttatacttttttttttccgttttttattgattgggcctgaatacaggctttctagagatctttttcattaatacttttaaatacctttcaggtagttacatcatgtttcttcattggatttgtaaaacttgaagccataaaaatattagtttggtgtgtattggggaaaatagctaaaagtctaatttttacccatttagactttgtttatttccttgtataaagtgacaaatcggggctcttgtatcagtgccagctgtaatgtttttaaatgcagtggctgccttctattgtcttcctatttttgataatgcagattgttgggaaatctgtaaggaagtaactgattccaggcaaatgtttttcttccttctacccaacccaaacccctacccatcatcttttaagaacatagtacgccagtgtaacgtgggaaccattgagattgtatttgccctgagtattaaagctagcttagcaaaatacttttaaaaacatattggtaaatgatacccataaaaataaattagttatattttattttaaaatgcaaaataccattgatatttattaatcattggaattagggaaagggacagatttttggtgaacctgacttgtggcagatggtaaggaatattctaaaacatttggatgagaacaatcagggcgaactgcaggtttctgtcacactggtaatcatttgaaaagatgatttacccccagtgtttaaccagttttgtgtttttttttgttttttaaataataacttaattgtcggagcactaaataaagatccagattttggtgggggaaggtgggtggggaaaaataattcccttccccccaactgcagtgcattgtgtgtttttaacccctcccaagaactcttgcattttagcggtacttgaaggctgacttaactaaaaagttttaaagtaacccttttttccattgtaaatatttctgtaaatactaccaattggaaattagaacaagtagaagtactttttctgaatccaatcctatttttatctttatacagtatttctcagctgtgatcctttggagcaaaagccaacggcaggaaaaaattagtttgtaccagtttcatgaagtatgtactttgggtttttgtaaataattttaactcaaataaaattgctactttcaatacaaaaaaaaaaaaaaaaaaagatt

SEQ ID NO: 135389 - DNA, 221 bp, Homo sapiens
ggctgaaggggacgtaccagggcctcacagccactgtcctgaagcagggctcgaaccaggccatccgcttcttcgtcatgacctccctgcgcaactggtaccgaggggacaaccccaacaagcccatgaaccctctgatcactggggtcttcggagctattgcaggcgcagccagtgtctttggaaacactcctctggatgtgattaagacccggatgcag

SEQ ID NO: 135390 - DNA, 580 bp, Homo sapiens
ccctctagcctcaacctgaaggttattgccatggatctggcccagatgcacgcctgtcaaggacctggaaatgacctttacattgaagcatctgctgctctgtgtgcaggctctgatttcagtgtgtcaggaggactgcagtgggtccagcttgtagctcatggaagtgctggtgatgataatggctggctcaggtgccacaggcctccatggcaaggtttaggagacaatgaactcgatggttgcagtggagaagtcaatgtcagccaggatttctgtgggaaatacacagatgtggtcaaccacatcacacaacgactggactatgtactctgcagaacttatgcagctcaacgtacttgtcactcaggctctgttgtaaaagaagtgaagttcatccacgaccagacctccccaaaccccaagtacagaggattcttccacggggttagggagattgtgcgggaacaagggctgaaggggaccttccacggcctcacagccactgtccctgaaacagggcttcgaacccaggccatcccttttttcgtcatgaactccctgcgcaactggttccgag

SEQ ID NO: 135391 - DNA, 1717 bp, Homo sapiens
  misc_feature (1)...(1717): n = a,t,c or g
ggcacgaggtaaccggccgccgccgccaccgcggaccgagcgcggagttctggagtctcggacccgaagccgccacagggcgccccgcctcccgcccgccatgcccgcgccccgcgccccgcgcgctctggcggccgccgcggcccgcgtccgggaaggccaagctgacgcacccggggaaggcgatcctggcaggcggcctgaggggtggaagtacagatctgcatgaccttccccaccgagtacgtgaagacgcagctgcagctggaacgagcgctcgcacccgccgcggtaccggggcatcggggacttcgtgcggcagacggttcgcagccatggcgttcctgggcctgtaccgcggccttagctccctgctctacggttccatccccaaggcggccgttcaggtttggaatgttcgagtgtcctcagcaaccacatgcgggatgccccagggacggctggacagcacgcgtgggctgctgtgccgncctgggcgctgggcgtggaccgaggccgtaggtggtcgtgtgccccatggagaccatcaaggtgaagttcatccacgaccagacctccccaaaccccaagtacagaggattcttccacggggttagggagattgtgcgggaacaagggcttgaaggggacgtaccagggcctcacagccacttgtcctgaagcagggctcgaaccaggccaatccgcttccttcgtcatgacctccctgcgccaatgggtacccgaggggaacaacccccaacaaagcccatgaacccttctgaatcacctggggttctttcggagcttattgcaagcgcaagccaagtgtcttttggaaacactcctctggatgtgatttaagacccggatgccagggccctggaggccgcacaaattaccggaaacacgtgggacctgcggccttgcagatcttgaagaaaggagggggttcaagggcattcttacaagggcactgtccccccgctggggccgggtcttgcctgggatgtggccattagtgtttgttcatctatgatgaagttggttgaagctgcttcaacaaagtgtggaagaacgggattaaggcctagagagacctgcaaggggctcgccccagggaaccgccagagtgttcctgcttacctttgtctcacatgactccagtgaagtagtgccaaaaggcccctttcccacgtccctcgagctctgtaagcctggtctgtgcattgtggctgtcaaatccatgtgtcccccctgtggtctgtgtgtgacacccaccactgtgtcccaagtgtctggccccagccatggctggatgtgcatctggcctatgaaactgaaaccccttctgtgcccacttgtccaatgtgcttactgtgaaccctgtgcctgtgtttcatgttttgtgttaacgtgacccttgtgcccccgcctcccgggggtgcccgtgtggcatgggtcctcggccctgtagccctggcccggtcccagtccggtgccttccaccctgccctggcctaccacagctgcctccgggcctcggcctggcttcaccgcattccaggggctgcagccccctgcttctccccgccattgtgccttaactggccctcgggccctctctccgccccggacagggtggcacccaccactctcaggaccaacactgccaaggcagaataaaccggatcctgttgcaaaacccacgcgtccg

SEQ ID NO: 135392 - DNA, 375 bp, Homo sapiens
ccacagccggtgactccggggcggaggacgggccagcttcccgtgtgtcccagatgcccacgctgcccccgcccatgccctggaatctgccagctggtgtggactgcaccaccagcggcgtgctggccttgactgctctttttttcaagatggaagaagccaacctggcgagccgagcgaaggcccaggagctgatccaggccaccaaccagatcctcagccacagaaagccaccctcaagtctggggatgaccccagctcctgtgcccacctctttgggtctgccccctggcccctccagctacctgctttctggcagccctcctcttgggggctgcaggttcgaccccccccaccccccccgggctggctgcg

SEQ ID NO: 135393 - DNA, 4056 bp, Homo sapiens
atggcgagcgtggtggtgaagacgatctggcagtccaaagagatccatgaggccggggacacccccacgggggtggagagctgctcccagctagtcccagaggctccccggagggtgaccagccgggccaaggggatcccgaagaaaaagaaggccgtgtcgttccacggggtggagccccagatgtcccatcagcccatgcactggtgcctgaacctcaaacggtcctcggcctgcaccaacgtgtcactgctcaacctggccgccatggagcccactgactccacggggacagactccacagtggaagacctcagcggccaactcacactggctgggccccctgcctcccctaccctaccctgggatccggatgacgcagacatcacggaaatcctgcaggcaccccaaggtcattactttttccatttcacagagaaggaacttgaagcccccccacctgccccccgattcgatatctatgaccccttccaccccaccgacgaggcctactctccaccgcctgctccggagcaaaagtacgacccttttgagcccaccggctccaaccccagctcatcagcggggaccccctcacctgaggaggaagaggaggaggaagaggaagaagaagaggaagaggaagacgaggaggaggaggaaggcctgtcccagagcatcagccgcatctcggagaccctggcgggcatctacgatgacaacagcctgagccaggacttcccaggtgacgagagcccccgcccggacgcgcagcccacacagccgactcccgcccctggaacgccgccccaggtggactccacccgggctgatggagccatgcgccggcgggtcttcgtggtggggaccgaggcagaggcttgtcgggaaggcaaggtctcggtggaggtggtgaccgctggtggagccgccctcccgccgcccctgctgccgcccggcgactcggagatcgaggaaggggagatcgtccagccggaggaggagcccaggctggcgctgtccctcttccgccccggcggccgggccgcccggcctacaccggccgcctcggccacccccacggcccagccccttcctcagcctcccgctccgcgggcccccgagggggacgacttcttgtccctgcatgcggagtcggacggcgagggcgccctgcaggtggacctaggggagccggctcccgcgccgcccgccgccgactcgcgctggggcggcctggacctgcgccgcaagatcctgacccaacggcgggagcgctaccgccagcgctcgccctccccggcgcccgcgcccgccccggccgccgctgctggtccgcccacgcgcaagaagtccaggcgggaacgcaagcgcagcggcgaggccaaggaggccgcctcgtcctcgtcgggcacccagccagcgccgcccgccccggcctcgccctgggactccaagaagcaccgctcgcgggaccgcaagcccggctcccacgcctcgtcgtccgcccgccgccgctcccgctcccgctcccgctcccgctccacccgccgccgctcgcgcagcaccgaccgccgccgcgggggcagccgcaggtcgcggtcccgggagaagcggcgacggcggcggcgctccgcctccccgcccccggccacttcctcatcgtcgtcctcgaggcgcgagcggcaccgcgggaaacaccgggacggtggcggcagcaagaagaagaagaagcggtcgcggtcccggggtgagaagcggtctggggatggcagcgagaaggccccggcgcccgccccgccgccctctggctccacctcgtgtggtgaccgcgacagccgccgccggggggccgtgccaccctccatccaggacctcacggaccacgacctcttcgccatcaagcggaccatcacggtgggccggcttgacaagtccgacccccgaggaccctctcctgctccggcctcctcacctaagcgggaggtcctgtacgactccgagggactgagcggcgaggagcggggcggcaagagcagccagaaggatcggcgccgctcgggggccgcctcctcctcctcctcttcccgggagaaggggtctcgtcggaaggcgctggacgggggtgaccgggatcgggacagggacggagattgggacagggacagttcatccacgatggcccgcccccccaaggagtcggcgccttactcaaggcccccgccatagccaccagtctgcagtggctcaggctcttcatactcgccgccctgctgttcttcccgcatggtgaagctagcacaccaaggcggcggagctgatccgcgagggtgtcagcagcaccaccccggccaaggatgccgcgtcagccggcctgggctccattggcgtcaaattcagccgtgaccgcgagagtcgctcccccttcctcaaacctgacgagcgggcccccactgagatggccaaagcagctccgggcagcaccaagcccaaaaagaccaaggtcaaggccaaggcaggggccaagaaaaccaaggggaccaagggaaagaccaagccatccaagaccaggaaaaaggtccgcagtggaggtggcagcgggggcagtggtggccaggtgtcgctgaagaagtccaaggcggatagctgcagccaggcggcaggcaccaagggggcggaggagacttcctggtccggggaggagcgggcagccaaggttcctagcaccccgccccccaaggcagccccaccaccccctgccctcactccggactcgcagaccgtggacagcagctgcaagacacctgaggtctccttcctgcccgaggaggccactgaggaggctggggtccgaggtggggcggaggaggaggaggaggaagaagaagaggaggaggaagaggaagaggaggaggagcagcagcctgctaccaccacggccaccagcactgctgcagccgccccaagcactgcccccagcgcggggtccacagccggtgactcgggggcggaggacgggccagcttcccgtgtctcccagctgcccacgttgcccccgcccatgccctggaatctgccagctggtgtggactgcaccaccagcggcgtcctggcctgtgagtgtcccctgggggagggtggtgctggggcagtgactgcacttctcttcaagatggaagaagccaacctggcgagccgagcgaaggcccaggagctgatccaggccaccaaccagatcctcagccacagaaagccaccctcaagtctggggatgaccccagctgcctgtgcccacctctttgggtctgccccctggcccctccagctacctgcttcctggcagcctccctctggggggctgcggttcgaccccccccacccccaccgggctggctgccacgtctgacaagagagagggcagcagcagctctgagggccgtggggataccagataagtatctgaacaagctgctcacgccaggagcggccggtggagtaggtgaagctggccatctcagccatactatcagaagaaggacatgcaccaaggaggagtacaaggacatcctgaggaaggccgtccacaagattcttgcctcagcaaaagttgggggaaattcaacccagtgaaggtgagccaacctggtgcgggcctacgtccagcgctaccgctacttcccgcaagcacggtcgcaaagcccaagggaccccccccagggcccccacggccgcccaaaggagccagggcccccagacaagggtggcccgggcctgcccctgccccctctctgagagccctggcaaagctcttcgcccctcacctctttgaaactctggaggtatttatggatccacactccccacctccctcccccgtcagtggggatgacttgggggaaggttgctgcagggaagaggagagccccctgccctgccctgccccgtgtccacctcccttgcccccaagcctgtccccagtgcccctcccttctgtttgtgcccctctccccaaatttcattaaagatttcatgaaacattaaaaaaaaaaaaaaaaa

SEQ ID NO: 135394 - DNA, 432 bp, Homo sapiens
atactctaataccagatcactatatggataaacgggaaactgggacggcatccgggcaccaattcctaattccccccgcgccccacgcgtccgggctgctgacggaggaaatcaggtctcgggcaggggggttcctggaaataagtaacatggttcagtctttctttcttgaacactctcctccactaaggcctatgacaaattgatgatacggggaattccagcccctcaagggtcccatatacttgaacggcatgggggtgttttctgaagttgtcgctgtgatctaaaaccacatttggcttcccagggtaccagaaggagctgatgtacaaacacagcaatggctcatacagtgcctttggggagcgagatggaaatggaaacacatggtaatatcacccaattcccaatgagttctgtactccagag

SEQ ID NO: 135395 - DNA, 610 bp, Homo sapiens
ggcaccggtttcggattcccgcctcgacgatttcgtccacaatccgggtgtcgggagttgtgaaataacatcagctttgaggagaagaaaaaggttctaattcagaggcaggggaacggcacctttgtacagactgacaaacctctctacaccccagggcagcaagtgtatttccgcattgtcaccatggatagcaacttcgttccagtgaatgacaagtactccatggtggaactacaggatccaaatagcaacaggattgcacagtggctggaagtggtacctgagcaaggcattgtagacctgtccttccaactggcaccagaggcaatgctgggcacctacactgtggcagtggctgagggcaagacctttggtactttcagtgtggaggaatatgtgctgccgaagtttaaggtggaagtggtggaacccaaggagttatcaacggtgcaggaatctttcttagtaaaaatttgttgtaggtacacctatggaaagcccatgctaggggcagtgcaggtatctgtgtgtcagaagggcaaatacttactggtatcgagaggtgggaacgggaaccagcttcctggaccaatggcagggaaccttc

SEQ ID NO: 135396 - DNA, 4771 bp, Homo sapiens
atgtgggctcagctccttctaggaatgttggccctatcaccagccattgcagaagaacttccaaactacctggtgacattaccagcccggctaaatttcccctccgttcagaaggtttgtttggacctgagccctgggtacagtgatgttaaattcacggttactctggagaccaaggacaagacccagaagttgctagaatactctggactgaagaagaggcacttacattgtatctcctttcttgtaccacctcctgctggtggcacagaagaagtggccacaatccgggtgtcgggagttggaaataacatcagctttgaggagaagaaaaaggttctaattcagaggcaggggaacggcacctttgtacagactgacaaacctctctacaccccagggcagcaagtgtatttccgcattgtcaccatggatagcaacttcgttccagtgaatgacaagtactccatggtggaactacaggatccaaatagcaacaggattgcacagtggctggaagtggtacctgagcaaggcattgtagacctgtccttccaactggcaccagaggcaatgctgggcacctacactgtggcagtggctgagggcaagacctttggtactttcagtgtggaggaatatgtgctttctccatttctccttttactctcttcagtgctgccgaagtttaaggtggaagtggtggaacccaaggagttatcaacggtgcaggaatctttcttagtaaagggggggttgtaggtacacctatggaaagcccatgctaggggcagtgcaggtatctgtgtgtcagaaggcaaatacttactggtatcgagaggtggaacgggaacagcttcctgacaaatgcaggaacctctctggacagactgacaaaacaggatgtttctcagcacctgtggacatggccacctttgacctcattggatatgcgtacagccatcaaatcaatattgtggctactgttgtggaggaagggacaggtgtggaggccaatgccactcaaaatatctacatttctccacaaatgggatcaatgacctttgaagacaccagcaatttttaccatccaaatttccccttcagtgggaagataaaagataggggccatgatgactcctttctcaagaaccatttaatggttctggggatttaaggcacaaaatgaacctttcaccagacccctggttaactgaaaacaaatgcgctatgcttcctctacctttggagaaatccccggtggaaagggacagaacgttctctggagggaaagttttcaataggaaaacttattatataatccggaacaaagggccaccgttactaccaaaaaggcctaacctgggcctgcgaacccttttacaagaacaaacccggaactttcctttggcattcccccggcttaaacggccccttgaaatgtagccagccccacgaagagctggtggaattattacattcgacccgggccatgcaagcccctgacccaagagatcaaccttcttctactattttaaatagggaaaggaagtttggtgatggaggggcacaaacacctgacctctaagaagaaaggactgaaagcctccttctctctctcactgaccttcacttcgagactggcccctgatccttccctggtgatctatgccatttttcccagtggaggtgttgtagctgacaaaattcagttctcagtcgagatgtgctttgacaatcaggtttcccttggcttctccccctcccagcagcttccaggagcagaagtggagctgcagctgcaggcagctcccggatccctgtgtgcgctccgggcggtggatgagagtgtcttactgcttaggccagacagagagctgagcaaccgctctgtctatgggatgtttccattctggtatggtcactacccctatcaagtggctgagtatgatcagtgtccagtgtctggcccatgggactttcctcagcccctcattgacccaatgccccaagggcattcgagccagcgttccattatctggaggccctcgttctctgaaggcacggaccttttcagctttttccgggacgtgggcctgaaaatacatgtccaatgccaaaatcaagaagccagtagattgcagtcacagatctccagaatacagcactgctatgggtgcaggcggtggtcatccagaggcttttgagtcatcaactcctttacatcaagcagaggattctcaggtccgccagtacttcccagagacctggctctgggatctgtttcctattggtaactcggggaaggaggcggtccacgtcacagtttcctgacgccatcaccgagtggaaggcgatgagtttctgcacttcccagtcaagaggcttcgggctttcacccactgttggactaactgctttcaagccgttctttgttgacctgactcttctcttactcagtagtccgtggggaatcctttcgtcttactgccaccatcttcaattacctaaaggattgcatcagggttcagactgacctggctaaatcgcatgagtaccagctagaatcatgggcagattctcagacctccagttgtctctgtgctgatgaagcaaaaacccaccactggaacatcacagctgtcaaattgggtcacattaactttactattagtacaaagattccggacagcaatgaaccatgtgggggccagaaggggtttgttccccaaaagggccgaagtgacacgctcatcaagccagttctcgtcaaacctgagggagtcctggtggagaagacacacagctcattgctgtgcccaaaaggaaaggtggcatctgaatctgtctccctggagctcccagtggacattgttcctgactcgaccaaggcttatgttacggttctgggagacattatgggcacagctctgcagaacctggatggtctggtgcagatgcccagtggctgtggcgagcagaacatggtcttgtttgctcccatcatctatgtcttgcagtacctggagaaggcagggctgctgacggaggagatcaggtctcgggcagtgggtttcctggaaatagggtaccagaaggagctgatgtacaaacacagcaatggctcatacagtgcctttggggagcgagatggaaatggaaacacatggctgacagcgtttgtcacaaaatgctttggccaagctcagaaattcatcttcattgatcccaagaacatccaggatgctctcaagtggatggcaggaaaccagctccccagtggctgctatgccaacgtgggaaatctccttcacacagctatgaaaggtgggtgttgatgatgaggtctcctggactgcgtatgtcacagctgcattgctggagatgggaaaggatgtagatgacccaatggtgagtcagggtctatggtgtctcaagaattcggccacctccacgaccaacctctacacacaggccctgttggcttacattttctccctggctggggaaatggacatcagaaacattctccttaaacagttagatcaacaggctatcatctcaggagaatccatttactggagccagaaacctactccatcatcgaacgccagcccttggtctgagcctgcggctgtagatgtggaactcacagcatatgcattgttggcccagcttaccaagcccagcctgactcaaaaggagatagcgaaggccactagcatagtggcttggttggccaagcaacacaatgcatatgggggcttctcttctactcaggatactgtagttgctctccaagctcttgccaaatatgccactaccgcctacatgccatctgaggagatcaacctggttgtaaaatccactgagaatttccagcgcacattcaacatacagtcagttaacagattggtatttcagcaggataccctgcccaatgtccctggaatgtacacgttggaggcctcaggccagggctgtgtctatgtgcagacggtgttgagatacaatattctccctcccataaatatgaagacctttagtcttagtgtggaaagaggaaaagctagatgtgagcagccgacttcacctcgatccttgactctcactattcggagccaggtatgtggggagccgtagctcttgcaatatggctattgtggaagtgaagatgctatctgggttcagtcccatggagggcaccaatcagttacttctccagcaacccctggtgaagaaggttgaatttggaacttgacaccacttaaacatttactttggatgaaagctcattaagaacactcagacttacaccttcaccattagccaaagtgtgctggtcaccaacttgaaaccagcaaccatcaaggtctatgactactacctaccagatgaacaggcaacaattcagtattctgatccctgtgaatgaggataggagctggaaactcaattagtcctctgtgacatttactggagggtggaacattcttctgtcgcttgaagcagaactcattcaatcaaataatttaatttctctgactactatatgggtaacaaatgaatatgtctgaacctcagctataatactttctactacctttgcaaggagatgggataggaacaatcactcataggaggcgttgcatggacagggtcatagggggaagaaaggtggtttatctgttttatttagccatttcagggggctcttcacaagaggagacggtggtagagggtgaactagagaagataagaatgtcttcct

SEQ ID NO: 135397 - DNA, 522 bp, Homo sapiens
cagagctccgcacctggatcgagggactcaccggcctctccgtcggccccgacttccagaagggcctgaaggatggaactatcttatgcacactcatgaacaagctacagccgggctccgtccccaagatcaaccgctccatgcagaactggcaccagctagaaaacctgtccaacttcatcaaggccatggtcagctacggcatgaaccctgtggacctgttcgaggccaacgacctgtttgagagtgggaacatgacgcaggtgcaggtgtctcttctcgccctggcggggaagatgggcaccaacaaatgcgccagccagtcaggcatgactgcctacggcacgagaaggcatctctatgaccccaagaaccatatcctgccccccatggaccactcgaccatcaagcctccagatgggcacgaacaagtgcgccagccaggtgggcatgacggctcccgggacccggcggcacatctatgataccaagctgggaaccgacgaagtgtgacaactccac

SEQ ID NO: 135398 - DNA, 1233 bp, Homo sapiens
atgcatcaagaagacctcagagcctggtatcttgatcttggacttcctagccaccagaatgaaaccactgatgtatcagtagtttatgaaaggtttagtttaactgatgccacctatccaaaacaggcaaagcagtgggacttccccttccttcgagtcagcacagctcagcccacagcctggaagtgccagcgggcaccttcaccctacacgcatcaggatacggccttgatcccttcccccacagcccggtggctcagtcctgagaaggaaccaaagcagggggaggtgggggaaaaatccctgctgcctgatcccacgctgccactcacagaccctcggttgactggcagcactgaacagaaaaaagacttagccgctggtcctgtcggatccgccctgcgacggcgccctccagccgtaagctccacgcagttcaacaagggcccctcctacaggctcttggcggatgtccagaacaggcttctgcccaaatatgactcccagaaggaggcagagctccgcagctggatcaagggattcactggcctctccatccgccccgacttccagaagggcctgaaggacgggattattttatgcacactcgtgaacaaactgcagccgggctcagtccccaagatcaacggcttccgtgtagaactggcactagctagaaaacctctccaacttcctcaaggcaatggtcagctacggcatgatcccgtggacctatttgaggccaacgacctgtttgagagtgggaacaatatgcaggtgcgggtgtctcttcttgccctggcagggaaggccaagactaaggggctgcggagcggggtggacatccgtgacaagtactcaaagaagcagaacttcgacgacaccaccatgaaggccagccagtgcgtcatccggctgcagattaccaacaaatgtgccagccagtcaggcatgaccgcatatggcacgaggaggcatctctacgaccccaagaaccgcatcctgccccccatggacaattcgaccatcagcctccagatgggtacaaacaagtacgccagccaggtgggcatgacggctcccgggacccagcggcacatctatgacaccaatttgggaatcgacaagtgtgagaactcctccatgtccctgaagatgggctacacgcaggttgccaatcacagcggccaggtctttggcctaggccggcaaatatacgaacccaagtactag

SEQ ID NO: 135399 - DNA, 389 bp, Homo sapiens
tttcgtccagaaggaggcagagctccgcacctggatcgagggactcaccggcctctccatcggccccgacttccagaagggcctgaaggatggaactatcttatgcacactcatgaacaagctacagccgggctccgtccccaagatcaaccgctccatgcagaactggcaccagctagaaaacctgtccaacttcatcaaggccatggtcagctacggcatgaaccctgtggacctgttcgaggccaacgacctgtttgagagtgggaacatgacgcaagtgcaggtgtctcttctcgccctggcggggaaggccaagactaaggggctgcagagcggggtggacattggcgtcaagtactcggagaagcaggagcggaatttcgacg

SEQ ID NO: 135400 - DNA, 1116 bp, Homo sapiens
atgcatcaagaagacctcagagcctggtatcttgatcttggacttcctagccaccagaatgctcagcctacagcctggaagtgccagcgggcaccttcaccctacacgcatcaggatatggccttgatcccttcccccacagcccggtggctcagtcctgagaaggaaccaaagcagggggaggtgggggaaaaatccctgctgcctgatcccacgctgccactcacagaccctcggttgactggcagcactgaacaggcccatgccgaaggcctggccgctctgatgagcgccctgcgtgtatcccatcttcagggacgtggaggagttgtcacacttgtcgattcccagcttggtgtcatagccgtaagctccacgcagttcaacaagggcccctcctacaggctcttggcggacgtccagaacaggcttctgcccaaatatgactcccagaaggaggcagagctccgcagctggatcaagggattcactggcctctccatccgccccgacttccagaagggcctgaaggacgggattattttatgcacactcgtgaacaaactgcagccgggctcagtccccaagatcaacggcttccgtgtagaactggcactagctagaaaacctctccaacttcctcaaggcaatggtcagctacggcatgatcccgtggacctatttgaggccaacaacctgtttgagagtgggaacaatatgcaggtgcgggtgtctcttctcgccctggcagggaaggccaagactaaggggctgcggagcggggtggacatccgtgacaagtactcagagaagcagaacttcgacgacaccaccatgaaggccagccagtgcgtcatccggctgcagattaccaacaaatgtgccagccagtcaggcatgaccgcatatggcacgaggaggcatctctacgaccccaagaaccgcatcctgccccccatggacaattcgaccatcagcctccagatgggtacaaacaagtgcgccagccaggtgggcatgacggctcccgggacccagcggcacatctatgacaccaagttgggaatcgacaagtgtgagaactcctccatgtccctgaagatgggctacacgtag

SEQ ID NO: 135401 - DNA, 1263 bp, Homo sapiens
atgcatcaagaagacctcagagcctggtatcttgatcttggacttcctagccaccagaatgggatactcagttcaaatacatcaaaagaaaacattcttcaggtacagaaaccacttactgataggctgagaaaagggggaagaggagaggcaaccagaaaccttcagggacccgttccctccatatccaggtctcttctctccagcacagctcagcccacagcctggacatgccagcggggaccttcaccctacacgcatcaggatacggccttgatcccttccgccacagcccggtggctcagtcctgagaaggaagcaaagcaaggggagggcaaagatgttttactagtcctgttggtgtctcaaattggctctcgccgtaagctccacgcgttcaacaagggcccctcctacaggctcttggcggacgtccagaacaggcttctgttcaaatatgactcccagaaggaggcagagctccgcagctggatcaagggattcactggcctctccatccgccccgacttccagaagggcctgaaggacgggattattttatgcacactcgtgaacaaactgcagccgggctcagtccccaagatcaacggcttccgtgtagaactggcaccagctagaaaacctctccaacatcctcaaggcaatggtcagctacggcatgatcccgtggacctatttgaggccaacgacctgtttgagagtgggaacaatatgcaggtgcgggtgtctcttctcgccctggcagggaaggccaagactaaggggctgcagagcggggtggacatccgtgacaagtactcagagaagcagaacttcaacgacaccaccatgaaggccaggctgtgcgtcatccggctgcagattaccaacaaatgtgccagccagtcaggcatgaccgcatacgtcacgaggaggcatctctacgaccccaagaaccgcatcctgccccccatggacaactcgaccatcagcctccggatgggtacaaacaagtgcgccagccaggtgggcatgacggctcccgggaaccagtggcacatctatgacaccaagttgggaatcgacaagtgtgagaactcctccatgtccctgaagatgggctacacgcaggtcgccaatcacagcagacaggtctttggcctaggccggcaaatatatgaacccaagtaccagccgggtggcccagtggcccacggggctccctccgccggcaactgcccagggccaggggaggccccttag

SEQ ID NO: 135402 - DNA, 530 bp, Homo sapiens
tttcgtggtacctcagtgagctccagcagtcagaggctctgaaagaggaggcggagaagaggagggaagacctgaaactgaaagctcaagaatccattatgcagtggaagcttaagcataagaagttagaacgagcgttggagaaacaatctgaaactgttgatgaactgacaggcaagaataatcagattttaaaagaaaaggatgaattgaaaacccagctgtatgcagcattacaacaaatagagaatcttcgaaaggaattgaatgatgtcctaacaaagcgtgcccttcaggaggaggagcttcactccgaggaggagaaattacgtgatattaagtctcatcaagctgaccttgaattggaagttaagaattccctggataccatccatagactggagagcgaattgaaaaagcagagtaagatccaaagccagatgaaagttgagaaagctcacttggaggaagaaattgcagagctcaagaagagccaggcccaggacaaagctaaacttcttgagatgcaa

SEQ ID NO: 135403 - DNA, 854 bp, Homo sapiens
atgccagagagctggcttgctgcttttcctccatatggggatataaagaaagttgtcggtctgcagctcaaagaaggtctgcaccagaatctgaccatgcaagatagtattcagatctttgatttccagcttccaggactgttacggccaagttcggtactatggactctgaaaccctatcatacagcaggtttggccagtgatagggattcatacaaggggatcttggcttgcatgccctgcatgttcggctctaggagatccccattacgtgatattaagtctcatcaagctgaccttgaattggaagttaagaattccctggataccatccatagactggagagcgaattgaaaaagcagagtaagatccaaagccagatgaaagttgagaaagctcacttggaggaagaaattgcagagctcaagaagagccaggcccaggacaaagctaaacttcttgagatgcaagagtccatcaaggacctgagtgccatccgagcagatcttgctaataaattggctgaggaagagagagccaagaaaaccagtgcctaaggggcctttgggccttcattgcccaggcaaattccagggatgaaggaacagctacaatcatcacgcagttagagttggaacgagatgtgcaccagagggagctgaaagatctcacatcatcattgcagagtgtgaaaacaaaacacgaacagaatatccaggagcttatgaagcactttaagaaagaaaagagtgaggctgagaatcatatcaggactctgaaggtacctctgctaaattatcctgatgatactgaaggaatttttctggtggctcatgaagttaataaagcgtaa

SEQ ID NO: 135404 - DNA, 769 bp, Homo sapiens
aacaccagcctgatcaacaccaagaagaagctggagacagacatttcccaaatccagggagagatggaagacatcatccaggaagcccgcaatgcagaagagaaggccaagaaggccatcactgatgctgccatgatggctgaggagctgaagaaggaacaggacaccagcgcccatctggagcggatgaagaagaacctggaacagacggtgaaggacctgcagcatcgtctggatgaggctgagcagctggccctgaagggtgggaagaagcagatccagaaactggaggccagggttcgtgaacttgaaggtgaagttgaaagtgaacagaagcgcaatgttgaagctgtcaagggtctacgcaaacatgagagaaaagtgaaggaactcacttaccaaactgaggaagaccgcaagaatattctcaggctcccaggaccttggtggacaaactgcaagcaaaggtgaaatcctacaagagacaagctgaagaagcggaggaacaatccaacgtcaacctctccaaattccgcaggatccagcacgagctggaggaggccgattttacgggctgacattgctgagtcccaggtcaacaagctgagggtgaagagcagggaggttcacacaaaaatcataagtgaagagtaatttatctaactgctgaaaggtgaccaaagaaatgcacaaaatgtgaaaatctttgtcactccattttgtacttatgacttttggagataaaaaatttatctgccaaaaaaaaaaa

SEQ ID NO: 135405 - DNA, 5874 bp, Homo sapiens
tttcgtgctaccatcaataacctgcagccatgagttccgactctgagatggccatttttggggaggctgctcctttcctccgaaagtctgaaagggagcgaattgaagcccagaacaagccttttgatgccaagacatcagtctttgtggtggaccctaaggagtcctttgtgaaagcaacagtgcagagcagggaaggggggaaggtgacagctaagaccgaagctggagctactgtaacagtgaaagatgaccaagtcttccccatgaaccctcccaaatatgacaagatcgaggacatggccatgatgactcatctacacgagcctgctgtgctgtacaacctcaaagagcgctacgcagcctggatgatctacacctactcaggcttgttctgtgtcactgtcaacccctacaagtggttgccagtgtataatgcagaggtggtgacagcctaccgaggcaaaaagcgccaggaggccccaccccacatcttctccatctctgacaatgcctatcagttcatgctgactgatcgggagaatcagtctatcttgattactggagaatctggtgcagggaagactgtgaacacgaagcgtgtcatccagtactttgcaacaattgcagttactggagagaagaaaaaagaggaacctgcctctggcaaaatgcaggggacccttgaagatcaaatcatcagtgctaaccccctactggaagccttcggcaatgccaagaccgtgaggaatgacaactcctctcgctttggtaaattcatcaggatccattttggtgccacaggcaaactggcttctgcagatattgaaacatatctgctagagaagtcccgagttacttttcagctaaaggctgaaagaagctaccacatattttatcaaatcctgtccaataagaaaccagagctcattgaaatgcttctgatcaccaccaacccatatgacttcgcatttgtcagccaaggggaaattactgtgcccagcattgatgaccaggaagagctgatggccacagatagtgctgtggacatcctgggtttcactgctgatgaaaaggtggccatttacaagctcactggagccgtgatgcattatgggaacatgaaattcaagcaaaagcaaagggaagagcaggcagagccagatggcacggaagttgctgacaaagctgcttatctgacaagtctgaactctgctgacctgctcaaatctctctgctatcccagagtcaaggtcggcaatgagttcgtaaccaaaggccagactgtgcagcaggtgtacaacgcagtgggtgctctggccaaagccatctacgagaagatgttcctgtggatggtcacccgcatcaaccagcagctggacaccaagcagcccaggcagtacttcatcggggtcttggacattgctggctttgagatctttgatttcaacagcctggagcagctgtgcatcaacttcaccaacgagaaactgcaacagtttttcaaccaccacatgttcgtgctggagcaggaagagtacaagaaggaaggcatcgagtgggagttcattgacttcgggatggacctggctgcctgcatcgagctcatcgagaagcctatgggcatcttctccatcctagaagaggagtgcatgttccccaaggcaacagacacctccttcaagaacaagctgtatgaacaacatcttggaaaatccaacaacttccagaagcccaagcctgccaaaggcaagcctgaggctcacttctcactggtgcactatgccggcaccgtggactacaacatcgccggctggctggacaaaaacaaggaccccctgaatgagactgtggtggggctgtaccagaagtctgcaatgaagactctggctttcctcttctctggggcacaaactgctgaagcagagggtggtggtggaaagaaaggtggcaaaaagaagggttcttctttccagacagtgtcagctcttttcagggagaatttgaataagctgatgaccaacttgaggagcactcacccccactttgtgcggtgcatcatccccaatgaaactaaaactcctggtgccatggagcatgagcttgtcctgcatcagctgaggtgtaacggtgtgctggaaggcatccgcatctgcaggaaaggcttcccaagcagaatcctttatgcagacttcaaacagagatacaaggttctaaatgcgagtgctatcccagagggtcagttcattgacagcaagaaggcttctgagaaacttctagggtctattgaaattgaccacacccagtacaaattcggtcataccaaggttttcttcaaagctggcctgctgggaactctagaagaaatgcgagatgaaaagctagctcaactcatcacgcgcactcaagccatatgcagggggttcctgatgagagtggagttcagaaagatgatggagaggagagagtccatcttctgcattcagtacaacatccgtgctttcatgaatgtgaagcactggccctggatgaagctgtatttcaagatcaagcccctcctcaagagtgcagagacagagaaggagatggccaacatgaaggaagaatttgagaaaaccaaagaagagctggctaagacagaggcaaaaaggaaagaactagaagaaaagatggtgacgctaatgcaagagaaaaatgacttacaactccaagttcaagctgaagcagatgccttggctgatgcagaggaaagatgtgatcagttgattaaaaccaaaatccaacttgaggccaaaatcaaagaggtaactgaaagagctgaggatgaggaagagatcaatgctgagctgacagccaagaagaggaaactggaggatgaatgttcagagctcaagaaagacattgatgaccttgagctgacactggccaaggttgagaaggagaaacatgccacagagaacaaggtgaaaaacctcacagaagagatggcaggtctggatgaaaccattgctaagctgaccaaggagaagaaggctctccaggaggcccaccagcagaccctggatgacctgcagatggaggaggacaaagtcaacaccctgaccaaagctaaaaccaagctagaacagcaagtggacgatcttgaaggatctctggaacaagaaaagaaactttgcatggacttagaaagagccaagagaaaactggagggtgacctaaaattggcccaagaatccacaatggatacagaaaatgacaaacagcaacttaatgagaaactcaaaaagaaagagtttgaaatgagcaatctgcaaggcaagattgaagatgaacaagcccttgcaatgcagctacaaaagaagatcaaagaattacaggcccgcattgaggagctggaggaggaaatcgaggcagagcgggcctcccgggccaaagcagaaaagcagcgctctgacctctcccgggagctggaggagatcagtgagaggctggaagaagccggtggggccacttcagcccagattgagttgaacaagaagcgggaggctgagttccagaaaatgcgcagggacctggaagagtccaccctgcagcacgaagccacggcagctgctcttcggaagaagcacgcagatagtgtggctgagcttgggaagcagatcgacagccttcagcgggtcaagcagaagctggagaaggaaaagagtgagctgaagatggagatcaatgaccttgctagtaacatggagactgtctccaaagccaaggcaaactttgagaaaatgtgccgcaccctagaggaccagcttagtgaaataaaaacaaaggaagaagagcagcaacgcttaataaatgagttgtcagcccagaaggcacgtttacacacagaatcaggtgagttttcacgacagctagatgaaaaagatgctatggtttctcagctatcccgaggcaaacaagcatttacacaacagattgaagaattaaagaggcagctagaagaggagactaaggccaagagcactctggcccatgccctgcagtcagcccgccatgactgtgacctgctgcgggaacagtatgaggaggagcaggaagccaaggctgagctgcagaggggaatgtccaaggccaacagtgaggttgcccagtggaggaccaagtacgagacggacgccatccagcgcacagaggagctggaggaggccaagaagaagctagcccagcgtctgcaggatgcagaagaacatgtagaagctgtgaattccaaatgtgcttctcttgaaaagacaaagcagaggctacagaatgaagtagaggacctcatgattgatgtggaacgatctaatgctgcctgcatagctctcgataagaagcaaagaaactttgacaaggttctggcagaatggaaacagaagtatgaggaaactcaggctgaacttgaggcctcccagaaggagtcgcgttctctcagcactgagctgttcaaggtgaagaatgcctacgaggaatccctggatcatcttgaaactctaaagcgagagaataagaacttacaacaggagatttctgacctgacagagcaaattgcagagggtggaaagcatatccatgaactggagaaagtaaagaaacaacttgatcatgagaagagtgaactacagacttccctagaggaagcagaggcatctcttgagcatgaagaaggcaaaattcttcgcattcaacttgagctaaatcaggtgaaatctgagattgaccgaaaaattgctgaaaaagatgaagaactcgatcagctaaagaggaaccatctcagagttgtggagtcaatgcagagtacactggatgctgagatcaggagcagaaatgatgctctgaggatcaagaagaagatggagggagatcttaatgaaatggaaatccagctgaaccatgccaaccgccaggctgctgaggcactaaggaatcttagaaacacacaaggaatactgaaggacactcagctacatttggatgatgccatcagaggccaagatgaccttaaggaacaattggcaatggttgagcgcagagctaacctgatgcaggctgaagttgaagagctcagggcatccctggaacggactgagagaggcaggaaaatggcagagcaagagcttctggatgccagtgaacgtgtgcaacttctgcacactcagaacaccagcctgatcaacaccaagaagaagctggaaacagacatttcccaaatccagggagagatggaggacatcgtccaggaagcccgcaatgcagaggagaaggccaagaaggccatcactgatgctgccatgatggctgaggagctgaagaaggaacaggacaccagcgcccaaccatggagcggatgaagaagaacatggagcagacccgtgaaggatctgcagctccgtctggatgaggctgagcagctggccctgaagggtgggaagaagcagatccagaaacttggaggccagggtacgggaagcttggaaggaagaaggtttgagaattgagccaaaagcgtaatgcttaaggcttgtccaaaggtcttgcgccaacattgagaggccgagttgaaggaactcactttaccagaccggaaagaagattagaaagaatattctcaggctgcaggacttggtggacaaattgcaaaccaaagtcaaagcttacaagagacaagctgaagaggctgaggaacaatccaatgtcaaccttgccaagttccgcaagctccagcacgagctggaggaggccaaggaacgggctgacattgctgagtcccaagtcaacaagctgagagtgaagagtcgggaggttcacacaaaagtcataagtgaagagtaattc

SEQ ID NO: 135406 - DNA, 399 bp, Homo sapiens
taccctcgagcttggcacgaggagtacacagcagaaccagcggcggcggctaagcaaagactgtagtttcggcgacagcgacgacggctcctgtgatccgcccaattatcgcggccaacacataccagcaggtccagcaaactctggaggcccgagcagctgctgcagccacagtagttcctcccatggtgggtggccctccttttgtaggccctgttggctttggccctggtgatcggagtcacctggacagcccagaggctcgagaagccatgttcctgcggcgggcagctgtggccccccagagggcccctatcctgcgtccagccttcgtcccccacgtgctacagagagcagattccgctctcttctctgcagcagccggcccccgccctatgg

SEQ ID NO: 135407 - DNA, 1751 bp, Homo sapiens
tttcgtatcctcgggagcccacccggacgaagggggagagtagacagcagaaccagcggcggcggctaagcagagactgtagtagcggcgacagcgacgacggcagcgatggctggggcggggccagccccgggactcccgggtgcaggaggacccgtggtcccgggtcccggcgctgcgcatcccgggcaaaagcggcgaggaacgcttgaaggaaatggaggcggagatggccctgtttgagcaggaagttctgggggctccagtacctggaatcccaactgctgtgcctgcggtgcccactgtccccacggtccccacagtagaagcgatgcaggtcccagcggctcctgtgatccgcccaattatcgcgaccaacacataccaagcaggtccagcagactctggaaggccgagcaagctgctggaagccacagtaagttcctcccatggggggtggccctccttttgtaggccctgttggctttggccctggtgatcggagtcacctggacagcccagaggctcgagaagccatgttcctgcggcgggcagctgtggccccccagagggcccctatcctgcgtccagccttcgtcccccacgtgctacagagagcagattccgctctctcctctgcagcagccggcccccgccctatggccctacggccccctcaccaggccctcgtgggcccccctctgcctgggccccctggaccacccatgatgctgccaccaatggctcgggctccagggcccccgctgggctccatggctgcactgaggccccctctggaagagccagcagcaccccgagagctgggcctaggcctggggttgggcctgaaagagaaagaagaggcagtggtggcggcggcggctgggctggaggaggctagcgcggctgtggccgtgggggcaggaggtgccccagctggccttgcagtcattgggcccaagcctgccgctggccctggccatgccattgcccgagcctgagcccctgcccctcccgttggaggtcgtccggggcctcctgccccccgctgcgcattactgaactcctgtccctgcgtcctcggccccggccccctcgggccagagccacccccaggcctcatggctcttgaggtcccagagcccctgggtgaagacaagaagaaggggaagccaggagaaattgaacaccggtgcattgccacagcggccagggagcaagctgggaggaccccccaacctgctggaagtgggatgcagaatgactttcccgggtcttctgtggggatctggggcaatgaggtgaacgattgacatcttgggcacgcggcctcagcccgcttccccatcccttccttaaaggccaaggtgatccggtgacaaagcgcacaggcaagacccaagggctacgggcttcgtcagcttcaaggaccccaggcgactacgtgcgcccccatgcgtgagatgaatgggaagtatgtggtgctcgcgccccccatcaagcttcgcaagagcatgtggaaggaccggaatctggacgtgttccgcaagaagcagaaggaaaagaagaagctgggcctgagatagggtctgtggccaggcacccgcttcccacctggccgggcgctggctcctcccccagttctctttggaaaacccccagctgtccacccatccccatgccccaaaaccagtttcaataaaaaatacgttcatttccaaaaaaaaaaaaaaaaaaaaagggcggccgct

SEQ ID NO: 135408 - DNA, 1122 bp, Homo sapiens
atgcccgggggaaaaattggatttttaattgagaagggagcaacggaacaaagctcgacagggaatgactttgacgagctgagagaagaaggcggcagaagatcaaattactctgagctacaggaggacattcaaaccaaaggcaaagaagttgaaaactttgaaaaaaatttagaagaatgtgtaactactatttccaatacagagaagtgcgtaaaggagctgatggagctgaaaaccaaggctcgagaactacgtgaagaatgcagaagcttcaggagccaatgcaatcaactggaagaaagggtaccagcgatgaaagatgaaatgaatgaaatgaagcgagaagggaagtttagagaaaaaagaataaaaagaaacgagcaaagcctccaagaaatatgggactatgtgaaaagaccaaatctacctctgattggtgtacctgaaagcgaccgggagaatggaaccaaattggaaaacactctgcgggatattatccaggagaacttccccagtctaacaaggcgagggcaaccattcagaattatggagaatacagagaacgcccccaaagataaccttctcgagaaagaacaacttccaagacacaataattgtttagaattgacccaagaagaaccagcgtgggatctgcagtttgatctcttggaccttaatgatatctcctctgccttaaaacaccacgaggagaaaaacttgatttccctcctccctcagcgcggggccgattacttaagtttccggagccactttcagaagaactttgtctgtgtggagaactgctctttgcaagagcgaacagtgacagggactgttaaagtcaaaaatgtgagttttgagaagaaagttcagatccgtatcactttcgattcttggaaaaactacactgacgtagactgtgtctatatgaaaaatgtgtatggtggcacagatagtgataccttctcatttgccattggcttaccccctgtcattccaactgagcagaaaattgagttctgcatttcttaccatgctaatggggcaaatctttttgggacaacaaatgatggggcaggaaatataaaaattgtgtcattgttcaatgggaagccctga

SEQ ID NO: 135409 - DNA, 1593 bp, Homo sapiens
  misc_feature (1)...(1593): n = a,t,c or g
cacgaggccgcgggggcaaggcctggagctgtggttcgaatttgtgcaggcagcgggtgctggcttttagggtccgccgcctctctgcctaatgagctgcaccagaatgatccaggttttagatccacgtcctttgacaagttcggtcatgcccgtggatgtggccatgaggctttgcttggcacattcaccacctgtgaagagtttcctgggcccgtacgatgaatttcaacgacgacattttgtgaataaattaaagcccctgaaatcatgtctcaatataaaacacaaagccaaatcacagaatgactggaagtgctcacacaaccaagccaagaagcgcgttgttgtttgctgactccaagggcctctctctcactgcgatccatgtcttctccgacctaccagaacaaccagcgtgggatctgcagtttgatctcttggaccttaatgatatctcctctggccttaaaacaccacggaggagaaaaacttgattttagatttcccttcagccttcaaccgattacttaatgttttcggagccactttcagaaggaactttgtctgtctgggagaactgctcgttgcaaggagcgaacagtgacagggactgtttaaagtcaaaaatgtggagttttgaggaagaaagtttcagatccgttatcacttttcggattcttgggaaaaacttacacttgacgtagactgtgtctatatggaaaatgtgtatgggtgggcacaggtagtgataccttctcatttgccattgacttaccccctgtcattccaactgagcagaaaattgagttctgcatttcttaccatgctaatgggcaagtcttttgggacaacaatgatggtcaagaattattggattgttcatgttcaatggaagcctgatggggtgcagacacagatggcaccccagggactgtgcattccaccagacgtctcctaagacagagttagagtcaacaatctttggcagtccgaggctggctagtgggctcttcccagagtggcagagctgggggagaatggagaacttgcgcctcttatgcgatgaattaagcaacaatgtaactggtcttgacttgtcatattcccccatgcaatcctaggtctgtattgctcaattttaggaagcctttgctactccatcagtaggtttagatttgagcttttgagacctgggctatggaaaagaaagacacttgagaatttagtgctggggcctgtacagatgatgctacccaatctggctttgaaggatcaagtaacaggttgaaaactatttttataaaggtcctactttcttcagttcccttcttccttccctctcaatccactagcttttcatgttggggcaaggaaaagttggagggaagggatgggctgatgggtgatgggaaagctgtgttaaatggtatgagggaatgtgtgaaaagtatacacaaaggggctctgaagctcaagtcagagggagttgggaggtctgatccattgttggtgggaaaaccgtaagggttatttttgtggttttttaaggttgggttttaccattcctttccccggggggaatttnttttc

SEQ ID NO: 135410 - DNA, 273 bp, Homo sapiens
gccggggtggcagtggcggcagtggcagtggtggggagaagcccagcggccctgttccccgcagccgcctggacaccacaagagccccaggtctgcagtgtgcccctcagttgagtgggcagggccgggggtggtccagccctcgcccggcccccaccccagctgcccttgctattgtctgtgcttttgaagagtgttaaattatggaagcccctcaggttcctccctgtcccgcaggacctcttatttatactaaagttccctgttttctca

SEQ ID NO: 135411 - DNA, 1062 bp, Homo sapiens
atgagcgtccggaagctgatgggagctctcaagggaatggaggccctggcaggggaatctgcaggtgtgattcaggacatctctaaaggatgtgtggcatacaccattaactccttttctcccacccctcaagccattgacctcaacaagccaattgacaagcggatctacaagggcacccacccacctgccacgatttcaaccagttcactgctgccaccgagaccatctgctgctgtttgggagcttctctccgaggaggacctgggcctggtgtggacctgctgtgtgagcggggccatgtccaacggccttcttggggactttgcggttgatcgacaagaccaaggtgacatatctgagtggctgcctgagtcggagagcctgttcctggcatcacacgccagtggcacctgtacctgtacaacgtcagccacccctgcgcctcggccccgccccatacagcctgctgaagcagggcgagggcttctctgtctatgctgccaagacaaggcaccccgcaacccgctggccaagtgggcggtgggagcggcgggaccggggggcaagaaggagcacaagcgctaccacagcctgggcaacatcagccggggtggagtggcggcagtggcagtggtggggagaagcccagcggccctgttcccccagccgcctggaccccgccaaggtgctgggcactgcgctgtgcccgcgctccacgaggtgcccctgctggagccccttgtgtgcaagaagatcgcccagagcggctcacagtcctcctgttcctggaggactgcatcatcactgcctccaggagggcctcatctgcacctgggcccggccgggcaaggcgggctctcctcccaaccaggcaactccccgagtggcacagtgatcaacgtattaacaagactaaccatgatggtggactgctccagtccccccacctgcacaaaatttgggggccccccagatggcccggacacgggcgatgtaatagcccttgtggcctcagccttgtccccacccactgccaagtacaatgacctcttcctctga

SEQ ID NO: 135412 - DNA, 677 bp, Homo sapiens
caacgtcccatttgacctaccaagcccattggacaacgggtctcaaaggggcaccagccccacccgccacggatttcacccagttccattgctgcccacgagaccatttcgcggctggtgggcttctcagcgggtcaagtgccagtacctggatctcatcaaaaagggaccccagcaagctgttcaatgaggagcggttgatcgacaagaccaaggtgacatatctgaagtggctgcctgagtcggagagcctgttcctggcatcacacgccagtggccacctgtacctgtacaacgtcagccacccctgcgcctcggccccgccccagtacagcctgctgaagcagggcgagggcttctctgtctatgctgccaagtacaatgacctcttcctctgaaacatcagtgttaccctcatccctgtccccagcatgtgactggtcactcctggggagacactccccgcccctgccacaagagccccaggtctgcagtgtgcccctcagttgagtgggcagggccgggggtggtccagccctcgcccggcccccaccccagctgcccttgctattgtctgtgcttttgaagagtgttaaattatggaagcccctcaggttcctccctgtcccgcaggacctcttatttatactaaagttccctgttttctcagcgaaaaa

SEQ ID NO: 135413 - DNA, 6303 bp, Homo sapiens
atgagcgtccggaagctgatgggagctctcaagggaatggaggccctggcaggggaatctgcaggtgtgattcaggacatctctaaaggatgtgtggcatacaccattaactccttttctcccacccctcaagtccattgacctcaacaagccaattgacaagcggatctacaagggcacccagcccacctgccacgatttcaaccagttcactgctgccaccgagaccatctcgctgctgtttgggagcttctctccgaggaggacctgggcctggtgtggacctgctgtgtgagcggggccatgtccaacggccttcttggggactttgcggttgatcgacaagaccaaggtgacatatctgaagtggctgcctgagtcggagagcctgttcctggcatcacacgccagtggccacctgtacctgtacaacgtcagccacccctgcgcctcggccccgccccagtacagcctgctgaagcaggtcatggggcttctctttctatgctgccaagagcaaggcaccccgcaacccgctggccaagtgggcggtgggtgaggggcccctcaacgagttcgccttctcgcccgatggccggcacctggcctgtgtgagccaggatggctgcctgcgcgtcttccacttcgactccatgctcctgcgtgggctcatgaagagctactttgggggcctgctgtgtgtgtgctggagccctgacggccgctacgtggtgacgggtggcgaagatgacctggtcaccgtgtggtccttcaccgagggccgcgtggtggctcgaggccatggccacaagtcctgggtcaacgctgtggcctttgactctctctacaccacaagggcagaggaggcggcgacagcagccggtgctgatggggagcggagcggcgaagaggaggaggaggagcccgaggctgcgggcacaggctcggccgggggcgccccactctctccactgcccaaggctggctccattacttaccgctttggctcggcgggccaggacacgcagttctgcctgtgggacctcactgaagacgtgctctacccgcacccgcccctggcccgcacccgcaccctccctggcacacctggcaccacgccaccggccgccagcagctcgaggggtggcgagcctggcccaggccccctgcctcgctcgctgtcccgctccaacagtctcccgcacccagctggcgggggcaaggcgggcggcccgggtgtggcggcagagcctggcacaccattcagcattggccgcttcgccacgctcacactgcaggagcggcgggaccggggggcagagaaggagcacaagcgctaccacagcctgggcaacatcagccggggtggcagtggcggcagtggcagtggtggggagaagcccagcggccctgttccccgcagccgcctggaccccgccaaggtgctgggcactgcgctgtgcccgcgcatccacgaggtgcccctgctggagccccttgtgtgcaagaagatcgcccaggagcggctcacagtcctcctgttcctggaggactgcatcatcactgcctgccaggagggcctcatctgcacctggccgcggccgggcaaggcgttcacagacgaggagaccgaggcccagacaggggaaggaagttggcccaggtcacccagcaagtcagtggtagagggcatctcctcccaaccaggcaactccccgagtggcacagtggtgtgaagccatggatatcgggcccccccaaccccatgcccccagcctcctagccataaccctccctgctgacctcacagatcaacgtattaacaagactaacccatgatggatggactgctccaagtccccccacctgcacaaaatttgggggccccccaagactgggcccggacaccggaaattgtaatagcccttgtgggcctcagccgttgtcccccacccacttgccaagtacaatggacctcttcctcttgaaacatcagtgtttaccctcatcccttgtccccaagcatgttgactgggtcactcctgggggagacactccccggcccctggccacaagagccccaggtctgcagtgtgcccctcagttgagtgggcagggccgcgggtggtccagccctcgcccggcccccaccccaggttgcccttgctattgtctgtggttttggaagagtgttaaaattatgggaaggcccttcaggttcctccctgttcccgcaggacctgtttattttatactaaagttccctgtttttttcaggggggtttgttccccttcggaggagatggatgtaggaggacctgtgtgtgtaatttgttgggtttaagggagttccgtttttccccagaggaggagtgcaggcctgctcccagcccagcgcctcccaccccttttcatagcaggaaaagccggagcccagggagggaacggacctgcgagtcacacaactggtgacccacaccaagcggctgggagcagggaccctcttggggagaagagcatccttgcccgcagccagggcccctcatcaaagtcctcggtgttttttaaattatcagaactgcccaggaccacgttttccaaggccctgcccagctgggactcctcggtccttgcctcctagtttctcaggcctggccctctcaaggcccaggcacccccaggccggtttgaggcccccgacttcccactttggagaaccggtccaccctggaaaagaagagctcagattcctctgtgctctcggagccgcagggaggtgtgtcttcccgcgccaccctccaccccccgaaatgtttctgtttctaatcccagcctgggcaggaatgtggctccccggccaggggccaaggagctattttggggtctcgtttgcccagggagggcttggctccaccactttcctcccccagcctttgggcagcaggtcacccctgttcaggctctgagggtgccccctcctggtcctgtcctcaccaccccttccccacctcctgggaaaaaaaaaaaaaaaaaaaaaaaaaagctggtataaagcagagagcctgagggctaaatttaactgtccgagtcggaatccatctctgagtcacccaagaagctgccctggcctcccgtccccttcccaggcctcaacccctttctcccacccagccccaacccccagccctcaccccctagcccccagttctggagcttgtcgggagcaagggggtggttgctactgggtcactcagcctcaattggccctgttcagcaatgggcaggttcttcttgaaattcatcacacctgtggcttcctctgtgctctacctttttattggggtgacagtgtgacagctgagattctccatgcattccccctactctagcactgaagggttctgaagggccctggaaggagggagcttggggggctggcttgtgaggggttaaggctgggaggcgggaggggggctggaccaaggggtggggagaaggggaggaggcctcggccggccgcagagagaagtggccagagaggcccaggggacagccagggacaggcagacatgcagccagggctccagggcctggacaggggctgccaggccctgtgacaggaggaccccgagcccccggcccggggaggggccatggtgctgcctgtccaacatgtcagccgaggtgcggctgaggcggctccagcagctggtgttggacccgggcttcctggggctggagcccctgctcgaccttctcctgggcgtccaccaggagctgggcgcctccgaactggcccaggacaagtacgtggccgacttcttgcagtgggcggagcccatcgtggtgaggcttaaggaggtccgactgcagagggacgacttcgagattctgaaggtgatcggacgcggggcgttcagcgaggtagcggtagtgaagatgaagcagacgggccaggtgtatgccatgaagatcatgaacaagtgggacatgctgaagaggggcgaggtgtcgtgcttccgtgaggagagggacgtgttggtgaatggggaccggcggtggatcacgcagctgcacttcgccttccaggatgagaactacctgtacctggtcatggagtattacgtgggcggggacctgctgacactgctgagcaagtttggggagcggattccggccgagatggcgcgcttctacctggcggagattgtcatggccatagactcggtgcaccggcttggctacgtgcacagggacatcaaacccgacaacatcctgctggaccgctgtggccacatccgcctggccgacttcggctcttgcctcaagctgcgggcagatggaacggtgcggtcgctggtggctgtgggcaccccagactacctgtcccccgagatcctgcaggctgtgggcggtgggcctgggacaggcagctacgggcccgagtgtgactggtgggcgctgggtgtattcgcctatgaaatgttctatgggcagacgcccttctacgcggattccacggcggagacctatggcaagatcgtccactacaaggagcacctctctctgccgctggtggacgaaggggtccctgaggaggctcgagacttcattcagcggttgctgtgtcccccggagacacggctgggccggggtggagcaggcgacttccggacacatcccttcttctttggcctcgactgggatggtctccgggacagcgtgcccccctttacaccggatttcgaaggtgccaccgacacatgcaacttcgacttggtggaggacgggctcactgccatggtgagcgggggcggggagacactgtcggacattcgggaaggtgcgccgctaggggtccacctgccttttgtgggctactcctactcctgcatggccctcagggacagtgaggtcccaggccccacacccatggaagtggaggccgagcagctgcttgagccacacgtgcaagcgcccagcctggagccctcggtgtccccacaggatgaaacagctgaagtggcagttccagcggctgtccctgcggcagaggctgaggccgaggtgacgctgcgggagctccaggaagccctggaggaggaggtgctcacccggcagagcctgagccgggagatggaggccatccgcacggacaaccagaacttcgccagtcaactacgcgaggcagaggctcggaaccgggacctagaggcacacgtccggcagttgcaggagcggatggagttgctgcaggcagagggagccacagctgtcacgggggtccccagtccccgggccacggatccaccttcccatctagatggccccccggccgtggctgtgggccagtgcccgctggtggggccaggccccatgcaccgccgccacctgctgctccctgccagggtccctaggcctggcctatcggaggcgctttccctgctcctgttcgccgttgttctgtctcgtgccgccgccctgggctgcattgggttggtggcccacgccggccaactcaccgcagtctggcgccgcccaggagccgcccgcgctccctgaaccctagaactgtcttcgactccggggccccgttggaagactgagtgcccggggcacggcacagaagccgcgcccaccgcctgccagttcacaaccgctccgagcgtgggtctccgcccagctccagtcctgtgtaccgggcccgccccctagcggccggggagggaggggccgggtccgcggccggcgaacggggctcgaagggtccttgtagccgggaatgctgctgctgctgctgctgctgctgctgctgctggggggatcacagaccatttctttctttcggccaggctgaggccctgacgtggatgggcaaactgcaggcctgggaaggcagcaagccgggccgtccgtgttccatcctccacgcacccccacctatcgttggttcgcaaagtgcaaagctttcttgtgcatgacgccctgctctggggagcgtctggcgcgatctctgcctgcttactcgggaaatttgcttttgccaaacccgctttttcggggatcccgcgcccccctcctcacttgcgctgctctcggagccccagccggctccgcccgcttcggcggtttggatatttattgacctcgtcctccgactcgctgacaggctacaggacccccaacaaccccaatccacgttttggatgcactgagaccccgacattcctcggtatttattgtctgtccccacctaggacccccacccccgaccctcgcgaataaaaggccctccatctgccc

SEQ ID NO: 135414 - DNA, 614 bp, Homo sapiens
cttaatgcagaatgggatgcagccatggaggaccttacacggttaaaagagaccatagataataattctgtgagttctccacttcagtctcttcagcagagaacatggctcattcactggtctctgtttgttttcttcaatcaccccaaaggtcgcgataatattattgacctcttcctttatcagccacacatgttggcagataaattgaacatgactccagaagaagctgaaaggtggattgtaaatttgattagaaatgcaagactggatgccaagattgattctaaattaggtcatgtggttatgggtaacaatgcagtctcaccctatcagcaagtgattgaaaagaccaaaagcctttcctttagaagccagatgttggccatgaatattgagaagaaacttaatcagaatagcaggtcagaggctcctaactgggcaactcaagattctggcttctactgaagaaccataaagaaaagatgaaaaaaaaaactatcaaagaaagatgaaataataaaactattatataaagggtgacttacattttggaaacaacatattacgtataaattttgaagaattggaataaaattgattcattttaaaaa

SEQ ID NO: 135415 - DNA, 909 bp, Homo sapiens; identical to SEQ ID NO: 114586

SEQ ID NO: 135416 - DNA, 3733 bp, Homo sapiens
gatattggaaagaaaggcccacccagaaggtgataccaagagccacggaaaatcatggactcaaaagctacctccagaaaacaaaactgagtattgatgaagcagctttcctactcccagacaccaatctcaagtctgagcttctggaacttctgacccactggcttcaagttggggttcccatgaccccctctttgggttcgattaatttgctgggatggctcacagaactcagggaaacacatacgtacatttgctggtttattgtaaaggagactacaagggatacagatgaagagatgtgtaggacagagccagctctggcctgctctatctctcattactgtgatgacggctgtatccagatgctaaacactccagagacactccaatgcagtgctaaagactcaaaacacttcatccccaaagaatgtagcattccaggagaaaacaggcctccttctgacactggtaaaactgtgaagtttctttccctgaatattttcaatctgcagttggctgaatccacagatgcagaacagagagctaactgcattttgcggtgcttcttaactgagacgacgctaaactaccagaagatccttagtgtccgtccaggaaccaaactcgcgaccgcctcgcacgtgtcaggcctaggactacagacaccacctttcggccttgctcagcacctcatccgcccccacgccttccttgcgcccaaagaccccctcacctcctttacagagagaaattcaagaagcggaaagactagatgccgatccaaaaagtgcgcgatgcgagtagtcaagtcgtactccgccatcttgccaaagaaaagggagtctgtgctcactaaaactttattggtagcgccgacaaacgaacagacagatcctgtactgcgcatgtgctgtggtaaaactggcctaaagaaaggggcggggtttaccctggagagcagaggacaacgacgcatgcgcgcgggttgtcccaccctttgcgttagggcgcgagtgacggaaacagatccctctatttgtagtgaggtcacgttttcctggatgatcttgatgcttatggatgtttgtcagtgtctgggcattgaagagtttggcatttattgtagtcttcgcagtctggacctgtttgtgcccatctttcttgagaaggttttccaggtatttgaagggacttcaagcccaataatgctgtggtttttgcagactcatagaggtaccaccttggtggccttggataagatccagaagaattctctggattatcaggcagaaactcttgttcttttcccttactttctcccaaacaaatggaatctctctgtctttgctgagccacctggaactggggatgtggtgatgcaagcacccctgtggccaccaccactgggactgtactgggccctggaacactatgatcagcatgtggcaaagccagccaggcaaaggagcctctccctctggccaccaccaccaacagcccacaaggggtttttgcaaggccactgccaatgttcactcaaaacccaaaggctcttcagtcagcttatggcgaatgctgccaggcctgagactcaggcttcagggcagtggactcctttcagcccagggcagatccagaaatgctctccaagatccagaaatgctctcgggaccccaagagcctgcttgttgctctaccctactgtggccgagctgggtagcactgagttcaatgtaaagccttccatttgctgcactctcccttaccaaggtgcacagtcccccagtctccacaccctacaactgcgggggaatggggttggggggcagcatcagcaattcaagactgtctctctggatcccttcaatgcctcttttagagacatgaagctaaaactaggtaaatcagggatttcttcttggtttgtatccattgctgctgctgtgggggatgaaggtttggttcccaggtcaatggagttatattcccagaaagcttatgactgcctctgctgtgtcatgcaggttgtcaggaaagtaggggaaagctggcagtcacagacctcgcccagctcccacacaacccaaaaggccaatcttacttccaccctgccccccacaacagcactgagtgtgtttccagggagtggataccaggagtggggcactgctgtaaagatacttgaaagtatggaagcgactttggagcaggacaacaagacgaggttggaacagtttggagggttcagaagaaaagaagacagaaagatgtgggaaagtttggaacttcctagagacttgtggaatgattttgaccaaaatgctgatagtgatatggacaatgaagtccaggctgaggtggtctcagatggagataaggaacttgttagaaactggagtaaagtgtggaagggaaatgtggggctggagccccgatacagagtccccactggggcactgactagcagagttgtgagaagaggtccaccatccttcagacctcagaaatgtagatccactgacagcttgcaccatgaacctggaaaagctgcaggcactcaatgccagcctgtgaaggatctgcccaaggctgtgggagcccactccttgcatcagccagccctggattttaggcaggaatatttaaatcccttttccaaaaatgcaaaattccagtacgaatgtgggaattattcaggagcagcagaaaatttttatttttttaaagggttggttccagcaacagatagaaatgctttaagttcactctggggaaagctggcctctgaaatcttaatgcagaattgggatgcagccatggaagaccttacacggttaaaagagaccatagataataatgatgaaaaacctagcttcacacatgtagttggaaaagaaagatatcttaatgcaattcagacaatgtgtccacaattctttcgctattttgacttacagcagttcataacaaacaagggattgttcgaaaacgtcggccaagggtctaaaagatctagttaagttttatcaaacaggagttcttacacatataaaagacccaatttacagaatttgttggaatgtttaatatgttaactttgactttgatgggggctccagaaaaagctgaggggaatgtgaaccagggcttgtgaaatgacttcttccttggtggctagtcctgagggtttcaatgaaaaatgccccgtctcttcatatttgagacttttctgtcgcatcccacccagtgtatcagccattaaccatgttggcagattaaattgaacatgactccagaagaagctgaaagggtggattggtaaaatttgattaggaaatggcaagcctggatgccccaagatttgattcctaaattagggtcatgtgggttatggggtaacaatgcagttctcaccccttcagcaagtgattgaaaagacccaaaagcctttcctttagaagcccagatgttggcccatgaataatgagaaagaacctaaatcagaatagcaggtcagaaggctccctaacgggggcaactccaagattctgggcttctactgaagaaccataaagaaaagatgaaaaaaaaaaactatcaaagaaagatgaaataatagatctattatataaagcggtcactcacacttttggaaacacacatattacggtataaattttgaagaattggaataaaattgattcattttaaaaaaaaaaaaaaaaaggtt

SEQ ID NO: 135417 - DNA, 2267 bp, Homo sapiens
  misc_feature (1)...(2267): n = a,t,c or g
gcggcctttcatttccgcttccggtgcgggccgcgcgcgagcgcagcggtgggaggcggcgaccagccggttgaggccccaggcttggcctcaccacaatgtggcacgaggctcggaagcttgggcggaggcttcggggcttgttgttcgactccaggaagagggcggagcggagacgggagtattatgaaaagatcaagaaggacccagcccagttcctgcaggtacatggccgagcttgcaaggtgcacctnggattctgcagtcgccctggccgctgagagccctgttaatatgatgccctggcagggggacaccaacaacatgattgaccgattcgatgtccgtgcccacctgggaccacatccccgactacaccccccctcttgctcaccaccatttttcccagaaccaggagtcggacgaacgggaagtgtaactacgagcgctacagaggcctggtgcagaacgactttgccggcatctcagaggagcagtgcctgtaccagatctacattgatgagttgtacggaggcctccagagacccagcgaagatgagaagaagaagctggcagagaagaaggcttccatcggttatacctacgaggacagcacggtggccgaggtagagaaggcggcagaaaagccagaggaggaggagtcagcggccgaggaggagagcaactcggacgaagatgaggtcatccccgacatcgacgtggaggtggacgtggatgaattgaaccaggagcaggtggcagatctcaacaaacaggccacgacttatggcatggccgacggtgacttcgtcaggatgctccggaaagacaaggaggaggcagaggccatcaagcatgccaaggctcttgaggaggagaaggccatgtactcgggacgccgctctcgacgccagcggagagagtttcgggagaagcggctgaggggtcgcaagatcagcccacccagctatgcccgccgagacagccccacctatgacccctataagcggtcaccctcggagtccagctcagagtcccgctcccgctcccgctccccgaccccgggccgcgaggagaagatcacgttcatcaccagttttgggggcagcgatgaggaggcagccgcagccgctgctgccgcagcagcatcaggagtcaccacagggaagccccccgcacctccccagcctggcggccccgccccgggacgtaatgccagcgcccgccgccgctcctcctcctcctcctcctcctcttctgcctcgaggacctccagctcccgctccagctctcgctccagctcccgctctcgccgtggtgggggctactaccgttccggccgccacgcccgctcccggtcccgctcctggtcccgctcccgctcccgctcccggcgctattcccggtcccgtagccgtggccggcggcactcaggtgggggctcccgagacggacaccggtactcccgctcgcccgcccggcgtggtggttacgggccccggcgcagaagcaggagccgctcccactcaggggaccgctacaggcggggcggccggggcctcaggcaccacagcagtagccgcagccgcagcagctggtccctcagcccgtcccgcagtcgcagcctgactcgcagccgcagccatagccccagccccagccagagccgcagccgcagccgcagccgcagccagagcccctcgccatcacccgcaagagagaagctgaccaggccggccgcgtcccctgctgtgggcgagaagctgaaaaagaccgaacctgccggctggtaaagagacaggagctgccaaagtcacccaagctgacgcctcaggagaagctgaaactgaggatgcagaagccgctgaaacaggcagttcaaggcggataagaaggcggcacaaagaaaaagatgatcccaggcagagcatgagcggcaggagcggaaagacgaggcctcgagccatggcccgcaagatcggcatgaaggagcgggaacgcccgagagaaggagagagaagagtgggaacgccagtacagccggcagagccgctcaccccttcccccgattacagtcgagaatacagctcttctcgaaggcgctcaaggtcccgatcccgaagcccccattaccgacattaggcagaagagtggggggtggggaggacaagggggtgggtaaggggctcaagctgtgatgctgctggttttatctctagtgaaataaagtcaaaagttatttaattcccgtcaaaaaaaaaaaaaaa

SEQ ID NO: 135418 - DNA, 612 bp, Homo sapiens
atgactatcatcatcatggggtttatctctgcagaattggtggatccaaatatttttatccagcccatcacagaagaacgtgcttctaggactttgtatcgcattgaacttctaaggaaagtacgggaacaggcccttcgacatccacagttgtttgaacgcttgaagctttgccatccaaatccagatttaccagtctggctcctagatgctaaaggtattattctagaggagatgaaagttaaaagtgaaaaccttaaagaggagcctcagtcttctgaagaagaatctatgtcttctgtggaaaccaggacactaataaaatctgagcctgcctggagcagggtgtgctttgtggctgtgtcactgccaattattaatgtgaacatcatcatcggtggctgttgctgctgcctggtgttgcaagctaagctcagccgggctttgcacggctccgcaatgatctctataattaacttagatgattcactgctgtacacccattgtgctcttttcaaggccggcgacatccatttacatgaggagctaaaaacaagtattgccttctcgtggaggagtttccaagtgctcacccacccgttctctccctaa

SEQ ID NO: 135419 - DNA, 1230 bp, Homo sapiens
atggggagaaaccagagcagaaaagctgaaaattctaaaaatcagagtgcctcttttcctccaaacgaatgcagctcctcaccagaaatggaacaaagctggacagagaatgactttgacgagttgagagaagaagccttcagacgattgcttgtgtcgggagttgcggacagccatagccccgcgggcctggcgctgacggaccctggagcggtgtctgacagaggtcggcaaagccaccggctggccccagtgcatcctcacatatgcgcgcagatccctggctccggtgctactggggtcgcacctggacgcgggttgcagacccctggcaaattgtggagctgggggaagggatttcttccagaaagcatgtatgaacgtattctcactggtcccgttgtgagagaggaagtaagcaggcgggggagacggcctaaaagtggaattgcaaaggccacagcagcagcagctgctgcatctgccaccagtgtttcaggcaatcctttgttagccaatggactacttccaggtgtggatctcacaactcttcaggccttacaacaaaacctacaaaacttgcagtcactgcaagtaactgctgggttgatgggaatgcctaccggccttccttctggaggagaagctaaaaacatggctgctatgttccccatgctgctgtcaggaatggctggattaccaaatctgttgggcatgggaggactcctgacaaagcctacggaatctgggacagaagacaaaaagggaagtgactctaaggagtcagaaggaaaaacagaaaggacagagagccaaagttcagagaatggtggagaaaactctgtgtcaagttctccttccacatcctctactgctgcattaaatacagctgcagctgccaacccattagctcttaacccactattactatctaatatactttatccagggatgcttctcactccaggccttaatcttcatattccaactttgtcccagtccaatacttttgatgtacaaaacaaaaacagtgacttaggctcgtctaagtctgtagaagtaaaagaagaagattccagaattaaagatcaggaagacaaaggaggaactgaaccaagtcctctcaatgaaaacagcacagatgagggttcagagaaagctgatgcttcatctggatctgatagtacatcgtcgtcatctgaggattcagattcttgtaatgaaaactga

SEQ ID NO: 135420 - DNA, 1629 bp, Homo sapiens
atggctgaaaaaaaggcaataatggaacttaaactcagtcttctgactccgagctccaggattttgccacaaatcagcagctgccagggaccaaaaccagaggcagagaatcaagggaagctgatgcttgagaaagatgccccatatttatcctgtggcagtgaaaaattggtggatccaaatatttttatccagcccatcacagaagaacgtgcttctaggactttgtatcgcattgaacttctaaggaaagtacgggaacaggcccttcgacatccacagttgtttgaacgcttgaagctttgccatccaaatccagatttaccagtctggtgggaatgtggccctcatgatagggatttgcttattggtgctgccaaacacggggtgagccgaacagactatcacattcttcgtgatcctgaactctcatttatggcagctcagaggaactacagtcaaagtaagatggctcattcaaggacttctaccccacttctacagcaatatcaagtagcactttctgcttctcctcttacctctctacctaggctcctagatgctaaaggtattattctagaggagatgaaagttaaaagtgaaaaccttaaagaggagcctcagtcttctgaagaagaatctatgtcttctgtggaaaccaggacactaataaaatctgagcctgtaagtccaaagaatggtgttttaccacaggctactggagaccagaaatctggtggaaaatgtgaaacagacagacgcatggttgcagccagaacagaacccctaactccaaacccagcttctaagaaaccaagagtccacaaaaggggatcagaatctagttctgattctgactcagattctgagagatcatcttgttcttccagatcatcttcttcctcatcatcctcttcttgctcccactctcgatcaggctctagttcttcttcatcttcatcttgttcttcagcatcttcttcatcctcttcctccacctcttcctcctcctcctcctcttcatcttcatcagaagaaagtgacagtgatgaagaagaagcccaaaaacgagaaagtactactcacatgaaagcctatgatgaagaaagcgtcgcgtcactgagcactacccaggatgagactcaggatagttttcagatgaacaatgggacaccagagtctgcttatatcttacaaggtggatatatgctggcagcctcgtattggccaaaggatcgtgtgatgatcaataggttggacagtatttgtcaaacagttctgaaaggaaagtggccttcagctagaagaagttatgatgctaacacagtggcttctttctataccacaaaactgctggacagccctggagcagctacagaatacagcgagcccagtgtacccactcccccaggtgccggtgttaaagaagaacatgatcagtcaacacagatgtcaaaggtgaagaagcatgtacgagaaaaggagtttacagtgaaaatcaaagacgaaggtggtttgaagttgacatttcagaagcaagggcttgctcagaaaagaccatttgatggtgaagacggtgctctggggcagcagcagtacctcactcggcttcgagagcttcaaaattaa

SEQ ID NO: 135421 - DNA, 7032 bp, Homo sapiens
  misc_feature (1)...(7032): n = a,t,c or g
aaaaaggcagaattagatatagaggccatcaggggctgggacagttcggttattgacactccaagaattaggaagcagacatgaccttttagtgccacacaagatgaattggctgaattatctgaagctgaaagtgaaggagatgaaaagcccaaactccggagaccctgtgaccgttccaatggctatggaagaactgaatgctttaaagttgagaaaaacctgctagtttatgggtggggccgatggagagagattctatctcatggccgtttcaaaaggcagctaaatgaacacgatgtatagataatatgccgagctctcttagcatattgcctttgttactaccgaggagatgagaagatctaagggttcatatggaatcgcattactccaactgaagatggacagacacgagagctacagaatcatctaggcctatcagctcctgtacccaggggtcgaaaagggaagaaagtaaaaactcaaacaagctcatttgatatacaaaaagcagaatggcttcgaaaatataatcccgagcagctccttcaagatgaaggctacaaaaaacatataaaacaccactgtaataaggttttgcttcgtgtgagaatgctgtattatctaaagcaagaagttattggaaatgagtgtcagaaagtatttgatggagttgatgcaagtgacattgatgtttgggtaccagaaccagaccactcagaagttcctgctgagtggtgggattttgatgctgataagtcactccttattggagtttttaaacatggatatgaaaaatataacactattcgagcagacccagcattatgcttcttggaaagagtgggaaaacctgatgagaaagcagttgctgctgaacagagagcgaatgattatatggatggggatgtggaagatccagaatacaaacctgccccagccatctttaaagatgatatagaggatgatgtttcctcaccaggagatcttgttatagcagatggagatggtcaactgatggagggtgataaagtatattggcctactcaatcagctttaaccacacgtttgaggcgtctcatcactgcataccagcgtactaataaaaacagacaaattcaacagatacaaccgactttctcggtgcctaccagtgtaatgcagcctatttatgaggaagccactcttaatcctaaaatggcagccaagatagaaagacagcaaagatggacaagaagagaagaagctgacttttatagggttgtatctacatttggagtggtttttgaccctgacagaggccaatttgattggacaaaatttagagctatggctaggctacataagaaaactgatgatatgtttggaaaaatatttgtacgcattcatgtccatgtgtcggagggtttgtccgtcttccttccaaaagaagaattggtggatccaaatatttttatccagcccatcacagaagaacggtgcttctaggactttggtatcgcattgaacttctaaggaaagtacggggnacaggcccttcgacatccacagttgtttgaacgcttgaagctttgccatccaaatcgcagatttaccagtctggtgggaatgtggccctcatgatagggatttgcttattggtgctgccaaacacggggtgagccgaacagactatcacattcttcgtgatcctgaactctcatttatggcagctcagaggaactacagtcaaagtaagatggctcattcaaggacttctaccccacttctacagcaatatcaagtagcactttctgcttctcctcttacctctctacctaggctcctagatgctaaaggtattattctagaggagatgaaagttaaaagtgaaaaccttaaagaggagcctcagtcttctgaagaagaatctatgtcttctgtggaaaccaggacactgataaaatctgagcctgtaagtccaaagaatggtgttttaccacaggctactggagaccagaaatctggtggaaaatgtgaaacagacagacgcatggttgcagccagaacagaacccctaactccaaacccagcttctaagaaaccaagagtccacaaaaggggatcagaatctagttctgattctgactcagattctgagagatcatcttgttcttccagatcatcttcttcctcatcatcctcttcttgctcccactctcgatcaggctctagttcttcttcatcttcatcttgttcttcagcatcttcttcatcctcttcctccacctcttcctcctcctcctcctcttcatcttcatcagaagaaagtgacagtgatgaagaagaagcccaaaaacgagaaagtactactcacatgaaagcctatgatgaagaaagcgtcgcgtcactgagcactacccaggatgagactcaggatagttttcagatgaacaatgggacaccagagtctgcttatatcttacaaggtggatatatgctggcagcctcgtattggccaaaggatcgtgtgatgatcaataggttggacagtatttgtcaaacagttctgaaaggaaagtggccttcagctagaagaagttatgatgctaacacagtggcttctttctataccacaaaactgctggacagccctggagcagctacagaatacagcgagcccagtgtacccactcccccaggtgccggtgttaaagaagaacatgatcagtcaacacagatgtcaaaggaaggtggtttgaagttgacatttcagaagcaagggcttgctcagaaaagaccatttgatggtgaagacggtgctctggggcagcagcagtacctcactcggcttcgagagcttcaaagtgcatcagagaccagcctcgtcaatttcccaaaatccataccagtatcaggtacttccattcaaccaacccttggtgccaatggtgtgatattagacaaccagcctatagtcaaaaaaaggcgaggaaggaggaagaatgtagaaggtgttgacatcttcttttttaacagaaataaaccacctaatcatgtttctttaggcttaacctcctcacagatttccacagggataaatccagcactatcctatactcaacctcaaggaattcctgatacagaaagtccagttccagttattaatcttaaagatggaacgagacttgcaggagatgatgcaccaaagagaaaggatttggaaaaatggcttaaggagcacccgggttatgtggaagatttgggagcttttattcctagaatgcagcttcatgagggaagacccaaacaaaaaagacaccgttgcagaaaaccccaattaaactagatgtggatagtctcactggagaagaacgtgttcaactgattaacagaagaaatgctagaaaggttggaggtgcatttgctccccctttgaaagatttatgtagattcctaaaagaaaattcagaatatggagtagctcctgaatggggagatgttgttaagcaatctggatttcttccagaaagcatgtatgaacgtattctcactggtcccgttgtgagagaggaagtaagcaggcgggggagacggcctaaaagtggaattgcaaaggccacagcagcagcagctgctgcatctgccaccagtgtttcaggcaatccttttgtttaagccaatggacctacttccaggtgtggatctcacaactcttcaggccttacaacaaaacctacaaaacttgcagtcactgcaagtaactgctgggttgatgggaatgcctaccgggccttccttcctggaggaagaagctaaaaacatggctgctatgttccccatgctgctgtcaggaatggctggattaccaaatctgttgggcatgggaggactcctgacaaagcctacggaatctgggacagaagacaaaaagggaagtgactctaaggagtcagaaggaaaaacagaaaggacagagagccaaagttcagagaatggtggagaaaactctgtgtcaagttctccttccgcatcctctacttgctgcatttaaatacagctgcagctgccaacccattagctcttaacccactattactatctaatatactttatccagggatgcttctcactccagggccttaatcttcaaatccccaatttgtgcccaagtcaaatacttctgatggacaaaacaaaccacgagtgactaggcctcgtctaagtctgtagaagtaaaagaagaagattccagaattaaggatcaggaagacaaaggaggaactgacccaagtcctctcaatgaaaacagcacagatgagggttcagagaaagctgatgcttcatctggatctgatagtacatcgtcgtcatctgaggattcagattctagtaatgaagactgattcccagactctgcacttaaaatatgaactgattttggattttttctttaataattaattgtaaataccccagtgttgagtgcatcaataacttactggaccgaacattttcagttaatttggtttaggagtgcaaactgctttcagagactttttgcatgtaatatttcttaagattcataagtttctgaactcgtatgtactatcaaatacataaaggtgtaaaattacaacaaaaggcattataattttgttgggggttaattttatgaaaattatgctcaataagagttgtatatttaatatatttgcagtgaacacagaatactttatgcatattactgatttaatttgaatatagttttacagcctccttgacacctataatttacagatcaaaactcagcaataatttgggcagctaatgaatgtcatgaaagctgtagaatctacatcaccatccattgctttaattacatgaaaatgctctagtgttgtgatgcactgctgatgtttccaattcaggtacaagtatgttttaaagaagaaataagtttcccaatcagccaatttaactggctacctgttacctcagctgagttagtttaggaagtttacattcgtttctaattctatacttgttttcaggggttttttttaaacacatcctatatatcatgtcaatctgggcaagaaatatggacttgctttttgctgagcttaattccagatatcaggtaaaattaagtcataaaataatcatgtgtgcatgtgactttggcaccctatagacatacttagttttaacttttcaaaggttggcctcctattaaaaataatcatgcctcacatgagtaatgtctgtttccagggttcagaaaaggcatactcatgaaatgccactgaaaagaactttcaacacagcatacttcatgtaaaagaaaccgcctgtacgctttctttgagtacaatactatttgcgttttatgacatggaaatattccagaattaacagataatagtggtaaacgaatatgccgatagtctaaactcattttgagtttctaggtgtaagcagactaaatgttgcccagaatcagtgttgggttatcagtttatattaaatatactgagttgcccgttttgaaaatgcactttgaataatctcaaaaagatgtacaagttatacctgtaaaccacaaaagtgaagcctgaggcttctgttcaatttcatagactcctttaccatgtaaaatttgtctgatatttgatttgtgatacaatttctcctgctaaagctgctattattctgacaaggtaggaggtccaggttcacctttatatatatttaaaacaattagtactggattgggacataaaaatattgacattctaaggagagatatatgttagcatttttctggtactcaaataagttagtagtaaagtctgcaagggcataaatttagggggaaaaagtgtcccagttctctcctacagaaaaaatactttcagtatgttttgataaaactgttgctttgtcatgagttagtcaattgtatcaggttttccaagacctttaccagtaaattatgtttctgtatgtaaaataaccccttattagagagacagtgttatatgtatttaccaaaattatataagttcccattggggattgtattgattttgtattttccccaaaatagtactttgaattgataggtcctttatggcaatgtcttaggcaataggtctctataatggcccatccaggggagaagtgggtagtaattcttcatcatgaaaatgatatattacatatttagtatcttccctttgcagtattgcacttttgtttaactagaatacacctatgagatagccaaagtttcaaacacagttatcttagtttaccggtggagtatttcaacaccaaccacatttcccttcctccctctaattctacccacatgatctttattccttcctttcgccaattaaaaaaaaaaaaaaaaggaaaaaaaatctgtagatcttgtcactaaaatctaatttatatcaaatttatgagagaaagtattttcctaattatggtcaaataaatttggttaacatcctagtgattctctttctatataataaggcaattacagttttcaaagcattaagtctaacataactttaaacattctcttaggtttcaagacacttctatttaatattcattggggaaaagttgtccagctatcagctaagaaaacacatgcaaatatggttgtgtaaagttaagggttataaggaaaaaaaaatccagtagaattaccataatccccaaagtgccagtggaaagaatacccccaagtatgtgttgggtagttacctaaaagaattaatagctgttattgcccttgtatttatagccccttgtttccaggttttatgattcaagtcttagtcccaatctttcttttggacatttgcaatatttaccagttgtgttttgtgtagtctgaatttgctttctgtagttgagcaaacgtcttaaaaagtcatttgtaatttattaaattactttctatgatgttctatagagcaaatggaagtttaattattttttattaaacatattctttgactacccatg

SEQ ID NO: 135422 - DNA, 530 bp, Homo sapiens
  misc_feature (1)...(530): n = a,t,c or g
gctgaggctgatgccattatacaaatggtacgtgagggtcaaagggcgcggagacagcaacaagcagcaacgtcggagtctagccagtcagaggcgtctgtccggagggaggaatcacccatggatgtggaccagccatctcccagtgctcaagatactcaatccattgcctccgatggaaccccacagggggnagaaggaaaaggaagaaagaccacctgagttacccctgctcagcgagcagctgagntttggacgagctgtgggacatgcttggggagtgtctaaaggaactagaggaatcccatgaccagcatgcggtgctagagactcaccgcactgtgttaaaccagatcctacggcagtccacgacccaccttgctgatgggccttttgctgtcctggtagactacattcgtgtcctcgactttgatgtcaagcgcaaatatttccgccaagagctggagcgtttagatgaggggctccggaaagaagacatggctgtgcatgtccgtcgtgaccatgtgttt

SEQ ID NO: 135423 - DNA, 397 bp, Homo sapiens
  misc_feature (1)...(397): n = a,t,c or g
tacttccaggtacccctgcaaggctttgctgccctcgaaggcatgaatggcattcagaagtttcagatccatcgagatgacaggtccacagatcgcctgccttcagctcacacatgttttaatcagctggatctgcctgcctatgagagctttgagaagctccgccacatgctactgttggctatccaggagtgctctgaaggctttgggctggcctaataaggccctgcccaactccgtggggttttttttaccattgttggacctggggaggggggagttaaaaaaagaaccagaaagaaattgtcaaaaaccaataaatgaaatccaccaactcnnnnnnnnnnnnnnnnnnnnnnnnnnnnnnnnnannnnnggggggccccccccctccccc

SEQ ID NO: 135424 - DNA, 599 bp, Homo sapiens
acacacacacacacacacacacacacaacagaagaagacttgaagtctatacacaggaggctagttctgactggtcacaggtctggattgtagactgtaggaaatgtaagcatccaaggagctgttgggaaaagcttacaaaacacagtggagaaaagcagaagagttgggaaaggcatccttttgtcctggatagctacagttttccccacccaaatatgggaagcttctttgcaagctcaatgtatgagaagtggaagggccaacctctagcctgtctctaaggaaagcagagttgcacccttatgtgatttttgtctcccttttatccagtcggagtctagccagtcagaggcgtctgtccggagggaggaatcacccatggatgtggaccagccatctcccagtgctcaagatactcaatccattgcctccgacggaaccccacagggggagaaggaaaaggaagaaagaccacctgagttaccccgctcagcgagcagctgagtttggacgagctgtgggacatgcttggggagtgtctaaaggaactagaggaatcccatgaccagcatgcggtgctagtgctacagcctgct

SEQ ID NO: 135425 - DNA, 731 bp, Homo sapiens
cacgcccacaccccctactgcacccacccctgtcacttctgctccagccctggtcgctgccacggctatttccaccattgtcgtagctgcttcgaccacagtgactacccccacgactgctaccactactgtttcaatttctcccactactaagggcagcaaatctccagcgaaggtgagtgatgggggcagcagcagtacagactttaagatggtgtcctctggcctcactgaaaaccagctacagctctctgtggaggtgttgacatcccactcttgttctgaggaaggcttagaggatgcagccaacgtactactgcagctctcccggggggactctgggacccgggacactgttctcaagctgctactgaatggagcccgccatctgggttataccctttgtaaacaaataggtaccctgctggccgagctgcgggaatacaacctcgagcagcagcggcgagcccaatgtgaaaccctctctcctgatggcctgcctgaggagcagccacagaccaccaagctgaagggcaaaatgcagagcaggttcctccggtttaggctcagctagcagcatccaggcagctgttcggcagctggaggctgaggctgatgccattatacaaatgtcggagtctagccagtcagaggcgtctgtccggagggaggaatcacccatggatgtggaccagccatctcccagtgctcaagatactcaatccattgcc

SEQ ID NO: 135426 - DNA, 603 bp, Homo sapiens
cataacattaatatttttgaagagtctaggccagttgtcttatatagaacatctcacaatttgtatttatctaattgtttcctcataattaaatacaggtcaaacatttcttggcaggaatacacagatgacgtctatttcgcactgtgttacacgagacatacatccatttaacccttaattatcacttgatttgtaaaccattaactatatgtaaagcctactgccccaccaaaatgagctctttgaagtgaaggactagaatgaatgagtcctcagtgtctctggcagggattacaacagggcaaggcccagaagaagctactggaagtacctaataaattgacccaaacaatcaattagccagcaaatgtcctaatacttgcctaaggaggctcttcaagttacagacctcctcataaataaatttctggatttataccaggccacacacttaatatccaagggccaggagcaagcggaacttaccagttcctgagcctcgaaggggcaggaagggcgatgcggatacagcagttggccacttctgtgaatatgtctggattgcggcatgcggctggcccaaggacacgaaggatgtag

SEQ ID NO: 135427 - DNA, 2003 bp, Homo sapiens
atgccacagcttccaggtatcagtctccctgaaggtgtggacccctcttttctggctgccctgcctgatgacatccgtcgggaagttctacagaaccagctaggcattcgtccaccaacccggactgccccctccacaaatagctcagcgcctgcagtggtggggaatcctggtgtgactgaagtgagccctgagtttctggctgccctgcctccagccattcaggaggaagtactggcacagcagacagctgagcagcagcgaccagaactagcacagaatgccagctcagacacccttatggaccctgtgaccttaatccagactctgccctcagacctgcgccgtagtgtcctagaggatatggaggacagtgtgttagctgtgatgccacctgacattgcagctgaggctcaagccctgagacgagagcaagaagcccggcagcgacagctcatgcatgagcgtctgtttgggcacagtagcacctccgcactctctgctattctccgaagcccggctttcaccagtcgcttaagtggcaaccgtggggtccagtatactcgccttgctgtgcagagaggtggcaccttccagatggggggtagcagcagccattaacaggccttctggcagtaaatgtagatactctcctccgcctccgaggacggctccttctggaccacgaagccctttcttgtctcttggtcctactttttgtggatgagccaaagctcaatactagccgtctacaccgagtactgagaaatctctgctaccatgcccagacccgccactgggtcatccgcagtctgctctccatcttgcagcgcagcagtgagagtgagctatgcattgaaacacccaaactcactacaagtgaggaaaagggcaaaaagtcgagcaagagctgtgggtcaagtagccatgagaaccgtcccctggacctgctacacaagatggagtcaaagagctccaaccagctttcctggcttcttcagtatccatggatgcagccctagggttcagggactaatatatttcagatccagcgttcaggggggcgtaaacataccgagaagcatgcaagcggtggctccaccgtccacatccatccccaagctgctcctgttgtctgcagacacgttttggatacactcattcaattggccaaggtatttcccagccacttcacacagcagcggaccaaagaaacaaactgtgagagtgatcgggaaaggggcaataaggcctgtagcccatgctcctcacagtcctccagcagtggcatttgcacagacttctgggacttattggtaaaactggacaacatgaatgtcagccggaaaggcaagaactccgtgaagtcagtgccagtgagcgctggcgaaaacaaggtgtcagaagcacaggctaattctggcagcggtgcttcctccaccaccactgccacctcaaccacatctaccaccaccaccactgccgcctccaccacgcccacaccccctactgcacccacccctgtcacttctgctccagccctggttgctgccacggctatttccaccattgtcgtagctgcttcgaccacagtgactacccccacgactgctaccactactgtttcaatttctcccactactaagggcagcaaatctccagcgaaggtgagtgatgggggcagcagcagtacagactttaagatggtgtcctctggcctcactgaaaaccagctacagctctctgtagaggtgttgacatcccactcttgttctgaggaaggcttagaggatgcagccaacgtactactgcagctatcccgtcgacctgcacgcatgctagctatgcactggccgtcgttgtacaacgtcgagactgagaaaaccctggcgttacccaacttaatcgccttgcagacatccccgttcgccagcggcgtaatagcgaagagctcgaccgatcgccttatcaatcagtgcgcacctgtatggcgatggcgctga

SEQ ID NO: 135428 - DNA, 6959 bp, Homo sapiens
atggtgtccccagaacccaagacaggacactcaataaggaattggctggatgagttaaaagatctcccaatattacatgcatactccaatctcccctcatccccggctgttgatctcgccatccatagctccaaggaaggtagaatggactggactgaaggtcaagtcacaggaccggttgttcgctcagcagctacaagtggagctggtagcactacctctggtgttgtgtctggcagcctcggctctcgggagatcaactacatccttcgtgtccttgggccagccgcatgccgcaatccagacatattcacagaagtggccaactgctgtatccgcatcgcccttcctgcccctcgaggctcaggaactggcaacggctcttctaggattcctcgggaatctgctccagaaatggccacggcagaatctctggtggaagagctctcagaggatgcagctggtggggcatccccaggagtggagctgcctgctctgggctgctcagaactgccagctgctgaagtgtcacccacagcctcctctaagaatttggaaactatttgtgagtatgcttattgtatggcaatgttaccggaaacgggtcttgatccataccccaagagagggttcttggatctcacacaagaaagaatttggacagacatccccccatccccaggaaatatccctaccacccatccactgatggtgcgccatgcagaccacagttctctgacactgggcagtggctcttcaacaactcgtctcacccagggcatcgggcgcagtcagaggaccctaaggcagctgacggccaatactggccacaccattcatgttcactaccctgggaatcgccagcccaaccctcctcttatactgcagaggttgcttggtccctcagctgctgctgacatccttcagctgagcagcagccttcccctacaaagccggggtcgggcccgcctcctgggtaggcaacgatgacgtccacatcatcgcccgttctgatgatgagctgctggatgactttttccatgatcagaggcacagctaccagccaagcaggaaccctgtccagcatccccacagccctgacccgctggacagaagaatgcaaagttctcgatgctgagagcatgcatgactgtgtttcagtggttaaagtgtccattgtcaatcacctggaattcctgagggatgaggagctggaagaaaggcgagagaagcgcaggaaacaactggctgaggaagaaacaaagataactgataaaggcaaagaagataaggagaacagggatcagagtgcacagtgtactgcatctaagtcaaatgactccactgaacagaatctctcagatgggacgcctatgcctgacagctacccaacaaccccatcttcaactgatgcagctacatctgagtccaaggagacccttggcactctgcaatcctcacaacagcaaccaacactcccaaccccaccagctttgggagaggttcctcaggagctgcagtctccagctggagaagggggcagctctacacagctattgatgcctgtagagccagaggaattgggtcccacaaggccaagtggggaagcagaaacaactcagatggagttatccccagctcccactataacctcactttccccagagagagctgaggattctgatgcactgacggctgtcagcagtcagctagaaggctctcctatggatacaagcagcctggcttcctgtaccttagaggaggctgtgggtgacacttcagcagctggcagttctgagcagcccagagcaggcagctccactcctggggatgccccaccagctgtggcggaagtgcaaggcaggagtgatgggtcaggggaatctgcccagccacctgaggacagctccccacctgcatcctctgagagctcttccaccagagattctgccgtggccatttctggagcagattcccgaggaatcctagaagagccgttgccttcaacaagcagtgaagaagaagatccccttgcgggtatcagtctccctgaaggtgtggacccctcttttctggctgccctgcctgatgacatccgtcgggaagttctacagaaccagctaggcattcgtccaccaacccggactgccccctccacaaatagctcagcgcctgcagtggtggggaatcctggtgtgactgaagtgagccctgagtttctggctgccctgcctccagccattcaggaggaagtactggcacagcagagagctgagcagcagcgacgagaactagcacagaatgccagctcagacacccctatggaccctgtgaccttcatccagactctgccctcagacctgcgccgtagtgtcctagaggatatggaggacagtgtgttagctgtgatgccacctgacattgcagctgaggctcaagccctgagacgagagcaagaagcccggcagcgacagctcatgcatgagcgtctgtttgggcacagtagcacctccgcactctctgctattctccgaagcccggctttcaccagtcgcttaagtggcaaccgtggggtccagtatactcgccttgctgtgcagagaggtggcaccttccagatggggggtagcagcagccataacaggccttctggcagtaatgtagatactctcctccgcctccgaggacggctccttctggaccacgaagccctttcttgtctcttggtcctactttttgtggatgagccaaagctcaatactagccgtctacaccgagtactgagaaatctctgctaccatgcccagacccgccactgggtcatccgcagtctgctctccatcttgcagcgcagcagtgagagtgagctatgcattgaaacacccaaactcactacaagtgaggaaaagggcaaaaagtcgagcaagagctgtgggtcaagtagccatgagaaccgtcccctggacctgctacacaagatggagtcaaagagctccaaccagctttcctggctctcagtatccatggatgcagccctaggctgcaggactaatatatttcagatccagcgttcaggggggcgtaaacataccgagaagcatgcaagcggtggctccaccgtccacatccatccccaagctgctcctgttgtctgcagacacgttttggatacactcattcaattggccaaggtatttcccagccacttcacacagcagcggaccaaagaaacaaactgtgagagtgatcgggaaaggggcaataaggcctgtagcccatgctcctcacagtcctccagcagtggcatttgcacagacttctgggacttattggtaaaactggacaacatgaatgtcagccggaaaggcaaagaactccgtggaagtcagtgccagtgagcgctggcgggtgagggggaaacctctccatacagccttcgaggcctctccactgggggcagctcatgaacatgttgtcacacccagtcatccgccggagctctctcttaactgagaaactcctcagactcctttctctcatctcaattgctctcccagaaaacaaggtgtcagaagcacaggctaattctggcagcggtgcttcctccaccaccactgccacctcaaccacatctaccaccaccaccactgccgcctccaccacgcccacacccccgtacgtgcacccaccccgtgtcacttctgctccagcccgtggttgctgccacggctatttccaccattgtcgtagctgcttcgaccacagtgactacccccacgactgctaccactactgtttcaatttctcccactactaagggcagcaaatctccagcgaaggtgagtgatgggggcagcagcagtacagactttaagatgggtgtcctctggcctcactgaaaaccagctacagctctctgtagaggtgttgacatcccactcttgttctgaggaaggcttagaggatgcagccaacgtactactgcagctctcccggggggactctgggacccgggacactgttctcaagctgctactgaatggagcccgccatctgggttataccctttgtaaacaaataggtaccctgctggccgagctgcgggaatacaacctcgagcagcagcggcgagcccaatgtgaaaccctctctcctgatggcctgcctgaggagcagccacagaccaccaagctgaagggcaaaatgcagagcaggttttgacatggctgagaatgtggtaattgtggcatctcagaagcgacctttgggtggccgggagctccagctgccttctatgtccatgttgacatccaagacatctacccagaagttcttcttgagggtactacaggtcatcatccagctccgggacgacacgcgccgggctaacaagaaagccaagcagacaggcaggctaggttcctccggtttaggctcagctagcagcatccaggcagctgttcggcagctggaaggctgaaggcttgatgccattatacaaatggtacgtgagggtcaaagggcgcggagacagcaacaagcagcaacgtcggagtctagccagtcagaggcgtctgtccggagggaggaatcacccatggatgtggaccagccatctcccagtgctcaagatactcaatccattgcctccgatggaaccccacagggggagaaggaaaaggaagaaagaccacctgagttacccctgctcagcgagcagctgagttttggacgagctgtgggacatgcttggggagtgtctaaaggaactagaggaatcccatgaccagcatgcggtgctagtgctacagcctgctgtcgaggccttctttctggtccatgccacagagcgggagagcaagcctcctgtccgagacacccgtgagagccagctggcacacatcaaggacgagcctcctccactctcccctgcccccttaaccccagccacgcctttcttcctttgaccaattcttttccggggagccctcattctatgcacatctccttcaagcctgccccctgacacacagaagttccttcgctttgcagagactcaccgcactgtgttaaaccagatcctacggcagtccacgacccaccttgctgatgggccttttgctgtcctggtagactacattcgtgtcctcgactttgatgtcaagcgcaaatatttccgccaagagctggagcgtttagatgaggggctccggaaaagaagacatggctgtgcatgtccgtcgtgaccatgtgtttgaagactcctatcgtgagctgcatcgcaaatcccccgaagaaatgaagaatcgattgtatatagtatttgaaggagaagaagggcaggatgctgggcgggctcctgcgggagtgggtatatgattcatcttttcgagagatgttttaaccctatgtatggcttgtttccgtacctcacctgggtgattcgagtcacctaacaccatcaatccatctttcccactggcaaccccaaccacctcagctaatttcaagttttgttcgggacgcattgtgggccaaagctgtatatgacaacccgtcttctgggagtgctactttactcgatccttttacaaacaccatcttggggcaagttcagtcagatatacagatatgggagagtgaaggattaccactttctaccaaggtctgggtttatctggctgggaaaatgatgtctccacactaaggctatgacctcacctttcaggcactgagggtcccaggagttttgggagtttgtgaagtttcgtggacctcaaacccaatggggggcaaccatcttgggtaacagaggaggaataagaaggaagtatgtaccccctggtattgccagatgaggatgacaggagccatccgccaacaagtggcggcctttcttagaaggcttcctatgagatcattccaaagccgcctcatttccatcttcaactgagcatgagttagagctgcttatatcaggactgcccaccattgacatcgatgatctgaatcccaacactgaataccacaagtaccagtccaactctatttcagatcccagtggttcctggaagaaacattgccgttcctttcgaatcaaaactgacccgtgcccaaagttccctcccagtttgttcacggggtaccttccaagggtaacccctggcaagggctttgcctgcccctcgaagggcatggaatgggcatttcaggaagttttcaggttcccttcggaggtggacaggtcccacagatcgccctgccttcagctcacacatgtttttaattcagctggatctgcctgcctatgagagctttgagaagctccgccacatgctactgttggctatcccaggagtgctctgaaggctttgggctggcctaataaggccctgcccaactcccgtggggtttttttttaccattgttggacctggggaggggggagttaaaaaaaagaaccgggaaagaaattgtcaaaaacccaataaatgaaaatccaccaactcaccgtgtgtgtccccagctgccccatcttccccaaggcgcaataacctggttcctcattcctcaattcttctcccccgcccgccctgtttccttcaaccttcctcttccccctttcccatgccggtcccatgatcccccaccccatgtgttttaaaaaaaggcagtaagcctttggcaggggaccctgtctgttcccaattgttttgaacagtgtgctcctcagattctgtgttcagaaggatttgctgcattgagacttgaaacctttggataggggaaaaaattatatatatatatatatttttttgttctgtttggcatttcttaattttgtgcttgggaatgtgttgatgtgcacaaccaaatattccaatccggaacaagattggcgtctgtgttgtggaggtttctaaataaagagcactcttcataaaaaaaaaaaaaaaaaa

SEQ ID NO: 135429 - DNA, 1359 bp, Homo sapiens
ccatgtgagggaggggcccgctcctgcttggtgacagagtcagcacgcggtggcctgcagttcctccagcagtgtgaccgggaggatctggtggaattggctctgcctcagctggctcaggttgtgaccgtgtatgagtttcttctgatgaaggttgaaaaagatcatctagcaaagccttttttcccagctatatataaggaatttgaagagttgcataaaatggttaagaaaatgtgccaagattacctcagtagttctggtctgtgttcccaggagaccctggaaataaacaatgataaggttgctgagtcattaggaatcacagaattcctacggaagaaagaaatacacccagacaaccttggacccaagcacctcagccgagacatggatggggagcagctagagggagctagcagcgagaagagggaacgtgaggctgcggaggagggactggcctcagtgaaaaggcccagaagagaagccctgtccaacgataccactgaatctcttgctgccaacagcagaggccgggagaagcccaggcccttgcatgctttgcccgctggtttttcccctccagtaaatgtgactgtctctccccgttctgaagaaagccatacaacgacggtttctggtggcaatgggagcgtgttccaggcgggcccgcagcttcaggcactggctaacttagaagccaggagggggtctataggtgctgctctctcatcccgggatgtcagtgggctgcctgtttatgctcagtcaggagagcctaggaggctgacccaggcacaggtggcagcgtttcctggagagaatgctttggaacactcttcagaccaggacacctgggacagcctgaggagcccgggtttctgcagccctttgtcatctggtggtggagcagagtccctgccgcctggggggcctggacatgcagaggcaggacacctcggcaaggtttgtgacttccacctgaaccaccagcagcccagccccaccagcgtcctgcctacagaggtggcagcccctccgcttgagaaaattttgtctgtggatagcgtggcagtggactgtgcctacaggactgtgcccaagccagggcctcagcctggcccacatggatcactattgactgaagggtgtctcagaagcctttcgggggacttgaaccggttcccctgtgggatggaggtgcactctggccagagagaactggagagcgtggttgctgtcggcgaagccatggctttgaaatttccaatgggagccatgagttactgtctcagggacagaagcagatttttattcagacttccgatgggcttatcttgtcccctccaggtacaatag

SEQ ID NO: 135430 - DNA, 865 bp, Homo sapiens
ccgctgcaggaattcggcacgaggtttcatccagttcaggacgtttatttatttccaacttgcatacaaaacatactgagaaactaaaaccatcgttaaaagtgaagacacgttgagacaggtatctcgacctgccaagtatacagctaaagctgagttcataaaaagggatgatttggccgacggtcatctgccagattctgatgatgattcagaagtcagtgtggaagaagatcagagggagaggcaggcgctctttgacttatcaagctgctccctgaggcccaaaagcttcaagtgtcagacttgtaaaaagtcatatatagggaagtggggactggcccagcattttaaacttaatccaggccatggccagctggaccctgagatggtgctatctgagaaagccaatgggagcaccctccgggggtgcacagaggaaaggacgctcagcctgaccttcccggggctgtccgtgccagcggctccgcgtgagggaggggcccgctcctgcttggtgagagagtcagcacgcagtggcctgcagaaaaacgttgacctcttggcgagaatgcaaagaagggaacgcttgcttatacactgttggtgaactgtcacccctacaactcagcttgcaaccagccctggccaccagtttccccacactgagctgaatatcggacatgcccatcttagacattccagcccattctgaaattccacatcgattcacctgacaaagtctgaagttccagggcaatttatctggaaaagcttacctggaatcacgtgtcatttcaaccaacaactgttgaagaggacgtggcattaaaaccaagggtatcaattatttataaaaaaaaaa

SEQ ID NO: 135431 - DNA, 1374 bp, Homo sapiens
cacatccatttatttccaacttgcatacaagacatactgagaaactaaaaaaatcgttaaaagtaaagacacgttctggacgggtatctcgacctcccaaatataaagctaaagattataagttcataaaaacagaggatctggcggatggtcatctgtcagattctgatgattactcagaactctgtgtggaagaagatgaagatcagagggagaggcacgcactctttgacttatcgagctgctccctgaggcccaaaagctttaagtgtcagacttgtgaaaagtcatatatagggaaggggggactggcccgacattttaaacttaacccaggccacggccagttggaccccgagatggtgctgtctgagaaagccagtggaagcaccctccgggggtgcgacggaggaaaggacgctcagcctgacctccctggggctgtccatgccagcggatccatgtgagggaggggcccgctcctgcttggtgacagagtcagcacgcggtggcctgcagaatggtcagtctgtagacgttgaagagacattgccatctgaaccagaaaatggagctcttttgcgatcagagagataccaaggacctagaagacgcgcatgctcagagacccttgcagagtcccgcacagctgtcctccagcagagaagagctgctcagctacctggtggccctgctgcggcaggggagcagagggcgtcgccaagcaaagccaggctcaaggagttcctccagcagtgtgaccgggaggatctggtggaattggctctgcctcagctggctcaggttgtgaccgtgtatgagtttcttctgatgaaggttgctgagtcattaggaatcacagaattcctacggaagaaagaaatacacccagacaaccttggacccaagcacctcagccgagacatggatggggagcagctagagggagctagcagcgacgaagagggaacgtgaggctgcggaggagggactggcctcagtgaaaaggcccagaagagaagccctgtccaacgattaccacttgaatctcttgctgccaacagcagaggccgggagaagcccaggcccttgcatgctttggccgctggtacaatagtgtctcaggaggaggacattgtcacagtgactgatgcagaggggcgtgcctgcggatgggcccgctagaaggagttcctctagaagctgtggagtcggtcgtcaccgtggagccagagccctcacagtgaaatggggtcagatactagaattcgtctgattttatccagagaaggtctatggcaagcaatgtatatttttctaatgtgaatattgcacagatgaaccttttatttataaagaataatgtctttctgc

SEQ ID NO: 135432 - DNA, 559 bp, Homo sapiens
caaagggctgcagaaacccgggctcctcaggctgtcacaggtgtcctggtctgaagagtgttccaaagcattctctccaggaaacgctgccacctgtgcctgggtcagcctcctaggctctcctgactgagcataaacaggcagcccactgacatcccgggatgagagagcagcaccttatagaccccccccctggcttctaagttagccagtgcctgaagctgcgggcccgcctggaacacgctcccattgccacccagaaaccgtcgttgtatggctttcttcagaacggggagagacagtcacatttactggaggggaaaaactctaaacattttgggaaacaggtgaacatggcgtgtacgtgtgtcatgggccactcactgcactcacccacccaaaaccagctaggccaagtcacctgccctgcagaaaagtcaaagcatcgatgctccttgctccttgggattggtagcaattttaaaaaatacgtccctattctctattcacaaagacagattttgtattaaaaatatgctctaagagccaaaaaaaaaaa

SEQ ID NO: 135433 - DNA, 1889 bp, Homo sapiens
  misc_feature (1)...(1889): n = a,t,c or g
atggtgctgtctgagaaagccagtggaagcaccctccgggggtgcacggaggaaaggacgctcagcctgacctccctggggctgtccatgccagcggatccatgtgagggaggggcccgctcctgcttggtgacagagtcagcacgcggtggcctgcagttcctccagcagtgtgaccgggaggatctggtggaattggctctgcctcagctggctcaggttgtgaccgtgtatgagtttcttctgatgaaggttgctgagtcattaggaatcacagaattcctacggaagaaagaaatacacccagacaaccttggacccaagcacctcagccgagacatggatggggagcagctagagggagctagcagcgagaagagggaacgtgaggctgcggaggagggactggcctcagtgaaaaggcccagaagagaagccctgtccaacgataccactgaatctcttgctgccaacagcagaggccgggagaagcccaggcccttgcatgctttggccgctgaaagccatacaacgacggtttctggtggcaatgggagcgtgttccaggcgggcccgcagcttcaggcactggctaacttagaagccaggagggggtctataggtgctgctctctcatcccgggatgtcagtgggctgcctgtttatgctcagtcaggagagcctaggaggctgacccaggcacaggtggcagcgtttcctggagagaatgctttggaacactcttcagctcaggacacctgggacagcctgaggagcccgggtttctgcagccctttgtcatctggtggtggagcagagtccctgccgcctggggggcctggacatgcagaggcaggacacctcggcaaggtttgtgacttccacctgaaccaccagcagcccagccccaccagcgtcctgcctacagaggtggcagcccctccgcttgagaaaattttgtctgtggatagcgtggcagtggactgtgcctacaggactgtgcccaagccagggcctcagcctggcccacatggatcactattgactgaagggtgtctcagaagcctttcgggggacttgaaccggttcccctgtgggatggaggtgcactctggccagagagaactggagagcgtggtttgcttgtccgcggaaaccatggctttttgaaatttcccaaatgggagcccatgagttactgtctcaagggacaagaagcagatttttattcagacttccgatgggcttatcttgtcccctccaggtacaatagtgncctcaggaggaggacattgtcacagtgactgatgcagaggggcgtgcctgccggatgggcccgcctagaaggagttcctctagcagctgtggagtcggtcgtcaccgtggagccagagccctccacagtgcaagtggagtcagatcctagattcgtctgattttatccagagaaggtctatggcaagcaaatgtatattttttctaatgtgaatattgccacagatgaaccttttatttataaagaataatgtctttctgccctgctgtctacatttttctatggagcttgtcataataatagcagatattacctgaatcaggaatccctgtggcgcgtctgacgctcatggagtttttcatgatggtgatgagtagcactgcactgtcacctgatgattggccctgctccgtttcccttctctcctgggagatatgctgcttttcccccagacttgctccatactaaaagctttttttgggttcaattaaaaaaaaaataagctagtcattttgggcagcattttattgataaaagggggaaaaagtcatttctacttgcatgattttttaaattaaattaaattaaattaatttaaaaaaaaaaaaaaaaa

SEQ ID NO: 135434 - DNA, 346 bp, Homo sapiens
tgaaacaggttctgatttttcttctccattagattccatcaacttctgccactgttgttaactctggttcactcttgtagagtctataatctggaccctcatttttgtacttaactgttgagaaaggctttgatcctatcatacctatttctgtagtacctctttgctgcttatgtttactcagcccttccatgacatcctgaattcgccaaagttctttctgaatctgtgcacgctgaattcctgctgattccgtctgaacttcaccaaggtgatccagctgctcttgcatctggttcctggtaacagttacatcgtattctaacttatcatattctctccatgc

SEQ ID NO: 135435 - DNA, 570 bp, Homo sapiens
agagcccagattatggcccgctaccttgaaggttatagaacactcccaagaaacagcaagacaaggcctgaaagtatctgcagtgtaaccccttccactcatgacaagacattaggacccggagcggaggagaaacggaggtccatgcgagatgacacaatgtggcagctctacgaatggctgcagcgtcagttttataacaaacagagcaccctccctcgacacagtactttgagtagtcccaaaaccatggtaaatatttctggccagacaatgcactatattcccacatcacgttcccacgggtcaattggtgcttatcagggttactcccctcaacgaacaaacagatcggaagtgtcttcaccaattcagagaggagatgtgacactagaccgcagacacagggcccatcaccgtaaggtaaaatagctgctgattgtgttttaactcagtaccttctaaatgctgtgttttctttgtagtatagtattttaaatgtgagcgacaaaagaatggggctaaagtaagcaaggcagctcttttttgttgtggaaaaaaaaaaaaaaa

SEQ ID NO: 135436 - DNA, 2407 bp, Homo sapiens
ttgtgctttctgacctttgcctcttttattatagagatgagaaagaagagggtatcctgggaagcatactgttacctagttttcagataagctttgcttaccctctgaagatcacattaatcgcaaatatgcttttaaggcagcccatccaaacatgcggacctattatttctgcactgatacaggaaaggaaatggagttgtggatgaaagccatgttagatgctgccctagtacagacagaacctgtgaaaagagtggacaagattacatctgaaaatgcaccaacctaaagaaaccaataacattcccaaccatagggtgctaattaaaccagagatccaaaacaatcaaaaaaacaaggaaatgagcaaaattgaagaaaaaaaggcattagaagctgaaaaatatggatttcagaaggatggtcaagatagacccttaacaaaaattaatagtgtaaagctgaattctctgccatctgaatatgagagtgggtcagcatgccctgctcagactgtgcactacagaccaatcaacttgagcagttcagagaacaaaatagtcaatgttagcctggcagatcttagaggtggaaatcgccccaatacagggcccttatacacagaggccgatcgagtcatacagagaacaaattcaatgcagcagttgggaacagtgggattaaaatccaggaaggggaggggttcatggaaggaagaaaccaggggagtaatttcttaccaaacattaccaagaaatatgccaagtcacagagcccagattatggcccgctaacactgaaggttatagaacactcccaagaaacagcaagacaaggccttgaaagtatctgcagtgttaaccccttccactcatgacaagacattaggacccggagccgaggagaaacggaggtccatgagagatgacacaatgtggcagctctacgaatggcagcagcgtcagttttataacaaacagagcaccctccctcgacacagtactttgagtagtcccaaaaccatggtaaatatttctgaccagacaatgcactctattcccacatcaccttcccacgggtcaatagctgcttatcagggatactcccctcaacgaacttacagatcggaagtgtcttcaccaattcagagaggagatgtgacaatagaccgcagacacagggcccatcaccctaagccagaggagcttacgctgctgctaataaagctgagacggcagcaagccgaactgagtagtatccgggagcatacgttagcacagctcatgcagctaaagcttgaggcccacagcccaaagtggtgtagagaaaaggtggcgacggcgactggagcagcagagactgtagcatcggatacccacctcccacgaaccggttcctcttccccctccttgctgtgtgtttgatgtgttgaagcaggagggagaacgccgcgagcagcgccgtgagcaacactaccatcgtccccagcactgcggatccgggccctagcggcgggcccagtatcggaggtggtggcggcggtggaggcggcggcatcgagaaccagagaaagaaaaaagaaggcattcaagatcacattctaggaggaggaggactctcatcttctagacacagtcaaggagcagatcaagagagtgattacattgtcagtctaggagtcgttgatgattcaaaagcccaagacagagaagatctcattccagagagagaggcagaagcacggctagacattatagaagtacaaacagagagacaacaacgaagaagcaggagtggaacaagatctcctaaaaagtctcggtgtcctaaaagaaaattgtctctctcaccatcccctgggaaacataaaaagaagaagaaagataaagagagaaataggtatgaaagagaacgatcaacaagcaagaagaagagtaaagatagggaaaaggaccaggaaagaaaatcagagagtgatacagatgtaaaagttacacgggtttatgatgaagaggaacaagggtatgacaccagccaagagatagaaatgcatgcagataacccagcagccattcagacagtggtgttacaaagggatgatttacaaaatggactgcttagtacgtgtcgagaactttctcgagccactgccgaattggaacgagcatggagagaatatgataagttagaatacgatgtaactgttaccaggaaccagatgcaagagcagctggatcaccttggtgaagttcagtgctggtgttacaggacagagaaatatgttatggaaaggggtcccgaacaagaccctaagagagcgttcttggatttcgtgcaagaaagaattcagggagagtccgcagtgcaaagtgaaagcaagtttattaagacagtaaagaaataa

SEQ ID NO: 135437 - DNA, 910 bp, Homo sapiens
atgttaggtgatgctacatggtatgcagaaaaacagcaggccaagagagatagagataaggggacacttgagcagagacctgaaggtaatgtgggaatgctgggggaagagccttccagagccatcggccaggtaccaaagctcagctgtatggattcccaacaggaggacctgcgcttccctgggatgtgggtctcattgtactttggaatcctggggctgtgttctgtgataactggagggtgcattatctttctgcactggaggaagaacttgaggcgggaagagcatgcccagcagtgggtggaggtgatgagagctgccacattcacctacagcccattgttgtactggattaacaagcgacggcgctacggcatgaaatgcagccatcaacacgggccctgcccctgctgtcaccaagactgagactgaggtccagaatccagatgttctgtgggatttggacatccccgaaggcaggagccatgctgaccaagacagcaaccccaaggcggaagcccctgctcccctgcaacctgcactgcagctggctccacagcagccccaggccagatccccattcccacttcccatctttcaggaggtgccctttgccccacccttgtgcaacctaccccccctgctgaaccactctgtctcctatcctttggccacctgtcctgaaaggaatgttctcttccattccctcctgaatctggcccaggaagaccatagcttcaatgccaagccttttccttcagaactgtagcctcctctcactgaaggtgggagctgcaggaatcaggtgcagagtaggaaatggaactaacctcaggaaggtggtattgacagaggtcaggacccaacctggaatgtcaaggctatgaaaacatttaaaagataaaaa

SEQ ID NO: 135438 - DNA, 180 bp, Homo sapiens
tgctgtgttaagtgggtgtcaaactccagcaacgtgggctaccttgcccatgccattcaccaggtcaccaagtatgtccctggtgcgaggaaacagagacaacctttcttggtggtgagtggatcatttctttcagccacagtgtgtgacactcagcatttgagaacatgtggcgtgtat

SEQ ID NO: 135439 - DNA, 212 bp, Homo sapiens
gctgtgttaagtgggtgtcaaactccagcaacgtgggctaccttgcccatgccattcaccaggtcaccaataatgtccctgtcttcagccttcacacagacaatgagagagggtagatggtggtgagtggatcatttctttagtgacacagggcaggggcatccatggctggcgtctgaatattaaaccaaactctccccggcccttgtatc

SEQ ID NO: 135440 - DNA, 312 bp, Homo sapiens
ggctgcccactgccctcctacggtccaccatggccctgctgcactccggccgcgtcctccccgggatcgccgccgccttccacccgggcctcgcgccgcgcctctgccagagccagctcctggtggacccatgtggaaatgggacctccagatcccattctgggagtcactgaagcctttaagagggacaccaatagcaaaaagatgaatctgggagttggtgcctaccgggatgataacggaaagccttacgtgctgcctagcgtccgcaagtttgtcactgtgcagaccatttctggaactggagcctta

SEQ ID NO: 135441 - DNA, 506 bp, Homo sapiens
ggtccaccatggccctgctgcactccggccgcgtcctccccgggatcgccgccgccttccacccgtgtcctcgccgccgcggcctctgccagagccagctcctggtggacccatgtggaaatgggacctccagatcccattctgggagtcactgaagcctttaagagggacaccaatagcaaaaagatgaatctgggagttggtgcctaccgggatgataacggaaagccttacgtgctgcctagcgtccgcaaggcagaggcccagattgccgcaaaaaatttggacctcctccctttgttgaatgtggtgtgcagcctctcatctcacactgtgagtccagcggcgcagggtggtaccaggaaagaggatattctaggctttgcgtgctgctagctgggttcaggcttcacccactggaaagaaccaccatctgctctaaccatgtagacttattgcggcctggtttctctgttacaataaaattactgtagacccaaaaaaaa

SEQ ID NO: 135442 - DNA, 303 bp, Homo sapiens
aaaaggaatctctttgcgttgtttgacatggcctaccaaggctttgccagtggtgatggtgataaggatgcctgggctgtgcgccacttcatcgaacagggcattaatgtttgtctctgccaatcatatgccaagaacatgggcttatatgagtgttttggcgtcgtggtacctgaaagcggtatttggagtcggtgtagccagccggcgatctatagcctgtcggagacagcatggaaacatggggaggacgggagggaaggcagcaaacggaccgcgccctatgaggctcgcacgggactg

SEQ ID NO: 135443 - DNA, 425 bp, Homo sapiens
acgcccagaatagtggaaggaaatagcaacagttgtgaagaaaaggaatctctttgcgctctttgacatggcctaccaaggctttgccagtggtgatggtgataaggatgcctgggctctgcaccacttcatcgaacagggcattaatgtttgtctctgccaatcatatgccaagaacatgggcttatatggtgagcatgtaggagccttcactgtggtctgcaaagatgcagatgaagccaaaagggtagagtcacagttgaagatcttgattagtcccatgtattccaactctcccctcaatggggcccagattgcttctaccattccaaacaccccagttggtttgaaggtctgggtcatgggaggcctacatgatcatcctcaggttatgagtgacgagaaagagacaacactgagagcag

SEQ ID NO: 135444 - DNA, 2598 bp, Homo sapiens
ggcacgaggcaggagccggttccctgtgtgtgtgtccggctcgccctctgctccgtcctgcggctgcccactgcccatcctaccggtccaccatggcccatgcatgcacgtccggccgcgtcctccccgggatcgccgccgccattccacccgggcctcgccgccgcggcctctgccagagccagctcctggtggacccatgtggaaatgggacctccagatcccattctgggagtcactgaagcctttaagagggacaccaatagcaaaaagatgaatctgggagttggtgcctaccgggatgataacggaaaagccttaccgtgctgccctagcgtccgcaaggcagaaggcccaagattgccgcaaaaaatttgggacaaggaatacctggcccattgggggaactggctgaattttgcaaggcatctgcagaactagccctgggtgagaacaaccgaagtcttgaaagagtgggccggtttgtcactgtgcagacccatttctgggaactgggagccttaaggattcggagccagttttcttgcaaagattttttaagttcagccgagatgtctttctgcccaaaccaacctggggggaaaccacacacccatctttcagggatgctgggcatgcagcttacaaggttatcgggtattatgaccccaagacttgcggttttgacttcacaggcgctgtggaggatatttcaaaaataccagagcagagtgttcttctttctgcatgcctgcggcccaacaatcccacgggagtggacccgcgtccggaacagtggaaggaaatagcaacagtggtgaagaaaaggaatctctttgcgttctttgacatggcctaccaaggctttgccagtggtgatggtgataaggatgcctgggctgtgcgccacttcatcgaacagggcattaatgtttgtctctgccaatcatatgccaagaacatgggcttatatggtgagcgtgtaggagccttcactatggtctgcaaagatgcacgatgaatccaaaagggtagagtcacagttgaagatcttgatccgtcccatgtattccaaccctcccctcaatggggcccggattgctgctgccattctgaacaccccagatttgcgaaaacaatggctgcaagaagtgaaaggcatggctgaccgcattcattgggcatgcgggacttcaactggtctccaaccttcaaggaagggagggtttccacccaccaattgggcaacacattcaccgaccaaattgggcatgttctgttttcacaggggttaaaagctggaacaggtggagcggctgatcaaggagttctccatctacatgacaaaagatggccgcatctctgtggcaggggtcacctccagcaacgtgggctaccttgcccatgccattcaccaggtcaccaagtacgtgtccctggtgcgaggaaacggagacaacctttctgtcttgagcctctgcttattgagagcttcacacagacaatgagagagggtggatggtggtgagtggatcatttctttcagccacagtgtgtaacactcaagcatttgaatgtttctcagaaaagaacatgtaggtgacacagggcagaggcatcccatgggctgggcgtctgggaattatttaaaccaaacatcctcccccggtcctttttttcttccaactttttttcaaaggagttttacatgtggcaaggaaagttcatcgcaccaaaaaaacctgtcaaattaatgccatttgcaatatttccagaagcctttaacttaagttgtcagggtttcttcgtaagaaacagcacaccgttagaggcttttggagagaaggccagctagttctgtccatgagtagtcggcctcgtgtctggtcctcccatcttgggaacaaccttatccaacagggccgcactgccagaaatggatgttttatgaaaaccaaatgagggctggctgccacttccagcaaggggaaataattgcagtttccctgtctttatttaagaaaaaagacaaggctctcttttctcccctggtcattgccggttcttttccttaccacgcaaaaaattttttaaactattgccagattttcaacccccaatcctaactgccttggattgacccatccaactcccatccttatcggagatttatttaaggaatggaaggaaccataattttctgctggaatgccggtacccctcaaccctttttcaagcaaagaatcagtggagagttaaggaaactgttactttatctcgggcatcctcattgaatgatagtgtcaagttttctcccagttgggaatgttgtctctgccccggttgggacctccccccctttgttgaaatgttggttgtgcagcctctcattctcacaactgtgagtcccagcggcgcagggctggtaccagggaaagaggatattcttaaggctttgcgtgctgctagctgggtttcaggcttcacccacttggaaagaaccccccttctgctctacccatgtaagacttattttgcggccctggttttctctgttacaataaaattactggtagacccaaaaaaaaaaagtcgacg

SEQ ID NO: 135445 - DNA, 217 bp, Homo sapiens
cagcgtgcagggtcaaagacagccggccccccatgtcagtggtctaggatggccagtgaaggcaccaacatcccaagtcctgtggtgcgccagattgacaagcagtttctgatttgcagtatatgcctggaacggtacatcagagattacagattgaaacagaactccatgtggaaaaatcagtaattaaaaaagatttttaccagcaaaaaaaaaa

SEQ ID NO: 135446 - DNA, 400 bp, Homo sapiens
  misc_feature (1)...(400): n = a,t,c or g
cattaaaccggcctataaaaatgggatgttccaaattttaaaaggaaaccaagccnnnnnnnnnnnnccccttcatattcatacataggcttgaaagtctatagaattgagaacgatataaagaattctattacaagaatacactccattgatgacagaacattcccatgtcataaagcaaaagcattgagtttaaggctgtgttgctttcaaaagtataatggaaagtgctgtacattcattggaacaacatagccaatttattaatctattctagaatattaatagctttcatacattctccacaaacagaccaatcactgccacacaattcatctttagaaagtttttaagcatcatgatttgtagcttactgtcatgaaaacaaaacaaataattc

SEQ ID NO: 135447 - DNA, 351 bp, Homo sapiens
gtgatggaattttactgccagtcctgtgagactgccatgtgtcgggagtgcacggagggggagcacgcagagcaccccacagttccactcaaggatgtggtggaacagcacaaggcctcgctccaggtccagctggatgctgtcaacaaaaggtgggggaccctccccaaacccccaactggctgcctgtacttgaggcctggcctcatggcctcttgtctagttaaccaaccaaaaggccagcatcgggatgacattcattccacctttgatgagctccagaagactttaaatgtgcgcaagagtgtgctgcttatggaattggaggtcaactatggcctcaaacacaaa

SEQ ID NO: 135448 - DNA, 7295 bp, Homo sapiens
acagacgctcagtgagaaaaagatgtcctgtaagatcaagaccgattggtgtgaatactgaagggggtcttccacttgttaatgacccagaaacattcctgccgacttccagccttctctcatttcctccatttttctcttcctctgttctgtgcatgaactggcacatcactacttagagcagaagatatgctgggcttctgatgatggctgcactgcatgcagcagcagcgtgcagggtcaaagacagccggcccccccatgtcagtggtctaggatggccagttgaaggcaccaacatcccaaagtctggtggtgggccagatttgacaagcagtttttgatttgcagtatatgcctggaacggtacaagaatcccaaggttctcccctgtctgcacactttctgcgagaggtgcctgcagaactacattcctggcccacagtttaaccctctcctgcccagtgtgccgccagacctccatcctgcccgagaaaggggtggccgcgctccagaacaatttcttcatcacaaacctgatggacgtgctgcaaccgaactccaggcagcaacgctgaggagtcttccatcctggagacagtcactgctgtggctgcgggaaagccttctctcttgcccaaaccacgatgggaatgtgatggaattttactgccagtcctgtgagactgccatgtgtcgggagtgcacggagggggagcacgcagagcaccccacagttccactcaaggatgtggtggaacagcacaaggcctcgctccaggtccagctggatgctgtcaacaaaaggtgggggaccctccccaaacccccaactggctgcctgtacttgaggcctggcctcatggcctcttgtctagttaaccaaccaaaaggccagcatcgtggatgacattcattccacctttgatgagctccagaagactttaaatgtgcgcaagagtgtgctgcttatggaattggaggtcaactatggcctcaaacacaaagtcctccagtcgcagctggatactcctgctccaggggcaggagagcattaagagctgcagcaacttcacagcgcagaccctcaaccatggcacggagaccgaggtcctactggtgaagaagcagatgagcgagaagctgaacgagctggccgaccaggacttccccttgcacccgcgggagaacgaccagctggatttcatcgtggaaaccgaggggctgaagaagtccatccacaacctcgggacaatcttaaccaccaacgccgttgcctcagagacagtggccacgggcgaggggctgcggcagaccatcatcgggcagcccatgtccgtcaccatcaccaccaaggacaaagacggtgagctgtgcaaaaccggcaacgcctacctcaccgccgaactgagcacccccgacgggagcgtggcagacggggagatcctggacaacaagaacggcacctatgagtttttgtacactgtccagaaggaaggggactttaccctgtctctgagtctctatgaccagcacatccgaggcagcccgtttaagctgaaagtgatccgatccgctgatgtgtctccccccacagaaggcgtgaagaggcgcgttaagtccccggggagcggccacgtcaagcagaaagctgtgaaaagacccgcaagcatgtacagcactggaaaacgaaaagagaatcccatcgaagacgatttgatctttcgagtgggtaccaaaggaagaaataaaggagagtttacaaatcttcagggggtagctgcatctacaaatggaaagatattaattgcagacagtaacaaccaatgtgtgcagatattttccaatgatggccagttcaaaagtcgttttggcatacggggacgctctccggggcagctgcagcggcccacaggagtggctgtacatcccagtggggacataatcattgccgattatgataataaatgggtcagcattttctcctccgatgggaaatttaagacaaaaattggatcaggaaagctgatgggacccaaaggagtttctgtggaccgcaatgggcacattattgttgtggacaacaaggcgtgctgcgtgtttatcttccagccaaacgggaaaatagtcaccaggtttggtagccgaggaaatggggacaggcagtttgcaggtccccattttgcagctgtaaatagcaataatgagattattattacagatttccataatcattctgtcaaggtgtttaatcaggaaggagaattcatgttgaagtttggctcaaatggagaaggaaatgggcagtttaatgctccaacaggtgtagcagtggattcaaatggaaacatcattgtggcccgactggggaaacagcaggatccaggttttttgatggtagtggatcatttttgtcctacattaacacatctgcttgacccactcctatggcccccaaggccttgggccctaacttcagatgggtcatgttgttggttgcagactctggaaatcactgtttcaaagtctatccgatacttacagtaatggtgggcaggtggataccccgcttccatggtcttgcactatgaaactggaatggatttctcaatggcgggaccagattatgactaggagtttttatggccagaagggaatcatttgggtgaacttttccaaggttattttctggaatgttaacaattttcccttaaaaatgacttatccaatttctgtatttcacctttagggttaaaaaaaactcttctactgaatctataaaaactgcagttttacatctgtgaactatggcttaagggacaggatttatgtagctaaactaattttgcaaatcaaacagacacttaaaaaaactagcatatgtaaaggtattcgttaatcctgtgaatggtagcttttgcacagaacttccaaaagcaaaacaaaaacaaaatctattgtagttatatacttcatttaacctaggtcacaagacccagggaatcttctaacctcacttttacagtaggtattactcttgtgacatttttttggttatcaacaactaaatataaattactttggaaaaagtaaggctgtcttgcaaaatgatcccagctctgattagcagccctctggagttcagaacttaagtatcagtgcaaatttctcaacctttctgggttagacaaagatccttttttgtgagttcttttcaccacccctttggctcaccttgtatcagcaaacaaagtacttcttcagggaaaccgtgaaatttctaatgccttgaaaagcatattacaaaagtaatgctaccttttgggaaacaaactgccccgttaactccagatcattgcactggaatgtaatcaagaaagttagtcatgttttatgtaccatgttttcacacgtgtctcttctcttcgacttcctgaaagcggaaggttttacctcctgcaaaatttcagcacaatgtagggtagggccaccagttatcctagggacagagagccataatgtagcccctttgggagggacttgatgggtgtcaaccaaagggcatgtggattggatttaatgaatccccccttagaaaagccaagtgtttacccaaagttgtgttatccttgaaagcatttacaggttaagggcatgttatggttatttatcattgtttaatgaatagtagaggtgtccaagggacctatgtatacatgattagggtaagatagaatgtattatatatatatatatatatacacacaccacatatatatagctgaatctttggtgtattgaaataggcagcactctgaaagacagaagcttcgtccagccactcttcagcacattcctttactaagcagtttaaagccgtcctagtggagcaagccctaaagcagatttaatttttgccattttggggggggtgacgggtggtggcttttagtcagaaaatggccttcttgtgctttcaaaaaaaaaacaaaaaaaaaaccacacacacacataaaaaacccaacaggtcaaaataaaagttgaacttgagttacatttaatttaaatataaatgcattttgagaaatgttaagaacaatttagtcaatcgttcatctgtcattggtactgtaaaataagctgtggtctatttccactgtttaattttctactcagttctaccaaataggatgtcatgtttgacatttttgatagtgactttggggtcttcttcactgaaagcaccttagaactgtactataagaaaacatttcccctatgtataattatatgaatgtgatgtttattgcttattaatttataattcagtcattctctatataggacttcttaaaattttagaagggaaatccaagctaccttcaaattgtctgttaaatttattatgcccaaatcaacctctgaaaaaaggtttttccaggaagatttacatttaggtttaatattttttttagttaggtagagttttaaaaaatacttgagcctgtccgtgataaagctataaaattcaataactttttagaatgttaaatgaagacactgtttcctaacatcagtgagatacatctttgaatttaaacattcatatttactgagtacctactaggtaccaagtactcttttaggcactggaaatacagtgatggacaaaacaaggtaaaaaatcgctggccccctcagagctgacattctggggtgggaatttcattttgccacgtactaacgttctgcacaaaagacaggctagactcttgtctagattgtttaaaagaaacttttcaaattggttacattaattttagtttattttcacaagtaaaaatggctttttatttagattctttctgtcccaggctgttgatcttaaaactagttgatttaaagagttttttttgcacaacatttccaattatatttgtgaacttagaaattaacttacaatctaaccagccatcatataatatcctatcaggctagatatctcaatagtagactgaatacaaagctaattttttttttacatgtcaatattggcacaaacttggaatgaaagaatagtttgattcagacctgctccactatgtgttgctaaaacacatgctatgagcactccagggcaacactatattttttccaaaaaatatgtgattatatatgttaaagtatagataacatttcacacttggatacatatgtgcatttactgtatttcttggcaagcatatttttgggggaaagtgctgctgatatgatacaagtagacaaaatttaaatgaaattttgtcacattctatgggaaaatgggtttctgggtaaactgaggaagggtatttaaaataagtgggcttttttctggggctaccctttattgtttggatttctctttgtccagtgtatagaacctgtcatacattcatgataagtagcactgaaaaattactcattcaaatttcccctgggcacgtaaggcaaaatattgccggttgggatttcaaggtcagtgacgacgcatttgctcccagtacagaccccccagccccccttgctggacatggggaggcagagagtcacttgaccatccagaaatacatgactacaagtcctttatgactgtttgccattttttttaatggtacttagtattttgatcaaactttagtctccagaactaaacaagtccctaagtttccttattttaatttactgtgactagatttgaagcaaataaatactccagatccatgcagctagaacacacttgcttccactactaaatatacagggtatgtcctaacatggagttaactggaatagcacgacactagcaagaatgtgcgaatccttagcactgacgggttaacagaaatgctttggtaatacctacttagttaattggaggaagtagtaaataaacattaggtaatctgcagattacttcaaatggggaaaaatcttttttgtagactctatagtaccctctctattccactagcttctgaaaaggggaggagtatttttagtttgaccaatttaataatttaaaaacaagacatctcccaggtagggaaaaaatggaaagctatttcatggcaaacattatcttaatttaggcttaaaagtgaaagtggggtaatactgttgggtttctgttaaatgttggcaggggtttttaaactttataattactttaatatttttggataactggaaatctagtattgccataaagggaaactaagtgcccatcaaagatttgtttggtataaataaagaattatttgttttgttttcaatgacagtaagctacaaatcatgatgcttaaaaactttctaaagatgaattgtgtggcagtgattggtctgtttgtggagaatgtatgaaagctattaatattctagaatagattaataaattggctatgttgttccaatgaatgtacagcacttccattaacttttgcaaagcaacacagccttaaactcaatgcttttgctttatgacatgggaatgttctgttcatcaatggagtgtattcttgtaatagaattctttatatcgttctcaattctatagactttcaagcctatgtatgaatatgaaggggtttttttttttttgctttgttttctttttagattttgtacattccatctttataggtctgtttcatatgttttatgtatagaacacctaagtcttgcactctctgacattggatactggatatatccccgtcatttgttcttttatgaatcaaaatgttggctgcctatttaaagaaaagaatgaacgctgtgcatcaaagtgtttgtatgttcgtagctacatacgtaccccagtattttgggatgctttaggctacaatgaaactttcaattaattctgtcttgaaacataggagaaacaggattcatgtgtatctctttaccatgcccaaaatctcaaatcattataataaagcttgttttctccaaaaaaaaaaaaaaaaaaaaaaaaaaaaaaaaaaaaaaaaaaaaaaaaaaaaaaaaaaaaaaaaaaaaaaaagggggcccttaaaaaaaaaacccctggggggccccaaatttatccccctatcaaaaaaaaaatttttttttaaaaatgggaatataaaaaaaacatatcctgggcccttataaaaaaaactgaggggggaaaaaattacttttggggatttttttaaaaaaaactttttttgggggggaaaaaaatagggaacatcctcctctaaaaaaattaaccttttgaggaaaaa

SEQ ID NO: 135449 - DNA, 594 bp, Homo sapiens
cttcctggaaaaaaggatttattcattgaggcagatctcatgagccctttggatcgaattgccaatgtctccatcctgaagtgtatggcttcttacatctggggaagagtcccaccaaagatcgattccaagcttcgcttcttggatgagcgagggaaactaggcgctaacttacctattcacccccgcgcccgttcccggcagccgggactcagggaagccaggccctgctcgcgagtccccaccccgattgcgcacccgcgacttcagcccgaggggcggggattttcttggagcgacgggacgcgacgccaatcgcgacgaggcttcgccccgtggcgcggtttgaaattttgcggggctcaacggctcgcggagcggctacgcggagtgacatcgccggtgtttgcgggattccggtctacaccccgcagagactccgcagcgtacgaggagaaccccgccttctaccagaaaaagaagcgacttcctagatctcccggaagtccctttcgctcccagcgcttcgcgtaccaggaaggggacggcgtcctgaaagggacatttgaaaaacggaggcaacgcgtctattaa

SEQ ID NO: 135450 - DNA, 614 bp, Homo sapiens
ggctggaaggagatcagcgttggatcaacactgtatctcaggccttacaccttctcagcactctctatggaccctttccaaactgctatggaattggcaggtgcgccaagatggcatatgaattgtggaggaacctggaggaggaggaggatggcgaaaccaagggccgaaggccagagattggacatatctttctcttggacagaggtaaattatgcccagcgttcctgtcatctttcagccctagaagacacgggaatatggaaggcgtggtggcaaagttaaaatcctaaagttagggctgtgaatcccagctttgaggagcgtgggtccttggccctatggaaagtatcaaagctgcccttggacatgctgtgtagaaggctgggtcagggagaaccttcatggtcagggatctctgtttcagatgtggactttgtgacagcactttgctcccaagtggtttatgagggcctagtagatgacaccttccgcatcaagtgtggtaagtgctatggtcctctgcatcttggcaagatggacgggtcatcagccttggcacctgccacgtggggcagggtttgtgggagagacccacaccctgaatgaactgc

SEQ ID NO: 135451 - DNA, 402 bp, Homo sapiens
gtcccttagttagtaagttaggtcggtttaactcccaaagcacataccaataaactcgggttaccctgtggattgcatttagtagagagctggtaccccgtaggagggggaagactgtgggtggggagaagggtggggagtatatcttgattagttccagggaattatagttgaacagcttccgagagtttttggatgtgattggtgctgtcgtgtcctgaatggtgttatctgtggcagtgtcatgaatccatagaccttaggtgaaacctgacacagatttcttccccaggaaagattactgatgccttcagttctctggccaagaggagcaattttcgtgccatcagcaaaaagctgaatttggtatgtggaacagggatggttaggggagacagtggg

SEQ ID NO: 135452 - DNA, 677 bp, Homo sapiens
tgtcgaccgcattgagtttacgggtccacccacgcgttcgctgcacaggaatatttttctcctggccttttattactacttgccatagccttaactctgggctgccacagcatggtagcccagttataccagtcatagaaagcagtggtgcccaagagcatggcactcacgtctctgtctataaactggtgctgtgatcccgtggggactgtggaactggagaggctctatgggttgccgttggggcctaagatctgtgctgtcttttttgcttctgcatttaactccttaggatacaggttcattttcttgacgacagcagtcacaaacagcgctcgctttatggaggcaatgagtgaggtgaaagcctgttgtatataccggccagtgttgacatcttccctgaacacattcatcagtgagatgcaggcatctggcacccagctgctataaccaagtgtccacctattacctgttaagagccgggagtacggaacgtgttgggatatagagaacattatctgagaaaagagtttctcttcctgctcccaggatatttctcttttctgtttatgaagtacaacccatgctgctaagatgcgagcaggaagaggcatcctttgctaaatcctgtttgaatgtcattgtaaataaagcatcagctctcagatgtaaaa

SEQ ID NO: 135453 - DNA, 3073 bp, Homo sapiens
  misc_feature (1)...(3073): n = a,t,c or g
atggggcctgtggcagctcccctggggctctcattgccagcaacagatggtgctcactcagtcagaggcaactcagtactggtcccctcaggtttgatccccaaggattaccgatctctgaaaacacagtatctgcagagctatggccctgagcacctgctaaccttctccaatctgcgaagagctgggctcctaacggagcaggcccccggggacaccctcacagccgtggagagtaaagtgagcaagctggtgaccgacaaggctgcaggaaagattactgatgccttcagttctctggccaagaggagcaattttcgtgccatcagcaaaaagctgaatttgatcccacgtgtggacggcgagtatgatctgaaagtgccccgagacatggcttacgtcttcggtggtgcttatgtgcccctgagctgccgaatcattgagcaggtgctagagcggcgaagctggcagggccttgatgaggtggtacggctgctcaactgcagtgactttgcattcacagatatgactaaggaagacaaggcttccagtgagtccctgcgcctcatcttggtggtgttcttgggtggttgtacattctctgagatctcagccctccggttcctgggcagagagaaaggctacaggttcattttcctgacgacagcagtcacaaacagcgctcgccttatggaggccatgagtgagcttcctggaaaaaaggatttattcattgagacagatctcatgagccctctggatcgaattgccaatgtctccctcctgaagcaacacgaagtagacaagctatacaaggtggagaacaagccagccctcagctccaatgaacaattgtgcttcttggtcagaccccgcatcaagaatatgcgatacattgccagtcttgtcaatgctgacaaattggctggccgaactcgcaaatacaaagtgatcttcagccctcaaaagttctatgcgtgtgagatggtgcttgaggaagagggaatctatggagatgtgagctgtgatgaatgggccttctctttgctgcctcttgatgtggatctgctgagcatggaactaccagaatttttcagggattactttctggaaggagatcagcgttggatcaacactgtagctcaggccttacaccttctcagcactctctatggacccctttcccaaacttgctatggaattggcaggtgcgccaaagatggcatatgaatttgtggaaggaacctgggaggaggaggaggatggccgaaacccaagggcccgacgggaaggatttggaccatatctttctccttggacagaagatgtggactttgttgacagcactttgcttcccaagttggtttatgagggcctagtagatgacaccttccgcatcaagtgtgggagtgtcgactttggcccagaagtcacatcctctgacaagagcctgaaggtgctactcaatgccgaggacaaggtgtttaatgagattcggaacgagcacttctccaatgtctttggcttcttgagccagaaggcccggaacttgcaggcccagtatgatcgccggagaggcatggacattaagcagatgaagaatttcgtgtcccaggagctcaagggcctgaaacaggagcaccancgtgctgagtctccatattgggggcctgtgaatccatcatgaagaagaaaaccaagcaggatttccaggagcctaatcaagacttgagcatgcactgctagaggggttcaacatccgggagagcaccagctacattgaggaacacatagaccggcaggtgtccgcctatagaaagcctgcgcctcatgtgccttttgtccatcactgagaatggtttgatccccaaggattaccgatctctgaaaacacagtatctgcagagctatggccctgagcacctgctaaccttctccaatctgcgaagagctggggctcctaacggagcaggcccccggggacaacctcacagccgtggagagtaaagtgagcaagctgggtgaccgacaaggctgcaggaaagattactgatgccctcagtttctctggccaagaggagccaatttcgtgccatcagcaaaaagctgaatttgatccaccgtggggacggcgagtatgatctgaaagtgcccccgagacatggcttactctcacagtggtgcttatgtgcccctgagctgccgaatcattgagcaggtgctagagcggcgaagctggcagggccttgatgaggtggtacggctgctcaactgcagtgactttgcattcacagatatgactaaggaagacaaggcttccagtgagtccctgcgccttcatcttggtggtgttctggggtggttgtacattctctgagatcttcagccctccggttcctgggcagagagaaaaggctacaggttccattttccctgacgacagccagtcacaaacagcgctcgcccttatggaggcccatgagtgaggtgaaagcctgatgtttttccccggcccagtgttgacatccttcccctgaacacattcctcagtgagatgcaggcatctggcacccagctgctataaccaagtgtcccaccaactacctgctaagagccgggagcatggaacgtgttgggatttagagaacattatctgagaaaagagttcacttcctgctcccaggatatttctcttttctgtttatgaagtacaacccatgctgctaagatgcgagcaggaagaggcatcctttgctaaatcctgtttgaatgtcattgtaaataaagcctctgctctcagatgtaatacgttggtcgttctggacacgcacttccatctttattagtgaaagcccattggagcttgctacaggggcttcctgtgcttcttggcctggactttgtagtggctccaggcctggtctggttcttccctgtaaaaatcactctaccactctgtacctgagtttcctcaaccataaaatgagggagatggctgaggtgaccagcaagcacgtttccagttctaaaatgttgtgattcattacatttttgagaaaatgaaaaaaaaaaa

SEQ ID NO: 135454 - DNA, 306 bp, Homo sapiens
  misc_feature (1)...(306): n = a,t,c or g
gaaaaatacattgaagaacagctgctgcagcggattcctgagttcaacatggcagccttcaccacaacattacagcaccataaggatgaagtggctggtgacatattcgacatgctgctcaccttcacagattttttggcttttaaagaaatgtttttggactacagagcacttcccagaacaatctgcggcactaggtcctacctccagccaatgantgggatcattctggatgtcaccagcccaataggctcagctcatgatgacagaacacatcttgggaaagactgactctggttatgtaac

SEQ ID NO: 135455 - DNA, 470 bp, Homo sapiens
  misc_feature (1)...(470): n = a,t,c or g
cgagttgggccgcgggcggggttggagcctactcggggcgactgcgatggacgccttagaaggagagagctttgcgctgtctttctcctccgcctctgatgcagaatttgatgctgtggttggatatttagaggacattatcatggatgacgagttccagttattacagagaaatttcatggacaagtactacctggagtttgaagacacagaagagaataaactcatctacacacctatgaatgtatgctgtgtgctagaaatagactaaaacatattcctatagcatgttagtgtgtttgcatgtttgctgaaaatcctttgtgtataaaccagtttgtaaggttctctgggttaggtagggactctgcagtttcttcctgtcaaaatctctcctaccaagatggtgttccactgtccagcccagcatgagtagcaggtagagcacagctntactggctgttgtatgc

SEQ ID NO: 135456 - DNA, 2067 bp, Homo sapiens
agcggccgcgccctgcatgcgagttgggccgcgggcggggttggagcctactcggggcgactgcgatcggacgccttagaaggagagagctttgcgcgtgtctttcatcctccgcctctgatgcagaatttgatgctgtggttggatatttagaggacattatcatggatgacgagttccagttattacagagaaatttcatggacaagtactaccttggagtttgaagacacagaagagaataaactcatctacacaccctatttttaatgaatacatttctttggtagaaaaatacattgaagaacagcatgctgcagcgggattcctgagttcaacatggcagcctttcaccacaacattacaccatctgttcccgtttgcaggcaccataaggatgaagtggcttggtgacaatattcggcaatgctggctccacctttcacaagattttcctgggctttttaaagaaatgtttttgggacttacagaggcaggaaaaaggaaggccgaggactgggacttaagcagtggcttagttggtgacttcattgtgcaaatcatcttctctggccagcttcccagaacaatctgcggcactaggtcctacctccagccaatggaatggggatccattctgggatgtcaccagcccaatagggttcagctcatgattgacagaacacatcttgggaaagactgactctgttatgtaactcttccatttatgttaagtatttaataaggtcaaaaccaaaatggacctaaccctcctggacctattttatccggaaacaccttcttgtattcattaaccatagtactcctccccacctcaagtagacacctctctcaggagcttctgaagtcagacgcctctgggagcgagccctatgtcagggcactcccacctggggggggccctttccccaggcataacctgctgggtgttgttaagtgtgggacttaaccccgccgcccaccaccctctgttcccagcagggctctgcatggaatctttgtggcacttgcacctcttttttcacatggggccacagttttcagtatttcaggcctcagtgggggttcctggatgtttatcttggggtgtttacttcaaggcccagtttgagattttgggagtctcctgtgatcacatcttgtgttcgggtgtagggaatcaacagaagggagacgtcctcttacataaaaagctccatgtggaaaagctactcctagtctttaacatttggcagtccttgtgttcactgtcttctgggtcctgatgtagtcccactgttttctaggaagtctcttttaagcattatttttgaaaaaaaaaatatttttatagatgaatactcaggctaaccctagtggatgtgatcttggaacttccatgattatccacttaaagatcaaagtattaatatgctgtgtgcttttttaggtgtttgttagtactgggaaggcaaaaatgccttcctaccatggacattccatccctattttactggggcacctatggaatgtatgctgtgtgctaggaaataggactaaaaccatattccctatagccatgttagtgtgtttgccatgtttgctgtaaaatccctttgtgtataaaaccagttttgtaaaggttcctctggggttaggtaggggactctgccagtttccttccctgtcaaaatctcctccctacccaagatggtgtccccactgtcccagccccagcatgagtagcaggtagagcacagcttttactggctgtttgtatgcctttggtttaagtgcaatgtgtgggtaggattacttatccaggaaaacatattatgtccatctcttaggaacggaggaaaaaagcatagtagttccaattccccagtgtgtcccctttgattttttttttttttaatagtaaaaataaggaatctgtactgacttttcacttggcctattctggtttttaaaggacaagctacaagctctgtgtttctgtactgatgtgtcacttattaaatacttttgtaccatgatttacacttccctcggccaggcaggcgt

SEQ ID NO: 135457 - DNA, 462 bp, Homo sapiens
gaccccgctgcaggaattcggcacgagggcacgcgggactgctacgaggtgctgggcgtgagccgctcggcgggcaaggcggagatcgcgcgggcctaccgccagctggcccggcgctaccaccctgaccgctaccggccccagcccggagacgagggccccgggcggacgccgcagagcgccgaggaggctttcctgctggtggcaaccgcctacgagacactcaagtcctcctgcatatgcccaagaggattgggagtggaatggacaccagcagaagcaccacagttattcctgtagagattagaaacaaggagcttattgccctgcttgtcaaggctcaggacagacaggaggaagaaacaagtataaagggtttggttttggaaagaagttggaatctccagaccctgggaccttaagatccacaaaattggtgaaagaaaaaaggctatcttattg

SEQ ID NO: 135458 - DNA, 1757 bp, Homo sapiens
atgggggcgccgctgctctctcccggctggggagccggggctgccggccggcgctggtggatgctgctggcgcccctgctgccggcgctgctgctggtgcggcccgcgggggccctggtggaggggctctactgcggcacgcgggactgctacgaggtgctgggcgtgagccgctcggcgggcaaggcggagatcgcgcgggcctaccgccagctggcccggcgctaccaccctgaccgctaccggccccagcccggagacgagggccccgggcggacgccgcagagcgccgaggaggctttcctgctggtggcaaccgcctacgagacactcaagattgtttttccagagctgaaaatagtcaaggagctaacaactttattgatgccttccagagcagtttggataatttggagtcataaaatgagtggtggaggggcgggccctgaactagatattggttatgttccagtcctcctgcatatgcccaagaggattgggagtggaatggacaccagcagaagcaccacagttattcctgtagagattagaaacaaggagcttattgccctgcttgtcaaggctcaggacagacaggaggaagaaacaaattataaactaaggccatttaatggactgtcctatgaagttggatatcttgtcattttacaggatgaagaaacacgaaaagattatgattacatgctggatcatccagaagagtactacagccattactaccactactatagcaggcgcttggcccctaaggtggatgttagagtagtgattttggtcagcgtgtgtgctatttcggtgtttcagtttttcagctggtggaatagctacaataaggcaatcagctacctagccacagtgcccaagtaccgtatccaagctacagagattgccaagcagcagggactgctcaaaaaagccaaagcaaaaagcaaaaacaacaaagtccaaagaagaaattcgtgacgaggaggagaacatcataaagaacattataaaaagtaaaatagatataaaggggggctatcagaaaccccaaatctgtgatcttctcctgtttcaaattatcttagctccttttcacctatgctcatatatagtttggcattgtcggtggatctataattttaacatcaaaggcaaagaatatggagaggaagagagattatacattatacgtaaatctatgaagatgtcaaagtctcaatttgatagtctagaagatcatcagaaagaaacttttcttaaacgagagctctggatcaaggagaattatgaggtctacaagcaagaacaagaggaagaattaaagaaaaagttggcaaatgaccccagatggaagagatacaggagatggatgaagaatgaagggcctgggcggttaacatttgtggatgactgaagattgatggaatgctactatgccaaaccttaattgtgatattattttcataactgaattattttaggaattgtatcaattggctgctgctcagcagtaactaaaattcctcaagtatttgattaaacagaataatgtcaaaatttaaaccttcccttaaaactttatacataagacatttatgattgttcaatttttataatctatttgtggattttgttaaaagatttcacatgaagatttattagttgccatttaaaatttttatatgtttagttaaaagatttgacatgaaaatttattagataccatttaaaaattttaaaaaaaaaaaaaa

SEQ ID NO: 135459 - DNA, 1269 bp, Homo sapiens; identical to SEQ ID NO: 121645

SEQ ID NO: 135460 - DNA, 739 bp, Homo sapiens
atgcctgaggaagtgcaccttggagagaaggaggtggagacttttgcctttcaggcagaaattgcccaactcatgtctcttatcatcaataccttctattccaacaaggagattttcctttgggagttgatctctaatgcttctgatgccttggacaagattcgctatgaaagcctaacagacccttccaagttggacagtggtaaagagctgaaaattgacatcatccccaatactcaggaacataccctgactttggtagacacaggcattggcatgaccaaagctgatctcataaataatttgggaaccattgccaagtttcaagatcagacagagtacttagaagagatgcaggtcaaagaagtagtggagaagcactctcagttcctaggctatcccatcaccctttatctggagaaggaacgagagaaagaaattagtgatggtaaggcagaggaagagaaaggtgagaaagaagaggaaaataaagatgacgaagaaaagcccaagatcgaagatgtgggttcagatgaggaggatgacagtggtaaggataagaagaagaaaactaagaagatcaaagagaaatacattgatcaggaagaactaaacaagaccaagcctatttggaccagaaacactgaagacatcacccaagaggagtatggagaattctataagagcctcaccaatgactggaaagaccacttggcagtcaggtacttttctgtagaag

SEQ ID NO: 135461 - DNA, 608 bp, Homo sapiens
ccaggtatctcattttatcgtggtgtggtgactctgggactgcccctgaacatctcccgagaaatgctccagcagagcaaaatcttgaaagtcattcgcaaaaacattgttaagaagtgccttgagctcttctctgagctggcagaagacaaggagaattacaagaaattctatgaggcattctctaaaaatctcaagcttggaatccacgaagactccactaaccgccgccgcctgtttgagctgctgcgctatcatacctcccagtctggagatgagatgacatctctgtcagagtatgtttctcgcatgaaggagacacagaagtccatctattacatcactggtgagagcaaagagcaggtggccaactcagcttttgtggagcgagtgcccctgtcccacctggctccccctgctggtgtctagtgtttttttccctctcctgtccttgtgttgaaggcagtaaactaagggtgtcaagccccattccctctctactcttgacagcaggattggatgttgtgtattgtggtttattttattttcttcattttgttctgaaattaaagtatgcaaaataaagaatatgccgtttttatacaaaa

SEQ ID NO: 135462 - DNA, 2657 bp, Homo sapiens
  misc_feature (1)...(2657): n = a,t,c or g
actccggcgcagtgttgggactgtctgggtatcggaaagcaagcctacgttgctcactattacgtataatccttttcttttcaagatttttattttagatgcctgaggaagtgcaccatggagaggaggaggtggagacttttgcctttcaggcagaaattgcccaactcatgtccctcatcatcaataccttctattccaacaaggagattttccttcgggagttgatctctaatgcttctgaatgccttggacaagattcgctatgagagcctgacagacccttcgaagttggacagtggtaaagagctgaaaattgacatcatccccaaccctcaggaaccgtaccctggactttgggtagacacaggcattgggcatgaccaaagctgatctcataaataatttgggaaccattgccaagtctggtactaaagcattcatggaggctcttcaggctggtgcagacatctccatgattgggcagtttggtgatggcttttattcgcgccaacttggtggcaaaagaaagtggttgtgatcacaaagcacccccgatgatgaacagtatgcttgggagtcttctgctggaggttccttcactgtgcgtgctgaccatggtgagcccattgnccaggggtaccccaagtgatcctccatcttaaagaagatcagacagagtacctagaagagaggcgggtcccaagaagtagtgaagaagcatttctcagttcataggctatcccatcaccctttatttggagaaggaacgagagaaggaaattagtgatgatgaggcagaggaagagaaaggtgagaaagaagaggaagataaagatgatgaagaaaaacccaagatcgaagatgtgggttcagatgaggaggatgacagcggtaaggataagaagaagaaaactaagaagatcaaagagaaatacattgatcaggaagaactaaacaagaccaagcctatttggaccagaaaccctgatgacatcaccccaagaggagtatggagaattctacaagagcctcactaatgactgggaagaccacttggcagtcaagcacttttctgtagaaggtcagttggaattcagggcattgctatttattcctcgtcgggctccctttgacctttttgagaacaagaagaaaaagaacaacatcaaactctatgtccgccgtgtgttcatcatggacagctgtgatgagttggtaccagaataatctcaattttatcccgggtgtggttgactctgaggatctgcccctgaacatcttccgaaaaatgcttcaacaaaacaaaatctttggaaggtcattcgcaaaaacattgttaagaagtgccttgagctcttctctgagctggcagaagacaaggagaattacaagaaattctatgaggcattctctaaaaatctcaagcttggaatccacgaagactccactaacccgccgccgcctgtctgagctgctgcgctatcatacctcccagtctggaagatgagatgacatctctgtcagagtatgtttctccgcatgaaggagacacagatgtccatctattacatcactggtgagagcaaaagagcaggtggccaactcagcttttgtggagcgagtgcggaaacggggcttcgaggtggtatatatgacccgagcccattgaacgagtactgtgtgcagcagctcaaggaatttgatgggaagaagctggttctcagttaccaaggagggtctggagctgcctgaggatgaggaggagaagaagaagatggaagagagcaaggcaaagtttgagaacctctgcaagctcatgaaagaaatcttagataagaaggttgagaagggtgacaatctccaaatagactttgtgtcttcaccttgcctgcattggtcacaagcacctaggggcgggtcaggcattaattgagcgggatcatgaaaagcccagggcacttcgggaccatcccccccaggggggtattatgatgggcaaaaaagcaccttgagaatcaccccctgaccacccccattttgtggagacgcgtgcgggcagaaaggctgatgcccgacaagtaatgataagggcagttaaggaccctggtgggtgctgcttgtttgaaacccgcccctgctatcttctggctttttccttggaggatccccagaccccactcccaaccgcatctatcgcataaaanttacaaagcttaggtctaggtatttgatgaagatgaaagtggcagcagaggaacccaatgctgcagttcctgatgagatcccccctctcgagggcgatgaggatgcgtctccgcatggaagaagtcgattagggtaggagtttcatagttggaaaacttgtgcccttgtataggtgtccccatgggcttcccactgcagcctcgagtggcccctgtcccacctggctccccgctgctggtgtctagtgtttttttcccctctccctgtcccttgttgttgaaggccaagtaaactaagggtgtcaagccccattccctctctatctcttgacagcagggattggatgttgtgtattgtggtttaatttatttacattcatttttgttttgaaattaaagtatgcaaaataaagaatatgccgtttttatacaaaaaaaaaaaaaaaaaaa

SEQ ID NO: 135463 - DNA, 429 bp, Homo sapiens
atgattgaaaaagtcagactatctgctgccaaactcttgactgaatatggcgttagtgttttggttttagaagctcgggacagggttggaggaagaacatatactataaggaatgagcatgttgattacgtagatgttggtggagcttatgtgggaccaacccaaaacagaatcttacgcttgtctaaggagctgggcatagagacttacaaagtgaatgtcagtgagcgtctcgttcaatatgtcaagctctcttctgatggtcatcctgtgtccatcattgtgtccccatatgcagtgctggtgaccattttgctcaatcttttgacccggaagcctgaaagagcagtgttaactacctgctatgatacaagcactgtgccttggttattgtttgatggatgcagtaactggaaaacagccatttaa

SEQ ID NO: 135464 - DNA, 1308 bp, Homo sapiens
aatgagcatgttgattacgtagatgttggtggagcttatgtgggaccaacccaaaacagaatcttacgcttgtctaaggagctgggcatagagacttacaaagtgaatgtcagtgagcgtctcgttcaatatgtcaagtggccctcacaagctatcctcactcccagaatgggaggctctgggttccctcctaatgcatttgaaggccacaggggtgggggtggcaggactgctaggcggtttgcttatctttttgtgaatatcaatgtgacctctgagcctcacgaagtgtctgccctgtggttcttgtggtatgtgaagcagtgcgggggcaccactcggatattctctgtcaccaatggtggccaggaacggaagtttgtaggtggatctggtcaagtgagcgaacggataatggacctcctcggagaccaagtgaagctgaaccatcctgtcactcacgttgaccagtcaagtgacaacatcatcatagagacgctgaaccatgaacattatgagtgcaaatacgtaattaatgcgatccctccgaccttgactgccaagattcacttcagaccagagcttccagcagagagaaaccagttaattcagcggcttccaatgggagctgtcattaagtgcatgatgtattacaaggaggccttctggaagaagaaggattactgtggctgcatgatcattgaagatgaagatgctccaatttcaataaccttggatgacaccaagccagatgggtcactgcctgccatcatgggcttcattcttgcccggaaagctgatcgacttgctaagctacataaggaaataaggaagaagaaaatctgtgagctctatgccaaagtgctgggatcccaagaagctttacatccagtgcattatgaagagaagaactggtgtgaggagcagtactctgggggctgctacacggcctacttccctcctgggatcatgactcaatatggaagggtgattcgtcaacccgtgggcaggattttctttgcgggcacagagactgccacaaagtggagcggctacatggaaggggcagttgaggctggagaacgagcagctagggaggtcttaaatggtctcgggaaggtgaccgagaaagatatctgggtacaagaacctgaatcaaaggacgttccagcggtagaaatcacccacaccttctgggaaaggaacctgccctctgtttctggcctgctgaagatcattggattttccacatcagtaactgccctggggtttgtgctgtacaaatacaagctcctgccacggtcttga

SEQ ID NO: 135465 - DNA, 3436 bp, Homo sapiens
ggcggagccaggccggcctatagtcacttctccccgcccctgactgggccgggagcccggggctggtctctaagagtgggtaccgagaacagcctgaccgtggagaagggctgcgggaagcagaacaccgcccccagcgcccagcgtgctccagaaacatgagcacaaacgcctcagcctccttccccggcggcaccggcaccggcaccagtacccgcaccagtaccggcaccggcaccagtacccgcaccagtaccggcaccggcaccagtacccgcaccagtaccggcaccggcaccagtacccgcaccagtaccggcaccggcaccgagcgcaaggcggagggcccgcccgaagccgggggcacaactgcccaggtcccgaacccggactccagcttggacgacacctcctacagcctgtccgaatggagcgtccgttctgagtggcggtccgtctcggatccgctagccagttcccaagtggagcacgtcctcaactgccgaggccgccttcctggagctccagcatacactccccaatcagcactaccggtcttagcgagagtactgactccgactccaagagtggcctccggggtttcagcgcttacaacccgagcagtcggatccccaagtctaccaccagctcgaactcctccgatggggccgtcacagcctccaatcaggacaccggcattccctgggtattagtaacaggacctaccccgcccgtaaactcccccgtagagtcattgcaagggtctgccttctcctcagggttcagcaccccacggggtttggtaaaaggaccgaccctgcccccggattccaacctgacctcagtgtccgactacacttggatatttgtacggggacctcctatacccaatgacctttcgcaagtgtcaatacaagcacctcctacacccagtaacacccccgagtgtcagtacaagggtctgccgcatcctcagtgtccagcttcccctggggtttggtaccaggaccacctctacccaataacatttccccagtgtcgccacaagcacctcctgcaccccataacatccccccagtgtcaaggcaggcgtctacccccacctcagtgcctgacactccgcggggttcaatacaagaacctcctgcacccagtaatcctttccagctgccgacacaaggacattctaaacctaataactctcgccgagtgtcagtacaagggtccgccccgctctcagtgcccagctccccccgggtatcagctgaaacatcagctccgcccctgggcgctcccggagtatcagcaaaaggtgcccggctccccccgggtatcaaaagaaggatcggctccgcccccgggctccccgggggagttgatagaagggtccttcccaccctttgccgtccccactcctgtgcctacgacccaggagcgtgtcagccaaagcatggagaatcaagagaaggcgagtatcgcgggccacatgttcgacgtagtcgtgatcggaggtggcatttcaggactatctgctgccaaactcttgactgaatatggcgttagtgttttggttttagaagctcgggacagggttggaggaagaacatatactataaggaatgagcatgttgattacgtagatgttggtggagcttatgtgggaccaacccaaaacagaatcttacgcttgtctaaggagctgggcatagagacttacaaagtgaatgtcagtgagcgtctcgttcaatatgtcaaggggaaaacatatccatttcggggcgcctttccaccagtatggaatcccattgcatatttggattacaataatctgtggaggacaatagataacatggggaaggagattccaactgatgcaccctgggaggctcaacatgctgacaaatgggacaaaatgaccatgaaagagctcattgacaaaatctgctggacaaagactgcttaggcggtttgcttatctttttgtgaatatcaatgtgacctctgagcctcacgaagtgtctgccctgtggttcttgtggtatgtgaagcagtgcgggggcaccactcggatattctctgtcaccaatggtggccagcgaacggaagtttgcaggtggatctgggcaagtgagcgaacggataatggacctcctccgtgaccaagtgaagctgaaccatactgtcactcacgttgacccagcaaggggacaacatcatcatagagacgctgaaccatgaacattatgagtgcaaatacgtaattaatgcgatccctccgaccttgactgccaagattcacttcagaccagagcttccagcagagagaaaccagttaattcagcggcttccaatgggagctgtcattaagtgcatgatgtattacaaggaggccttctggaagaaggaagggattactgtggctggcatgatccattggaagatggaaggatggcttccaatttcaataaaccttgggatggacaccaaggccagatggggtcactgcctgccttcatggggctttcattcttgcccgggaaagctgatcgacttgctaagctacataaggaaataagggaagaaaggaaaatctggtgaggctctatggccaaagtggctggggattccaagaaagctttaccatccagtggcattatgaagagaaggaactgggtgttgagggagcagtacttctggggggctgctacacggcctactttccctcctgggggatcatggacttcaatattgggaaggggtgatttcgttcaaccccttggggcagggatttttcttttttcgggggcacagagactgccacaaagtggagccggctacatgggaagggggcagtttgaggcttggagaacgagcagctaggggaggtctttaaatggtctcgggaaggtgacccgagaaaagacatctgggtaccaggaacctgaatccaaaggacgttccagcggtagaaatcaacccacaccttcttggggaaaggaaccttgccctcttgtttctggccctgcctgaagatcattgggattttcccacatcgagtaactgcccctgggggtttgtgcttgttacaaatacaagctcctgccacggtctttgaagtttctgtttcttatgctctctgcttcactggttttcaataccaccaagaggaaaaatattgacaagttttaaaggctgtgtcaattgggccatgtttaaagtgtactggatttaacttacctttggctttaatcccaatcattgttaaaagtaaaaacaatttcaaagaatcacctaattaattttcagttaaggttcaagctcccttcttattttgttcagtgttaggttcaactcatgtttattgattaggattaaagccttgtgattcactttctggaaatttcacaaagttaaacgtgatgtgctcatcagaaac

SEQ ID NO: 135466 - DNA, 767 bp, Homo sapiens
cgtgcgcaagtacttccagctagatgttaccctggctcaactgtatcaccactggggttccgtggactcccacttccaagaggtggctcagaaattccaaggtgtgcgactgctgcgacaagaccccatcgaatgccttttctcttttatctgttcctccaacaacaacatcgcccgcatcactggcatggtggagcggctgtgccaggcttttggacctcggctcatccagcttgatgatgtcacctaccatggcttccccagcctgcaggccctggctgggccagaggtggaggctcatctcaggaagctgggcctgggctatcgtgcccgttacgtgagtgccagtgcccgagccatcctggaagaacagggcgggctagcctggctgcagcagctacgagagtcctcatatgaggaggcccacaaggccctctgcatcctgcctggagtgggcaccaagggcctccttggcaatgcatttgatggccaccagcttctgcgtcctcttatcttctgccaggatcacctccgagaaggcccccctatcgggagaggggattcacaaggtgaagaactggaaccccagcttccctccagcctctcctccattccctatgggttctgtgaccactgctggaccaaggacgtggatgaccctcccctagtcactcatccatcccctggctccagagatggtcacatgacccaggcctggccagtcaaagtagtctctcccctggccacagtaattggtcatgtgatgc

SEQ ID NO: 135467 - DNA, 585 bp, Homo sapiens
cgtgcgcaagtacttccagctagatgttaccctggctcaactgtatcaccactggggttccgtggactcccacttccaagaggtggctcagaaattccaaggtgtgcgactgctgcgacaagaccccatcgaatgccttttctcttttatctgttcctccaacaacaacatcgcccgcatcactggcatggtggagcggctgtgccaggcttttggacctcggctcatccagcttgatgatgtcacctaccatggcttccccagcctgcaggccctggctgggcctccttggcaatgcatttgatggccaccagcttctgcgtcctcttatcttctgccaggatcacctccgagaaggcccccctatcgggagaggggattcacaaggtgaagaactggaaccccagcttccctccagcctctcctccattccctatgggttctgtgaccactgctggaccaaggacgtggatgaccctcccctagtcactcatccatcccctggctccagagatggtcacatgacccaggcctggccagtcaaagtagtctctcccctggccacagtaattggtcatgtgatgc

SEQ ID NO: 135468 - DNA, 7632 bp, Homo sapiens
atgggggtggactttgatgtgaagactttctgccacaacttgcgggcgactaagccaccatacgagtgcccggtggagacctgccgaaaggtctacaagagttacagtggtattgagtaccacctgtaccactatgaccacgacaacccaccacccccacaacaaactccactccgcaagcacaagaaaaaggggcgccagtcacgcccagccaacaagcagtcacccagcccctcagaggtctcacagtcaccaggccgtgaggtgatgagctatgcacaggcccagcgcatggtggaggtggacttgcatggccgcgtccaccgcatcagcatctttgacaacctggatgtggtgtcagaggatgaggaagcccccgaggaggcccctgagaatggcagcaacaaggagaacactgagacaccagctgctactcccaagtcaggcaaacataagaacaaggagaagcgcaaggactccaaccatcaccaccaccacaatgtttctgcgagcaccactcccaagctgccagaggtggtctatcgggagctggaacaggacacccctgatgccccaccccggccaacttcctattaccggtacatcgagaagtctgcagaggagctggacgaggaagtagagtatgacatggacgaggaggactacatctggctggatatcatgaatgagcgtcggaagacagagggtgtaagtcccatcccgcaggagatctttgagtacctaatggaccgactggagaaggagtcgtactttgagagtcataataaaggcgaccctaatgcgctagtggacgaggatgctgtttgctgtatctgcaatgatggtgagtgccagaacagcaatgtcatcctcttctgtgacatgtgcaacctggccgtgcaccaggagtgctacggtgtcccctatatccctgagggccagtggctgtgccgccgttgcctgcagtcaccctctcgtgctgtggattgtgccctgtgccccaacaagggcggtgccttcaagcagacagatgacgggcgctgggcccatgtggtgtgtgccttgtggatccctgaggtctgcttcgccaacacggtcttcctagagcctattgacagcattgagcacatcccaccagctcgctggaagctcacctgctacatttgcaaacaacggggctcaggggcctgcatccagtgccacaaggccaactgttacacagctttccatgtgacatgcgcccagcaggctggcctttacatgaagatggagcctgtgcgggagacaggcgccaacggcacctctttcagtgtccgcaagacagcctactgcgacatccacacgcctccaggttcagcacgccgactgcctgccctgtcccacagcgagggtgaggaggatgaagatgaggaggaggatgagggtaagggctggagctcagagaaagtcaagaaggccaaggccaagtcccggatcaaaatgaagaaggcacggaagatcctggcagagaagcgggcagcagcacctgtggtgtcagtgccctgcatcccaccacacaggcttagtaaaatcaccaaccgcctgaccatccaaaggaagagccagttcatgcagaggctgcacagctactggacactgaagcggcagtcacggaatggggtcccattgctacgtcgcctgcagacacacctgcaatctcagaggaactgtgaccaagttgggagagattctgaggataagaactgggcccttaaagaacagctcaagtcctggcagcggctccggcatgacttggagcgagctcggctgctcgtggaattgatccgcaagcgggaaaaactcaaaagggagacgatcaaggttcagcagattgccatggagatgcagctgactcctttcctcatcctccttcgcaaaaccttggagcagctccaagagaaggacacaggcaacatcttcagcgagccggtccctctgtctgaggtaaccgaattggacgaagtacctgactacctagaccacatcaaaaagcccatggactttttcaccatgaagcagaacttggaggcttaccgctacctgaattttgatgattttgaggaggacttcaacctcatcgtcagcaactgcctcaagtataacgccaaggacaccatcttctaccgggcagcagtgcggcttcgtgagcagggtggtgctgtgctccgccaggcccggcgccaggcagaaaaaatgggcattgactttgagacgggcatgcatatcccccacagcctggctggagatgaggccacacaccacactgaagatgcagccgaggaagagcggctggtcttgctggagaaccagaagcacctgccagtggaagaacagctaaagctgcttctggagcggctggacgaagtgaatgccagcaagcagagtgtgggccgctcacggcgtgcaaagatgatcaagaaagagatgacggcactgcggcggaagcttgcccatcagcgagagacgggacgtgatggccctgagcggcatggcccctcgagccggggtagtctgacaccccacccggcagcctgtgacaaggatgggcagacagatagtgcggcagaggagagcagcagccaggagacaagcaaaggcctgggtcccaacatgtcctcaacccccgcacatgaggtgggcaggagaacctcagttctgttctccaaaaagaacccgaagacagctggaccgcccaagaggccgggccggccccccaaaaaccgggagagccagatgacccccagccacggaggcagtcctgtggggcccccccagctccccatcatgagttccctgcgtcagcgcaagcggggtaggagcccccggcccagttcgagctcagacagcgacagtgataagtccacagaagaccccccaatggacttaccagccaatggcttcagcggtggaaaccaaccagtgaagaagagtttcttggtataccgtaatgactgcagccttccccggagcagctcagactctgagtccagcagcagtagcagtagcagcgctgcttcagaccggaccagcacaacgccctcaaaacaaggccggggcaaaccctccttctctcggggcactttcccagaggacagcagtgaggatacctcaggcactgagaatgaggcctactccgtgggcactggccgcggcgtgggccacagcatggtaaggaagagtctgggccggggagctggctggctgtcagaggatgaggactccccgctggatgctctggacctcgtgtgggccaaatgccgaggctatccatcatacccagctctgatcattgatccaaagatgccccgagaaggtatgttccaccatggggttcccatccctgtgcccccactggaggtgctgaaacttggggagcagatgacccaggaagcccgagagcatctctacctcgtcctcttctttgacaacaaacgaacctggcagtggctgcccaggaccaagctggttcctctgggtgtgaaccaggacctagacaaggagaagatgctggagggccgcaagtccaacatccgcaagtcagtacagatcgcctaccacagggctctgcagcaccgcagcaaggtgcaaggcgagcagagcacctccactcctgccctgtgggcctccatcccgtgccctcgctctgagctgcgcctggacctggttctgccttctggacaatctttccggtggagggagcaaagtcctgcacactggagtggtgtactagcggatcaagtatggacactgactcagactgaggagcagctccactgcactgtgtaccgaggagacaagagccaggctagcaggcccacaccagacgagctggaggccgtgcgcaagtacttccagctagatgttaccctggctcaactgtatcaccactggggttccgtggactcccacttccaagaggtggctcagaaattccaaggtgtgcgactgctgcgacaagaccccatcgaatgccttttctcttttatctgttcctccaacaacaacatcgcccgcatcactggcatggtggagcggctgtgccaggcttttggacctcggctcatccagcttgatgatgtcacctaccatggcttccccagcctgcaggccctggctgggccagaggtggaggctcatctcaggaagctgggcctgggctatcgtgcccgttacgtgagtgccagtgcccgagccatcctggaagaacagggcgggctagcctggctgcagcagctacgagagtcctcatatgaggaggcccacaaggccctctgcatcctgcctggagtgggcaccaagctcctggcgctcggcggggctaactgcagcgcggagatctcggccgccaagctccgcctcccgccccgggctgtgccccggggctcgcctgaggccgaccacccgcaccccacctctagcggctttgctcgaggcccaccttcttcccacccccggcaaactccactccacaggatccccatatcctgggccatgagtgagttgaaagactgccccttgcagttccacgacttcaagtctgtggatcacctgaaggtctgtccccgctacacggcagtgctggcacgctctgaggatgatggcatcggcatcgaggagctggacaccctgcagctggagctggagaccctgctgtcttctgccagccggcgcctgcgtgtgcttgaggccgaaacccagatcctcaccgactggcaggataagaaaggtgacagacgattcctgaagctgggtcgagaccatgaacttggagctccccccaaacatgggaagcccaagaagcagaaactggaagggaaggcaggacatgggccgggccctggcccaggacggcccaaatccaaaaaccttcagcccaagatccaggaatatgaattcactgatgaccctatcgacgtgccacggatccccaaaaatgatgcccccaacaggttctgggcttcagtggagccctactgtgctgacatcaccagcgaggaggtccgcacacttgaggagttactgaagcccccagaagatgaggctgagcattacaagatcccacccctggggaagcactactcccagcgctgggcccaggaggacctgctggaggagcagaaggatggggcccgggcagcggctgtggctgacaagaagaaaggcctcatggggccactgaccgaactggacactaaagatgtggatgccctgctgaagaagtctgaggcccagcatgaacagccggaagatggatgcccctttggtgccctgacgcagcgcctcctgcaggccctggtggaggaaaatattatttcccctatggaggattctcctattcctgacatgtctgggaaagaatcaggggctgacggggcaagcacctcccctcgcaatcagaacaagcccttcagtgtgccgcatactaagtccctggagagccgcatcaaggaggagctaattgcccagggccttttggagtctgaggaccgccccgcagaggactccgaggatgaggtccttgctgagcttcgcaaacggcaggctgagctgaaggcacttagtgcccacaaccgcaccaagaagcacgacctgctgaggctggcaaaggaggaggtgagccggcaggagctgaggcagcgggtgcgcatggctgacaacgaggtcatggacgcctttcgcaagatcatggctgcccggcagaagaagcggactcccaccaagaaagaaaaggaccaggcctggaagactctgaaggagcgtgagagcatcctgaagctgctggatggagttccaaatgccttacagctgactttcagcaacaccagggttgagcgcattgagaagagatgtctggagctgtttggccgagactactgtttcagcgtgattccaaacacgaatggggatatctgtggccactatccccggcacatcgtgttcctggagtatgagagttctgagaaggagaaagacacgtttgagagtaccgtacaggtgagcaagttgcaagacctcatccaccgcagcaagatggcccggtgcagaggacggtttgtctgcccagtaatcctgttcaagggcaaggtagagatggagaagccttcagatgggggtgcagatgatgcctgggcagatgtggaggacgtcacggaggaggactgtgctcttcgaagtggtgacacgcatctttttgataaggtcagaggctatgacatcaagctgcttcgatacctgtcagtcaaatacatctgtgacctgatggtggagaacaagaaggtgaagtttggcatgaatgtaacctcctctgagaaggtggacaaagcccagcgctatgccgacttcactctcctctccatcccgtatccagatgatgatgatggtggtgatgatgttgatgatggtgatgatgatgatgatgataatgatgctggagactacgttgatgccccattgagcatccccgacttcctgactcactctctgaacattgactggagccagtatcagtgttgggatctggtgcaacaaacacaaaactacctgaagctgctgctttccttagttaacagtgatgggcagacggactctaaatccctggtagcaatcaggacttctgtaggaggtgcacttgctcaaacaagtggaaatgcattggcttatggaaccaagaaggcccaagaacagagccaggatgggctcatccacacgtccctgaagcccactgagatcctctacctcactgtggcctatgactggttcctcttcgggcacatgttggtagattggctcagcaaaggtgctgagattttcttcttctgcttcaattttttgaagcatattacctccgaggagttctctgctctgaagacccagaggaggaagagtttgccagcccgggatggaggcttcaccctggaagacatctgcatgctgagacgaaaggaccgtggcagcaccaccagccttggcagcgacttctccctggtcatggagagttccccaggagccactgggagcttcacctatgaggccgtggagctggtcccagcaggagcgccaactcaggcagcttggaggaagagccactcatcctctccacagagtgtcctctggaaccggccacaaccctcagaggaccgcttgccttcccagcaggggctggcggaagccaggtcttccagctcctcttcctcaaaccattctgataactttttcaggatgggtagcagtcccctggaggtccccaaacccagatcagtggaccatcccctgcccggatcctctctctccacagactatggcagctggcagatggtaacgggctgtggcagtattcaggagcgggctgtcctgcacacagactcctctctccctttcagcttcccggatgagctccctaacagttgtctgcttgcagccctgagtgatcgagagactcggctgcaggaggtgcgctcagccttcttggctgcgtacagcagcacagtggggcttcgggcagtagcccccagtccttccggtgccatcgggggcctgctggagcaatttgcccgtggtgttggactccggagcatcagcagcaatgccttgtga

SEQ ID NO: 135469 - DNA, 478 bp, Homo sapiens
  misc_feature (1)...(478): n = a,t,c or g
cagattggcttctgtgtgtgtgtctgagttctttttggaacctgtctccccttaactaaaatgtgaaagtacaggttttaatctttgttgtactttcttacctacacctgaacactgggcttggccttggactagggacttgagagagatataagataggtaagtgaatgaatgaatgaagcatggctggccagtgcttacccactcagggttgggtgccatcttttccacagatcccacccctggggaagcactactcccagcgctgggcccaggaggacctgctggaggagcagaaggatggggcccgggcagcggctgtggctgacaagaagaaaggcctcatggggccactgcccgaactggacactaaaggtaggcctctcacctccctgccaaccccaggtcaggacttgaatttnnnncttcagcccaccctcgtgccaagcttggcgtgagcattccatacgtttcagtt

SEQ ID NO: 135470 - DNA, 1538 bp, Homo sapiens
acaagagccaggctagcaggcccacaccagacgagctggaggccgtgcgcaagtacttccagctagatgttaccctggctcaactgtatcaccactggggttccgtggactcccacttccaagaggtggctcagaaattccaaggtgtgcgactgctgcgacaagaccccatcgaatgccttttctcttttatctgttcctccaacaacaacatcgcccgcatcactggcatggtggagcggctgtgccaggcttttggacctcggctcatccagcttgatgatgtcacctaccatggcttccccagcctgcaggccctggctgggccagaggtggaggctcatctcaggaagctgggcctgggctatcgtgcccgttacgtgagtgccagtgcccgagccatcctggaagaacagggcgggctagcctggctgcagcagctacgagagtcctcatatgaggaggcccacaaggccctctgcatcctgcctggagtgggcaccaaggtggctgactgcatctgcctgatggccctagacaagccccaggctgtgcccgtggatgtccatatgtggcacattgcccaacgtgactacagctggcaccctaccacgtcccaggcgaagggaccgagcccccagaccaacaaggaactgggaaactttttccggagcctgtggggaccttatgctggctgggcccaagcgctctgtcaggtcatcaccacttttatgacctttctcggaccccataggctggatcagatgcctcctgaagaattacagacttcttcctctagacttggagggcctccttggcaatgcatttgatggccaccagcttctgcgtcctcttatcttctgccaggatcacctccgagaaggcccccctatcgggagaggggattcacaaggtgaagaactggaaccccagcttccctccagcctctcctccattccctatgggttctgtgaccactgctggaccaaggacgtggatgaccctcccctagtcactcatccatcccctggctccagagatggtcacatgacccaggcctggccagtcaaagtagtctctcccctggccacagtaattggtcatgtgatgcaagccagcttactagcactttgagaatgagtctcctgttgagctggtaggatgtaagcctggagctaatggcgatcatctttgccaccacctggggagatcctgcttgggaatgaaattaacacaaaggaagtccaacctgagaaatggccaaatatatttcctgataacattatgtggccctctggatccagccatgcctgaggtctacccctgggcttttggattatgtgtacagttggttcatccctttttctgctaattcgagtcatggctaatttaacaccctttagaaccttaaagaaccatcagcatcacccgggaacttttttagaaatgcaaaatctctactgctttggatcctgggtcaaaaaaaagaaaaaaaaagaaatgcaaaactttaggccctgccccagatttactaaatc

SEQ ID NO: 135471 - DNA, 1491 bp, Homo sapiens
acaagagccaggctagcaggcccacaccagacgagctggaggccgtgcgcaagtacttccagctagatgttaccctggctcaactgtatcaccactggggttccgtggactcccacttccaagaggtggctcagaaattccaaggtgtgcgactgctgcgacaagaccccatcgaatgccttttctcttttatctgttcctccaacaacaacatcgcccgcatcactggcatggtggagcggctgtgccaggcttttggacctcggctcatccagcttgatgatgtcacctaccatggcttccccagcctgcaggccctggctgggccagaggtggaggctcatctcaggaagctgggcctgggctatcgtgcccgttacgtgagtgccagtgcccgagccatcctggaagaacagggcgggctagcctggctgcagcagctacgagagtcctcatatgaggaggcccacaaggccctctgcatcctgcctggagtgggcaccaaggtggctgactgcatctgcctgatggccctagacaagccccaggctgtgcccgtggatgtccatatgtggcacattgcccaacgtgactacagctggcaccctaccacgtcccaggcgaagggaccgagcccccagaccaacaaggaactgggaaactttttccggagcctgtggggaccttatgctggctgggcccaagcggctggatcagatgcctcctgaagaattacagacttcttcctctagacttggagggcctccttggcaatgcatttgatggccaccagcttctgcgtcctcttatcttctgccaggatcacctccgagaaggcccccctatcgggagaggggattcacaaggtgaagaactggaaccccagcttccctccagcctctcctccattccctatgggttctgtgaccactgctggaccaaggacgtggatgaccctcccctagtcactcatccatcccctggctccagagatggtcacatgacccaggcctggccagtcaaagtagtctctcccctggccacagtaattggtcatgtgatgcaagccagcttactagcactttgagaatgagtctcctgttgagctggtaggatgtaagcctggagctaatggcgatcatctttgccaccacctggggagatcctgcttgggaatgaaattaacacaaaggaagtccaacctgagaaatggccaaatatatttcctgataacattatgtggccctctggatccagccatgcctgaggtctacccctgggcttttggattatgtgtacagttggttcatccctttttctgctaattcgagtcatggctaatttaacaccctttagaaccttaaagaaccatcagcatcacccgggaacttttttagaaatgcaaaatctctactgctttggatcctgggtcaaaaaaaagaaaaaaaaagaaatgcaaaactttaggccctgccccagatttactaaatc

SEQ ID NO: 135472 - DNA, 2108 bp, Homo sapiens
gaacccagaagaacacagctgtgcgcgcccacaggctctgggggcgggagaagataagtcgcaaggagggggcgggacctacacctcaggaaagccggagaattggggcacgaagcggggctttgatgacccgcaaagggcgaggcatgcaggaggtggaggaattaagtgaaacagggaaggttgttaaacagcaccgtgtgggcgaggccttaagggtcgtggtccttgtctgggcggggtctttgggcgtcgacgaggcctggttctgggtaggcggggctactacggggcggtgcctgctgtggaaatgcctgcccgcgcgcttctgcccaggcgcatggggcatcgtactctagcctccactcctgccctgtgggcctccatcccgtgccctcgctctgagctgcgcctggacctggttctgccttctggacaatctttccggtggagggagcaaagtcctgcacactggagtggtgtactagcggatcaagtatggacactgactcagactgaggagcagctccactgcactgtgtaccgaggagacaagagccaggctagcaggcccacaccagacgagctggaggccgtgcgcaagtacttccagctagatgttaccctggctcaactgtatcaccactggggttccgtggactcccacttccaagaggtggctcagaaattccaaggtgtgcgactgctgcgacaagaccccatcgaatgccttttctcttttatctgttcctccaacaacaacatcgcccgcatcactggcatggtggagcggctgtgccaggcttttggacctcggctcatccagcttgatgatgtcacctaccatggcttccccagcctgcaggccctggctgggccagaggtggaggctcatctcaggaagctgggcctgggctatcgtgcccgttacgtgagtgccagtgcccgagccatcctggaagaacagggcgggctagcctggctgcagcagctacgagagtcctcatatgaggaggcccacaaggccctctgcatcctgcctggagtgggcaccaaggtggctgactgcatctgcctgatggccctagacaagccccaggctgtgcccgtggatgtccatatgtggcacattgcccaacgtgactacagctggcaccctaccacgtcccaggcgaagggaccgagcccccagaccaacaaggaactgggaaactttttccggagcctgtggggaccttatgctggctgggcccaagcgggcctccttggcaatgcatttgatggccaccagcttctgcgtcctcttatcttctgccaggatcacctccgagaaggcccccctatcgggagaggggattcacaaggtgaagaactggaaccccagcttccctccagcctctcctccattccctatgggttctgtgaccactgctggaccaaggacgtggatgaccctcccctagtcactcatccatcccctggctccagagatggtcacatgacccaggcctggccagtcaaagtagtctctcccctggccacagtaattggtcatgtgatgcaagccagcttactagcactttgagaatgagtctcctgttgagctggtaggatgtaagcctggagctaatggcgatcatctttgccaccgcctggggagagcctgcttgggaatgaaattaacacaaaggaagtccaacctgagaaatggccaaatatatttcctgataacattatgtggccctctggatccagccatgcctgaggtctacccctgggcttttggattatgtgtacagttggttcatccctttttctgctaattcgagtcatggctaatttaacaccctttagaaccttaaagaaccatcagcatcacccgggaacttttttagaaatgcaaaatctctactgctttggatcctgggtcaaaaaaaagaaaaaaaaaagaaatgcaaaactttaggccctgccccagatttactaaatcaatctgcagtttaacaaaatcctcaggtgatttgtatgctcattgaactttaagaagcagtgttttagaacaggttcttaaaaaggaacaaataaactcatttaactaaagttaactg

SEQ ID NO: 135473 - DNA, 4321 bp, Homo sapiens
ccggactcgaggtggccgatgtgacagcatgggggtggactttgatgtgaagactttctgccacaacttgcgggcgactaagccaccatacgagtgcccggtggagacctgccgaaaggtctacaagagttacagtggtattgagtaccacctgtaccactatgaccacgacaacccaccacccccacaacaaactccactccgcaagcacaagaaaaaggggcgccagtcacgcccagccaacaagcagtcacccagcccctcagaggtctcacagtcaccaggccgtgaggtgatgagctatgcacaggcccagcgcatggtggaggtggacttgcatggccgcgtccaccgcatcagcatctttgacaacctggatgtggtgtcagaggatgaggaagcccccgaggaggcccctgagaatggcagcaacaaggagaacactgagacaccagctgctactcccaagtcaggcaaacataagaacaaggagaagcgcaaggactccaaccatcaccaccaccacaatgtttctgcgagcaccactcccaagctgccagaggtggtctatcgggagctggaacaggacacccctgatgccccaccccggccaacttcctattaccggtacatcgagaagtctgcagaggagctggacgaggaagtagagtatgacatggacgaggaggactacatctggctggatatcatgaatgagcgtcggaagacagagggtgtaagtcccatcccgcaggagatctttgagtacctaatggaccgactggagaaggagtcgtactttgagagtcataataaaggcgaccctaatgcgctagtggacgaggatgctgtttgctgtatcttgcaatgatggtgagtgccagaacagcaatgtcatcctcttctgtgacatgtgcaacctggccgtgcaccaggagtgctacggtgtcccctatatccctgagggccagtggctgtgccgccgttgcctgcagtcaccctctcgtgctgtggattgtgccctgtgccccaacaagggcggtgccttcaagcagacagatgacgggcgctgggcccatgtggtgtgtgccttgtggatccctgaggtctgcttcgccaacacggtcttcctagagcctattgacagcattgagcacatcccaccagctcgctggaagctcacctgctacatttgcaaacaacggggctcaggggcctgcatccagtgccacaaggccaactgttacacagctttccatgtgacatgcgcccagcaggctggcctttacatgaagatggagcctgtgcgggagacaggcgccaacggcacctctttcagtgtccgcaagacagcctactgcgacatccacacgcctccaggttcagcacgccgactgcctgccctgtcccacagcgagggtgaggaggatgaagatgaggaggaggatgagggtaagggctggagctcagagaaagtcaagaaggccaaggccaagtcccggatcaaaatgaagaaggcacggaagatcctggcagagaagcgggcagcagcacctgtggtgtcagtgccctgcatcccaccacacaggcttagtaaaatcaccaaccgcctgaccatccaaaggaagagccagttcatgcagaggctgcacagctactggacactgaagcggcagtcacggaatggggtcccattgctacgtcgcctgcagacacacctgcaatctcagaggaactgtgaccaagttgggagagattctgaggataagaactgggcccttaaagaacagctcaagtcctggcagcggctccggcatgacttggagcgagctcggctgctcgtggaattgatccgcaagcgggaaaaactcaaaagggagacgatcaaggttcagcagattgccatggagatgcagctgactcctttcctcatcctccttcgcaaaaccttggagcagctccaagagaaggacacaggcaacatcttcagcgagccggtccctctgtctgaggtacctgactacctagaccacatcaaaaagcccatggactttttcaccatgaagcagaacttggaggcttaccgctacctgaattttgatgattttgaggaggacttcaacctcatcgtcagcaactgcctcaagtataacgccaaggacaccatcttctaccgggcagcagtgcggcttcgtgagcagggtggtgctgtcgtccgccaggcccggcgccaggcagaaaaaatgggcattgactttgagacgggcatgcatatcccccacagcctggctggagatgaggccacacaccacactgaagatgcagccgaggaagagcggctggtcttgctggagaaccagaagcacctgccagtggaagaacagctaaagctgcttctggagcggctggacgaagtgaatgccagcaagcagagtgtgggccgctcacggcgtgcaaagatgatcaagaaagagatgacggcactgcggcggaagcttgcccatcagcgagagacgggacgtgatggccctgagcggcatggcccctcgagccggggtagtctgacaccccacccggcagcctgtgacaaggatgggcagacagatagtgcggcagaggagagcagcagccaggagacaagcaaaggcctgggtcccaacatgtcctcaacccccgcacatgaggtgggcaggagaacctcagttctgttctccaaaaagaacccgaagacagctggaccgcccaagaggccgggccggccccccaaaaaccgggagagccagatgacccccagccacggaggcagtcctgtggggcccccccagctccccatcatgagttccctgcgtcagcgcaagcggggtaggagcccccggcccagttcgagctcagacagcgacagtgataagtccacagaagaccccccaatggacttaccagccaatggcttcagcggtggaaaccaaccagtgaagaagagtttcttggtataccgtaatgactgcagccttccccggagcagctcagactctgagtccagcagcagtagcagtagcagcgctgcttcagaccggaccagcacaacgccctcaaaacaaggccggggcaaaccctccttctctcggggcactttcccagaggacagcagtgaggatacctcaggcactgagaatgaggcctactccgtgggcactggccgcggcgtgggccacagcatggtaaggaagagtctgggccggggagctggctggctgtcagaggatgaggactccccgctggatgctctggacctcgtgtgggccaaatgccgaggctatccatcatacccagctctgatcattgatccaaagatgccccgagaaggtatgttccaccatggggttcccatccctgtgcccccactggaggtgctgaaacttggggagcagatgacccaggaagcccgagagcatctctacctcgtcctcttctttgacaacaaacgaacctggcagtggctgcccaggaccaagctggttcctctgggtgtgaaccaggacctagacaaggagaagatgctggagggccgcaagtccaacatccgcaagtcagtacagatcgcctaccacagggctctgcagcaccgcagcaaggtgcaaggcgagcagagcagtgagaccagcgatagtgattgatactgctcaacacagcccaacctatagtgccctgtgacttctctcctcccctttgctcactgtcctggagtggcaccggcctctgcactgactcatttctggtcttggggccagtctcaggggaagctgggtgggggaggtccctcctgccctaagtgcagctggactgtacagaacactccaagggccaatggcagttcagcgcaaggagagggagggcccacaggtcagaaaaagctccagagacctcacagcattgtagggcggggtggtgggccaaagttaggacactgcgtaaaacaggccatcccaccacctctacctgctcatgccaggagaatccataactgcctagagcctggggccctaccggtcgtgaggtgagtgggcatctgtccagcctggaagaggggcactaggtgactccctcccctgctgttgtaaatactgtaattatcggagaatttaaattattctcatttgtaactgcgtttccgggtcgcgccagagtcatttggtactaaaaaaaaaaagactgggggctgtccccatttcccttctctttcccatagattcccccacctttcaaactggtttgtatttatttcaaaggaagaaaatatattgattcttagaaaataaaaaaa

SEQ ID NO: 135474 - DNA, 2628 bp, Homo sapiens
atggagaacaaaatcactggatataccaccgttgatatatcccaatggcatcgtaaagaacattttgaggcatttcagtcagttgctcaatgtacctataaccagaccgttcagctggatattacggcctttttaaagaccgtaaagaaaaataagcacaagttttatccggcctttattcacattcttgcccgcctgatgaatgctcatccggaattccgtatggcaatgaaagacggtgagctggtgatatgggatagtgttcacccttgttacaccgttttccatgagcaaactgaaacgttttcatcgctctggagtgaataccacgacgatttccggcagtttctacacatatattcgcaagatgtggcgtgttacggtgaaaacctggcctatttccctaaagggtttattgagaatatgtttttcgtctcagccaatccctgggtgagtttcaccagttttgatttaaacgtggccaatatggacaacttcttcgcccccgttttcaccatgggcaaatattatacgcaaggcgacaaggtgctgatgccgctggcgattcagagagattctgaggataagaactgggcccttaaagaacagctcaagtcctggcagcggctccggcatgacttggagcgagctcggctgctcgtggaattgatccgcaagcgggaaaaactcaaaagggagacgatcaaggttcagcagattgccatggagatgcagctgactcctttcctcatcctccttcgcaaaaccttggagcagctccaagagaaggacacaggcaacatcttcagcgagccggtccctctgtctgaggtaaccgaattggacgaagtacctgactacctagaccacatcaaaaagcccatggactttttcaccatgaagcagaacttggaggcttaccgctacctgaattttgatgattttgaggaggacttcaacctcatcgtcagcaactgcctcaagtataacgccaaggacaccatcttctaccgggcagcagtgcggcttcgtgagcagggtggtgctgtgctccgccaggcccggcgccaggcagaaaaaatgggcattgactttgagacgggcatgcatatcccccacagcctggctggagatgaggccacacaccacactgaagatgcagccgaggaagagcggctggtcttgctggagaaccagaagcacctgccagtggaagaacagctaaagctgcttctggagcggctggacgaagtgaatgccagcaagcagagtgtgggccgctcacggcgtgcaaagatgatcaagaaagagatgacggcactgcggcggaagcttgcccatcagcgagagacgggacgtgatggccctgagcggcatggcccctcgagccggggtagtctgacaccccacccggcagcctgtgacaaggatgggcagacagatagtgcggcagaggagagcagcagccaggagacaagcaaaggcctgggtcccaacatgtcctcaacccccgcacatgaggtgggcaggagaacctcagttctgttctccaaaaagaacccgaagacagctggaccgcccaagaggccgggccggccccccaaaaaccgggagagccagatgacccccagccacggaggcagtcctgtggggcccccccagctccccatcatgagttccctgcgtcagcgcaagcggggtaggagcccccggcccagttcgagctcagacagcgacagtgataagtccacagaagaccccccaatggacttaccagccaatggcttcagcggtggaaaccaaccagtgaagaagagtttcttggtataccgtaatgactgcagccttccccggagcagctcagactctgagtccagcagcagtagcagtagcagcgctgcttcagaccggaccagcacaacgccctcaaaacaaggccggggcaaaccctccttctctcggggcactttcccagaggacagcagtgaggatacctcaggcactgagaatgaggcctactccgtgggcactggccgcggcgtgggccacagcatggtaaggaagagtctgggccggggagctggctggctgtcagaggatgaggactccccgctggatgctctggacctcgtgtgggccaaatgccgaggctatccatcatacccagctctgatcattgatccaaagatgccccgagaaggtatgttccaccatggggttcccatccctgtgcccccactggaggtgctgaaacttggggagcagatgacccaggaagcccgagagcatctctacctcgtcctcttctttgacaacaaacgaacctggcagtggctgcccaggaccaagctggttcctctgggtgtgaaccaggacctagacaaggagaagatgctggagggccgcaagtccaacatccgcaagtcagtacagatcgcctaccacagggctctgcagcaccgcagcaaggtgcaaggcgagcagagcaccccagacaaacccccggcaaacgtcccattccgaggaaagcatgagcagatggagtatggaagaaatgcccaagacggcaggcagcagctgtggcggccggcgggacgacaatccgaggagaggcctctgatgtcctga

SEQ ID NO: 135475 - DNA, 1677 bp, Homo sapiens
ctccaccgcggtgcgccgcccgggcaggtagaacccagaagaacacagctgtgcgcgcccacaggctctgggggcgggagaagataagtcgcaaggagggggcgggacctacacctcaggaaagccggagaattggggcacgcaagcgggggggctttgatgaccccccaaagggcgaggcatgcaggaggtggaggaattaagtgaaacagggaaggttgttaaacagcaccgtgtgggcgaggccttaagggtcgtggtcctcgtctgggcggggtctttgggcgtcgacgaggcctggttctgggtaggcggggctactacggggcggtgcctgctgtggaaatgcctgcccgcgcgcttctgcccaggcgcatggggcatcgtactctagcctccactcctgccctgtgggcctccatcccgtgccctcgctctgagctgcgcctggacctggttctgccttctggacaatctttccggtggtggagggagcaaagtcctgcacactggagtggtgtactagcggatcaagtatggacactgactcagactgaggagcagctccactgcactgtgtaccgaggagacaagagccaggctagcaggcccacaccagacgagctggaggccgtgcgcaagtacttccagctagatgttaccctggctcaactgtatcaccactggggttccgtggactcccacttccaagaggtggctcagaaattccaaggtgtgcgactgctgcgacaagaccccatcgaatgccttttctcttttatctgttcctccaacaacaacatcgcccgcatcactggcatggtggagcggctgtgccaggcttttggacctcggctcatccagcttgatgatgtcacctaccatggcttccccagcctgcaggccctggctgggccagaggtggaggctcatctcaggaagctgggcctgggctatcgtgcccgttacgtgagtgccagtgcccgagccatcctggaagaacagggcgggctagcctggctgcagcagctacgagagtcctcatatgaggaggcccacaaggccctctgcatcctgcctggagtgggcaccaaggtggctgactgcatctgcctgatggccctagacaagccccaggctgtgcccgtggatgtccatatgtggcacattgcccaacgtgactacagctggcaccctaccacgtcccaggcgaagggaccgagcccccagaccaacaaggaactgggaaactttttccggagcctgtgggaaccttatgctggctgggcccaagcgactccaccctccttacaggtgctgttcagtgccgacctgcgccaatcccgccatgctcaggagccaccagcaaagcgcagaaagggttccaaagggccggaaggctagatggggcaccctggacaaagaaattccctyaagcaccttcccctccattccccacttctctctccccatccccacccagtctcatgttggggaggggcctccctgtgactacctcaaaggccaggcacccccaaatcaagcagtcagtttgcacaacaagatggggtgggggatattgagggagacagtcgctaaggatggttttatcttccctttattacaagaaggaacaataaaatagaaacatttgtatggaaaaaaaaaaaaaaaaaa

SEQ ID NO: 135476 - DNA, 2533 bp, Homo sapiens
  misc_feature (1)...(2533): n = a,t,c or g
agagcccttacgaacgcttgggccttccggaagttttccacctagggctgtctcggtatttttaaattcttgcactcgagtcactatttaagctcctccaggaatgggtgcagcttccctttgtgccttcggccttcttgtcacctttgccacagcctcccccaggtatgcaatggtacagcccagcttcagattgggcaccaaattaggacaagccgaagcggacgagcccttcgtttcttccggttctgtacccccatcctttctctcgcccctcctacccgcagctcctggcgctcggcggggctaactgcagcgcggagatctcggccgccaagctccgcctcccgccccgggctgtgccccggggctcgcctgaggccgaccacccgcaccccacctctagcggctttgctcgaggcccaccttcttcccacccccggcaaactccagtaggctcgccctcgctgactccccgcccccgcgtcaactgcaaggggcccgcccatagccagttccggggcggttgctcacatcgaccggaactccccgccccctcccgcggcccctggggccgtaggaggccgcagcgaggaggtagagggggcgggggtcgcactagggtgtccctagagaacgaggactctgaaggcgggacatttgggcgacccccgggcggggccagccattaaacagtcccacttctgtgccagacactgaactgggctcttgacgggcatcatctcttaatcctcagaacatcccagggagctccacaggatccccatatcctgggccatgagtgagttgaaagactgccccttgcagttccacgacattcaagtctgtggatcacctgaaggtctgtccccgctacacggcagtgctggcacgctcatgaggatgatggcatcggcatcgaggagctggacaccctgcagctggagctggagaccctgctgtcttctgccagccggcgccatgcgtgtgcttgaggccgaaacccagatcctcaccgacctggcaggataaggaaaggtgacagacgattcctgaagcttgggtcgagaccattgaatttggagctccccccaaacatgggaagcccaagaaagcaaaaactggaaagggaaggcaggacatgggcccgggcccttgcccaggacggcccaaatccaaaaaccttcagcccaaagatccaggaatatgaattcactgatgaccctatcgacgtgccacggatccccaaaaatgatgcccccaacaggttctgggcttcagtggagccctactgtgctgacatcaccagcgaggaggtccgcacacttgaggagttactgaagcccccagaagatgaggctgagcattacaagatcccacccctggggaagcactactcccagcgctgggcccaggaggacctgctggaggagcagaaggatggggcccgggcagcggctgtggctgacaagaagaaaggcctcatggggccactgaccgaactggacactaaagatgtggatgccctgctgaagaagtctgaggcccagcatgaacagccggaagatggatgcccctttggtgccctgacgcagcgcctcctgcaggccctggtggaggaaaatattatttcccctatggaggattctcctattcctgacatgtctgggaaagaatcaggggctgacggggcaagcacctcccctcgcaatcagaacaagcccttcagtgtgccgcatactaagtccctggagagccgcatcaaggaggagcttattgccctaggcccttttgtaggccggggacctgctcgcaaaggactccgaggatgaggtccttgctgagcttcgcaaacggcagggttgagctggaaggcacttagtgcccacaaccgcaccaagaaggcccgacctgctgaggctggcaaaggaggaggtgagccggcaggaagttgaggcagcggngtgcgcagggctgagagggagggcatggacgcctttcgcaagattcatggcttgcccggcagaagaaagcggaactccccacccaagaaaagaaaaggaccaggcctggaaaaactcttgaaaggagcgtgaagagcatccttgaagcttgcttggatggggttagccccttaaccccctgccctcaggctgattaatcttggccctaaggggaggggaagggaggcccaacttcctttctttgggccacaggaaacaattgccctgtggctgtcccttcaaatggcggcagtctcctaagaagcccgtggcccttccccctgaggtcattttggcctagctctgtacaaccaggacacaggaagccctgctgggctagcctgaggcctagtctctgcttggtcccctgagatgggggttggaggggacttcgtttctgggtcttcctcttcccctctttaccatcccccactcccctaatcccctacccctgtctccccttcaaggacttctcccttgtggttttgtaaagtgcaaacttaagaataaagtgactgctgtggtttttc

SEQ ID NO: 135477 - DNA, 331 bp, Homo sapiens
ggaccaacggcaactgtctgatgagtgccagccccaaaccgcgcgctgctcgggaccttagagcctctgactcaggctggaagatttgagagctggattaaaataatccagaatggctactctgatctatgttgataaggaaaatggagaaccaggcacccgtgtggttgctaaggatgggctgaagctggggtctggaccttcaatcaaagccttagatgggagatctcaagtttcaacaccacgttttggcaaaacgttcgatgccccaccagccttacctaaagcgactagaaaggctttgggaactgtcaacagagctacagaaaag

SEQ ID NO: 135478 - DNA, 1149 bp, Homo sapiens
ggcacgaggctccggcggggaaggaggcgggctgcggctgcggctggggctgaagctgaagctggggctggggttgggggactgcccggggcttatatggctcctagcccgtttgagcgtggtctcggactgctaactgtaccaacggcaatctgtctgatgagtgccagccccaaaccgcgcgctgctcgggaccttagagcctctgactcaggctggaagatttgagagctggattaagtacttgttggctcacgcccgtgactgttccgctgtttagctcttgttttttgtgtggacactcctaggatagaaagtttggtatgttgctatacctttgcttctcccaccttccccaatatctaatatgtatttctcattcttagaataatccagaatggcgtactctgatctatgttgataaggaaaatggagaaccaggcacccgtgtggttgctaaggatgggctgaagctgggggtctggaccttcaatcaaagccttagatggggagatctcaagtttcaaacaccacgttttggcaaaacgttcgatgcccccacccagccttacctaaagctacctagaaaggctttggggaactgtcaacaggagctacagaaaagtctgtaaaggacccaggggacccctcaaacaaaaaacagccaaagcttttccggcccaaaaaagatggacctgaagaaggactgttaaaagcaaaaaagcctctgtttcctggccttcaggattgatgccctatcccagaaattagaaaaattcctttccccttcaatccctcctagactttgaggagtttttgaccctgccctgaagagcacccagattgcggcaccttccccctttgagttggagttgcctctcatgattcccttgacgagggagagagagctttgaaaaagctggtttcagctggggcccccctttcacctgtggaaggatggccctcttccaccatggggaattccaatctgtttgcagttttcctttcaaggcatttctgttcggacctggggtgttggatttgccacctgtttgctgtgacatagatatttaaatttcttagtgcttcaagagtttgtgtgtatttgtattaataaagcattcttcaacagaaaaaaaaaaaaaaaaa

SEQ ID NO: 135479 - DNA, 1348 bp, Homo sapiens
tatgcccggacagaggatcgcctcgctggcctactctctcctcccgtacggcgccggaatcccagctccacttaccaggccgcggctaccccgccgtcccccccgactcccgccaccccgctctctcaggctcttcaggatccaagtccgtaggccctttaaggggtctagttgccgtttgcgaggccctgggactttggtcccagacagcggggatccggatggcttccgtgcggatccgagaggccaaggagggagactgtggagatatcctgaggctgattcgggtgaaaactgcaggccggtaacccgggggtcagagtggcgcggccagagcggggtcctaagaggcgggggcagggggaggggctcgccttgggaacctgctcggggagcagcggggcccttctgctctaatctagcttccgtacccacgccttaggagctagccgaattcgaaaaactctcggatcaggtgaagatcagtgaagaaggtgggggctcagcgcccaggttctggcggaggctggggaggaaatgagggatgggttccccaggcgacagctccaggctgggcatacacccacgtcctctttctctatctctttgtcacaactccaatctcggcagccctgagagcagatggctttggagacaatcctttctatcactgtttggtagcagagattcttccagcgcccgggaagctactgggtaagagcacctggcccttagaagtccacctctccagccggcctcagaggtctccccacaggcttccagaagccttactccccttttctctctctcagggccctgcgtggtgggctatgggatatactatttcatctacagtacatggaagggacgcaccatttatctggaggatatctatgtgatgccagaatatcggggtactgggcagaagctgaggctggggtgggagcaaagcaccccacagaccccactgttatcccctgtccccagagcccagccggtgtcattttctgatccccttcagctcaaacaatagctattttttgcctctttctctccacaacaggtcaagggattggttccaaaataatcaaaaaggtggctgaggtggccttggataagggctgctcccaattccgcctggccgtcctggactggaaccagagggccatggacttgtacaaggccctaggagcccaagatctgacggaagctgagggctggcacttcttctgctttcaaggagaggcaacgagaaagttggcaggaaagtgacgccatccctaggaggatctctgtcttgagtttctccttccccatcagctgaagcactcttcagagactacgtcca

SEQ ID NO: 135480 - DNA, 1046 bp, Homo sapiens
tttcgtggctatgcccggacagaggatcgcctcgctggcctactctctcctcccgtacggggccggaatcccagcttcacttaccaggccgcggctaccccgccgtcccccccgactgccgccaccccgctgtctcaggcgtcttcaggatccaagtccgtaggccctttaaggggtctagttgccgtttgcgaggccctgggactttggtcccagacagcggggatccggatggcttccgtgcggatcccgagaggccaaggagggagactgtggagatatcctgaaggctgattcgggtgaagactgcaggcccggagctagccgaattcgaaaaactcttcggatcaggtgaaagatcagttgaagaagcccttgagagcagattggcttttggagacaatcctttctatcacttgttttggtaagcagagattcttccagcgcccggggaaagctactggggccctgcgtggtgggctatgggatatactatttcatctacagtacatggaagggacgcaccatttatctggaggatatctatgtgattgccggaaatatcggggtccaagggattggttcccaaaaataatcaaaaaaggtgggctgaggtggcccttggaataaggggctgctcccccaatttccgcttggcccgtcccctggacttggaacccagagggcccatgggacttgtacaaggcccctaggagccccaagatctgacggaagcttgagggctggcacttcttctgctttcaaggagaggcaacgagaaagttggcaggaaagtgacgccatccctaggaggatctctgtcttgagtttctccttcccccatcagctgaagcactcttcagcttcagagatacgtccacagacactgatgctgaggcctccctggaggaaggagggttaggggtgcctatcctcaagtattggaagagcagaatttgagggagagacctttcttccttgttgagggtgaaaaataaataagaattacatgtcctgaaaaaaaaaaaaaagtcgacgcggccgcg

SEQ ID NO: 135481 - DNA, 2334 bp, Homo sapiens
atggctcaggaaatcgaattaaagtttattgttaatcacagtgccgttgaggcgttgcgtgaccatctcaatacgctgggcggcgagcaccatgaccccgtgcagttgctgaatatttactacgaaacgccggataactggctgcgtgggcacgatatgggcttacgtattcgtggcgaaaacggtcgctatgagatgaccatgaaagttgcaggaagagtgacaggcgggtttcatcagcgcccggaatataacgtggcgttgagcgaaccgacgctcgacctggcgcagttaccgacggaagtctggccgaacggcgaattgcccgccgatctcgcctcccgcgtgcagccgctgttcagcacccatttttattccgaaaaatggctggtggcgggcgatggttgccccattgaaatggccctccaccggggcattcaaccggttattcgtccctttattaacatggtggagatccccagacaggtgatgtttaccgtgtatgtgacatcaacgccttacgatccgttggttacacctgtttataccattagttttggtggccgggttgaagtaccgcaaaactgcgaattaaatgccgggcagattgttgaatttgattttggtgatatcggcgcatcgttatttagtgcggcagggccgggtaatcgacctgctggtgtcatgccgcaaaccaagagcattgcggtcaaatacagaccacttccaacgaccaccaacacttccgacatcggcttaccacaaggttacaagaacaagggtctgggccagaaacactaccctggaacccaaggggcaccttattacaccagtattcaccccacgagaaaattaaggcagtaccttaatttaagcgtcaggtggatgtttttgctcttatttcgatcaatgaataaacaggaaaacaggggggttttatatcagcaggatctatgtgaacgctattcaggacgggtcacacgcgcaaaaaaaagccagcctgtttccagactggcttttgtgcttttcaagccggtgttacatcgcttttttggtcaactcgataacgcgcagctgcgcgatcgctttggccagttccgcagacgcctgagcgtaatctacgtcgccgtgagagctgctaatgtgctcttcagccttacgtttcgcttccatggctcgcgcttcgtcgagatcctggccgcgaattgcggtgtcggccagaacggtcacgttgccaggctgcacttcaagaatgccgccagacagatagataaactcttcgtgaccgtgctgtttcacgatgcgaatcataccaggcttaatggcggtgagcagcggtgcgtggccagggtagatccccagttcaccttcgctacccgttacctggattttctcgaccagaccagagaacatttgttgctctgcgctgacgacgtccaggtgcctcagagtcacttccccaggagtggccgggagagggctgagagtttctgtgctctacagtttggagacgctggccttcggctcctgtcggaacacctcaccatgctccaggtgctgaacctgtgcgagaccccggtcacagacgctggcctgctggccctgagctccatgaagagtctctgcagtttaaacatgaacagcaccaagctctcagctgacacctacgaagatctgaaggagagagagaaagttctgggatttggtggctacaaacttttcaaccaccagaaaagtacaaatgatagtggaatcaggggccgccagcttcccctggtgcagactgcagctcagcattgccagggagaccatctgcccttctcactccagtcttcacatcccccagaaggaacccatatcggtgggctcaggcagatgctgacttctggactggtcaactgtggctgccaggaccagagccagagagtttcccgaacactcatagccagcccggagactccagaaaagaaaagaaaagaaagaaggaaaagggagagaaagaaagagaagggaagaagaaagaaaaagcgaagaggagagaagaagaagaagagaagggaaggaggagagaaaagagaagaagaagaggagaagagaggcagggagaacaaaatggcaacaaaagccaaaattgacaaatgggatctaattaaactaaagagcttctgcacagcaaaagaaaccaccatcagagtgaaaaggaaacctacagaatgggagaaaatttttacaatctacccatctgacaaagggctaatatccagaatctacaaagaacttaaacaaatttacaagaaaaaatcaaccccatcaaaaagtgggcgaaggatatga

SEQ ID NO: 135482 - DNA, 1081 bp, Homo sapiens
cgagattccgctcgaggtcaagagttattttgtcgcgggtgaaacgtcttcctgccttgagctgggagcttcaccaggcttcggtgtagcggacgtccacttccttcaaattgggaagcttggcctgggggtggcaataagagtccctgtcacgtgtaggccattcccttgcagaagctgccagtgcctggctccacccgcattgccggctgggggtctctgccaccctctccccaccttggtgctgtgggctacctgggctcttggaggggtgggtggcctcggtgtccctgtccctgacatgggcctggtacacagcagaggcccagaagcatctggaggatgccccagtgagcacgccctggcggcaggagcctggctgtaggaggtgggccccggccaagggctgccgggggattcccttaagtagcttccagagcacgaaggtgccagcgtggctcacgggtgccattgtgccttctcgcctttgagcccagcccttctctcccaggatgctggcctctgccagtcccgcccgctccttctggggcagcgtaggtgtctgagtcaggaggtctggagtgggcttgggaatgtacatttctgccagcccccagaagacgctgccaccacccccagctgcccggaggcactcacagctcagggccagcaggccagcgtctgtgaccgggtctcgcacaggttcagcacctggagcatggtgaggtgttccgacaggaccgaaggccagcgtctccaaacactcggagattaagtgagcaagtcgggtaggcagtgagtaagcggtcgctggctcactgtcaggacttatctcaggcaacaggctttcctggtcattctttttccgcgtctggcatcggagcctttcctcagaagcttccagggtatgattgggttctgaaggctgccactctatcgtgggttcaagcccggtgcgcaggcagcgcagagcgaattgcgtctgcgttatcagcagtctaatactgttcggttgtgggacagtggtcttcccagggtcggatggggtgacaccctggtgcctggcttcaccacacaccat

SEQ ID NO: 135483 - DNA, 1380 bp, Homo sapiens
atgcggggtctgtgccgggtctacgagcggatcctcttcatgccccggcctgactacgcatcccgctatgctggcgagatgcggggtctgtgccgggtctacgagcggatcctcttcatgccccggcctgactacgcatcccgctatggtgaggcctggggatgtggggacggctgcgcctaccaaagcctgcccacctcccgccccataccccattgctgctgcgagccctcacccccacagcccggtcttctggaagggctgctggacaagaacaaggtggcctgggtcctggctttggctctgtggacgcgagcaggaaacatgtactgtattcccaggagaggagatactggaatgaccctggccctctccccacccttcctccctgtggaggaggctttgtctgatgaggtggtgagggcctgcaccagccgcacaatccctttcccaggcggagccctctttattcggcccttcatgctgctcctggatgagcctaccaaccacctggacctagatgcttgcgtgtggttggaagaagaactaaaaacagccctctttattcggcccttcatgctgctcctggatgagcctaccaaccacctggacctagatgcttgcgtgagaatggaactggaaatgcagatgcaagagaacagaaaaaaggaacaagagaagagcaaggaaaaaggaaaggatgaaaaagagaagaagaaaggaaaggaagaaaaggccaagaagggggtgagaatggaactggaaatgcagatgcaagagaacagaaaaaaggaacaagagaagagcaaggaaaaaggaaaggatgaaaaagagaagaagaaaggaaaggaagaaaaggccaagaagggggaagtggatgcggtgttgcaagtgttgccatccaaatgtatccctatgatctgtgccgggcatgaagaatacttaagaaagtccatgctgctctctgctattgggaagcgtgaagtgcccatccctgagcacatcgacatctaccatctgactcgagagatgccccctagtgacaagacacccttgcattgtgtgatggaagtcgacacagagcgggccatgctggagaaagaggcagagcggctggctcatgaggatggaaagtccatgctgctctctgctattgggaagcgtgaagtgcccatccctgagcacatcgacatctaccatctgactcgagagatgccccctagtgacaagacacccttgcattgtgtgatggaagtcgacacagagcgggccatgctggagaaagaggcagagcggctggctcatgaggatgcggagtgtgagaagctcatggagctctacgagccctggaggagctggatgccgacaagcgagagatga

SEQ ID NO: 135484 - DNA, 2225 bp, Homo sapiens
gctggcgtcctggcctctcaccccaacagtactgatgttcacatcatcaacctctcactcacctttcatggtcaagagctgctcagtgacaccaaactggaattaaactcaggccgtcgttatggcctcattggtttaaatggaattggaaagtccatgctgctctctgctattgggaagcgtgaagtgcccatccctgagcacatcgacatctaccatctgactcgagagatgccccctagtgacaagacacccttgcattgtgtgatggaagtcgacacagagcgggccatgctggagaaagaggcagagcggctggctcatgaggatgcggagtgtgagaagctcatggagctctacgagcgcctggaggagctggatgccgacaaggcagagatgagggcctcgcggatcttgcatggactgggtttcacacctgccatgcagcgcaagaagctaaaagacttcagtgggggctggaggatgagggttgcccttgccagagccctctttattcggcccttcatgctgctcctggatgagcctaccaaccacctggacctagatgcttgcgtgtggttggaagaagaactaaaaacttttaagcgcatcttggtcctcgtctcccattcccaggattttctgaatggtgtctgtaccaatatcattcacatgcacaacaagaaactgaagtattatacgggtaattatgatcagtatgtgaagacgcggctagagctggaggagaaccagatgaagaggtttcactgggagcaagatcagattgcacacatgaagaactacattgcgaggtttggtcatggcagtgccaagctggcccggcaggcccagagcaaggagaagacgctacagaaaatgatggcatcaggactgacagagagggtcgtgagcgataagacactgtcattttatttcccaccatgtggcaagatccctccacctgtcattatggtgcaaaatgtgagcttcaagtatacaaaagatgggccttgcatctacaataatctagaatttggaattgaccttgacacacgagtggctctggtagggcccaatggagcagggaagtcaactcttctgaagctgctaactggagagctactacccacagatggcatgatccgaaaacactctcatgtcaagatagggcgttaccatcagcatttacaagagcagctggacttagatctctcacctttggagtacatgatgaagtgctacccagagatcaaggagaaggaagaaatgaggaagattcattgggcgatacggtctcactggggaaacaacaggtgagcccaatccggaacttgtcagacgggcagaagtgccgagtgtgtctggcctggctggcctggcagaacccccacatgctcttcctggatgaacccaccaatcacctggatatcgagaccatcgacgccctggcagatgccatcaatgagtttgagggtggtatgatgctggtcagccatgacttcagactcattcagcaggttgcacaggaaatttgggtctgtgagaagcagacaatcaccaagtggcctgggagacatcctgggcttacaaggagcacctcaagtccaagctggtggattgaggagccccagctcaccaaggagttacccacaacgtgttgagccttttacctgggttcgggtcaggagctccatcgtgggaactaacagctgctaacctgaccagccgctcaggacaggaccctggggctacactcctgcattgctgcaatacatgctcccccagcctctcccctgcccctcaacctgccttagctgcactctcttacctacagctggacagtacctgtctgtttcctgtcctccttccagttacatctgtccatgtctggactcggctggccgttccctccagccccttgctggttatcttacatctgagtgtgatgcagtcagaggcacctgcgggttagcccaggggcccaagccctggatttggcctgcggaggagcttaggatcctcgttttctgggttttggtgatgttggaggagtaccccccagcccaccgccccgattcctttttgcttctggtttggagctccggaccaggaccttcgtcctggtcagtttttaaataattatttagcagtgtaacttttaaacctgcgtgacatctacaaagcgcccaataaagaaagaggaagccaaaaaaaaaaaaaaaaaa

SEQ ID NO: 135485 - DNA, 2271 bp, Homo sapiens
cccacgcgtacgcgcggaggatcctaaggagcagctctgttgcgacataagccgagcagcgaggcccagctccctgaaacaacagtaacctacccctgtgggtcatcatcatgccctccgacctggccaagaagaaggcagccaaaaagaaggaggctgccaaagctcgacagcggcccagaaaaggacatgaagaaaatggagatgttgtcacagaaccacaggtggcagagaagaatgaggccaatggacgagagagaccagagaagtagatttgctgaccaaggagctagaggactttgagatgaagaaagctgctgctcgagctgtcactggcgtcctggcctctcaccccaacagtactgatgttcacatcatcaacctctcactcacctttcatggtcaagagctgctcagtgacaccaaactggaattaaactcaggccgtcgttattggcctcattggtttaaatggaattggaattggaaagtccatgctgctctttgctattgggaagcgtgaagtgcccatccctgagcacatcgacatctaccatctgactcgagagatgccccctagtgacaagacacccttgcattgtgtgatggaagtcgacacagagcgggccatgctggagaatgaggcagagcggctggctcatgaggatgcggagtgtgagaagctcatggagctctacgagcgcctggaggagctggatgccgactaggcagagatgagggcctcgcggatctttgcatggactgggtttcacacctgccatgcagcgcaagaagctaaaagacttcagtgggggctggaggatgagggttgcccttgccagagccctctttattcggcccttcatgctgctcctggatgagcctaccaaccacctggacctagatgcttgcgtgtggttggaagaagaactaaaaacttttaagcgcatcttggtcctcgtctcccattcccaggattttctgaatggtgtctgtaccaatatcattcacatgcacaacaagaaactgaagtattatacgggtaattatgatcagtatgtgaagacgcggctagagctggaggagaaccagatgaagaggtttcactgggagcaagatcagattgcacacatgaagaactacattgcgaggtttggtcatggcagtgccaagctggcccggcaggcccagagcaaggagaagacgctacagaaaatgatggcatcaggactgacagagagggtcgtgagcgataagacactgtcattttatttcccaccatgtggcaagatccctccacctgtcattatggtgcaaaatgtgagcttcaagtatacaaaagatgggccttgcatctacaataatctagaatttggaattgaccttgacacacgagtggctctggtagggcccaatggagcagggaagtcaactcttctgaagctgctaactggagagctactacccacagatggcatgatccgaaaacactctcatgtcaagatagggcgttaccatcagcatttacaagagcagctggacttagatctctcacctttggagtacatgatgaagtgctacccagagatcaaggagaaggaagaaatgaggaagatcattgggcgatacggtctcactgggaaacaacaggtgagcccaatccggaacttgtcagacgggcagaagtgccgagtgtgtctggcctggctggcctggcagaacccccacatgctcttcctggatgaacccaccaatcacctggatatcgagaccatcgacgccctggcagatgccatcaatgagtttgagggtggtatgatgctggtcagccatgacttcagactcattcagcaggttgcacaggaaatttgggtctgtgagaagcagacaatcaccaagtggcctggagacatcctggcttacaaggagcacctcaagtccaagctggtggatgaggagccccagctcaccaagaggacccacaacgtgtgcaccctgacattggcatctctgccaaggccatgagcatcatgaactcgtttgtaaacgacgtgtttgagcagctggcgtgtgaggctgcccggctggcccagtactcgggccggaccaccctgacatcccgagaagtccagacggctgtgcgtctgctgctgcctggggagctggccaagcacgctgtgtctgagggcaccaaggctgtcaccaagtacaccagctccaagtgacccagggcctgacaaaaataaagggtgaactgttaaaaaaaaaaaa

SEQ ID NO: 135486 - DNA, 797 bp, Homo sapiens
catgctgttttggttactgtagccttgtagtatagtttgaagtcaggtagcgtgatgcctccagctttgttcttttggcttaggattgacttggcgatgcgggctcttttttggttccatatgaacttgaaagtcgttttttccaattctgtgaagaaagtcattggtagcttgatggggatggcattgaatctataaattaccttgggcagtatggccatttttacgatattgattcttcctacccatgagcatggaatgttcttccatttgtttgtatcctcttttatttcattgagcagtggtttgtagttttccttgaagaggtccttcacgtcccttataagttggattcctaggtattttattctctttgaagcaattgtgaatgggagttcactcatgatttggctctctgtttgtctgttattggtgtgtaagaatgcttgtgatttttgcacattgattttgtatcctgagactttgctgaagttgcttatcagcttaaggagattttgggctgagatgatggcgttttctagatatacaatcatgtcatctgcaaacagggacaacttgacttcctcttttcctaattgaatgccctttatttccttctcctgcctgattgccctctggtagaatttggctgtgaatccatctagtcccggactttttttggttggtaagctattaattattgcctcaatttcagatcctgttattggtgtattcagagattcaacttcttcctggtttagtcttgggagagtgtatgtgtcgaggaatttatccat

SEQ ID NO: 135487 - DNA, 1236 bp, Homo sapiens
actaccatgctgttttggttactgcagccttgtagtatagtttgaagtcaggtagcatgatgcctccagctttgttcttttggcttaggattgacttggcaatgcgggctcttttttggttccatatgaactttaaggtagttttttccaattctgtgaagaaagtcattggtagcttgatggggatggcattgaatctataaattaccttgggcagtatggccattttcacgatattgattcttcctacccatgagcatggaatgttcttccatttgtttgtatcctcttttatttcattgagcagtggtttgtagctctccttgaagaggtccttcacatcccttgtaagttggattcctaggtattttattctctttgaagcaattgtgaatgggagttcactcatgatttggctttctgtttgtctgttattggtgcataagaatgcttgtgatttttgcacattgattttgtatcctgagactttgttgaagttgcttatcagcttaaggagattttgggctgagacgatggggttttctagatatgcaatcatgtcatctgcaaacagggacaatttgacttcctcttttcctgattgaatgccctttatttccttctcctgcctgattgccctggccagaacttccaacccatcaatatctaatttattgagagtttttagcatgaagggttgttgaattctgtcaaaggccttttctgcatccattgagataatcctgtggtttttgtctttggttctgtttatatgctggattacgtttattgattttcgtatgttgaaccacccttgcacccctgggatgaagcccacttgatcatggtggataagctttttgatgtgttgctggattcggtttgccagtattttattgaggatttttgcatcaatgttaatcaaggatattggtctaaaattctctttttttgttgcatctctgccaggctttggtatcaggatgatgctggcctcataaaatgagttagggaggattccctctttttctattgattggaatagtttcagaaggaatggcaccagctcctccttgtacctctggtagaattcggctgtgaatccatctggtcctggactttttttggttggtaagctattaattattgcctcaatttcagagcctggtctattcagagattcaacttcttcctggtttagtcttgggagagtgtatgtgtcgaggaatttgtcca

SEQ ID NO: 135488 - DNA, 1260 bp, Homo sapiens
tcatgctattttggttactgtagccttgtagtatagtttgaagtcaggtagcgtgatgcctccagctttgttcttttggcttaggattgacttggcaatgcgggctctttgttggttccatatgaactttaaagtagttttttccaattctgtgaagaaagtcattggtagctcgatggggatggcattgaatctataaattaccttgggcagtatggccattttctcgatattgattcttcctacccatgagcatggaatgttcttccatttctttgtatcctcttttacttcattgagcagtggtttgtagttctccttggagaggtccttcacatcccttgtaagttggattcttaggtattttattctctttgaagcaattgtgaatgggagttcactgatgatttgactctctgtttgtttgttattggtgtataagaatgcttgtgatttttgcacattgattttgtatcctgagactttgctgaagttgcttatcagcttaaggagattttgggctgagatgatggggttttctagatatacaatcatgtcatctgcaaacagggacaattggacttcctcttttcctaattgaatgccctttcttccttctcctgcctgattgccctggccagaacttccaacactctggtagaatttagctgtgaatccatctggtcctggactttttttggttggtaagctgttaattattgcctcaatttcagagcctgttattggtctattcagagattcaacttcttcctggcttagtcttgggagtgtgtatgtgtcgaggaattcaaccatttcttctagattttctagtttatttgcgtagaggtgtttatagtattctctgatggtagtttgtatttctgtgggatcactggtgatatcccctttgtcattttttattgcatctatttgattcttctctcttttcttctttattagtcttgctagcagtttatcaattttgttgatcttttcaaaaaaccagctcttcagttctgctctaatcttagttatttcttgccttctgctagcttttgaaggtgtttgctcttgctcctctagttcttttaattgtgatgttagggtgtcaattttagatctttcctgctttctcttatgggcatttagtgctatacatttccctctacacactgctttgaatgtgtcccagagattctggtatgttgtgtctttgttctcgttggtttcaaagaacatctttatttctgccttcat

SEQ ID NO: 135489 - DNA, 1059 bp, Homo sapiens
ttatgctgttttggttactgtagccttgtagtatagtttgaagtcaggtagcatgatgccttcagctttattcttttggcttaggattgacttggcgatgcgggctctcttttggttccatatgaacttgaaagtagttttttccaattctgtgaagaaagtcattggtagcttgatggggatggcattgaatctgtaaattaccttgggcagtatggccattttcacgatattgattcttcctacccatgagcatggaatgttcttccatttgtttgtatcctcttttatttcattgagcagtggtttgtagttctccttgaagaggtccttcacgtcccttgtaagttggattcctaggtattttattctctttgaagcaatcatgaatgggagttcactcatgatttggctctctgtttgtctgttattggtgtataagaatgcttgtgatttttgtacattgattttgtatcctgagactttgctgaagttgcttatcagcttaaggagattttgggctgagacaatggggttttctagatatactatcatgtcatctgcaaagagggacaatttgacttcctcttttcctaattgaataccctttatttccttctcctgcctaattgccatcccagggatgaagcccacttgatcatggtggataagctttttgatgtgctgctggattcggtttgtcagtattttattgaggatttttgcatcaatgttcatcaaggatattggtctaaaattctcttttttggttgtgtctctgccaggctttggtatcaggatgatgctggcctcataaaatgagtttgggaggattccctctttttctattgattggaataatttcagaaggaatggtaccagttcctccttgtacctctggtagaattcagctgtgaatccatctggtcctggactttttttggttggtaagctattgattattgcctcaatttcagagcctgttattggtctatacagagattcaacttcttcctgttttagtcttgggagggtgtatgtgtcgaggaatttatccat

SEQ ID NO: 135490 - DNA, 1323 bp, Homo sapiens
atgaaaaacaagcccagtaaaagatgtattcacagctgtattctaccagataccccaagaggaactggtaccattcctactgaaactactccaaaaattgaggagaaaggactcctctccaactcattctatgaggccagcctcaccctgaaactaaaacctgggagagacacaacaagaagaaatgttcaggccaacatttttaggaacattgatgcaaaaagactcaacaaaatgctggcaatcggaatcgagaagcatacccataagctattccacaacaatcaggcaggcttaatcccgtggttagaagtaagtcctggccagaacaatcaggcaagagagaaacataaagggccttcccaaatagaaagagagaaactcaaactatccctgtttgcagatgacatgattctatatttagaaaatcttcatagtgttcacccaaaatctccttcagctgataaacaactgcggcaaagtttcaggatacaagatcaacatcttcaaatcagtagcatccttatacaccaccaacagccaaaccaagagcctaatcaggaacacaatcctattcagaattgccacaaaaagaataaaatttctagaaatatggttaatcagggaaggacaaatgggtatttccagtatacccggtgtaaccacccagagacactccgggcaccaccctcaattgccaggggttgtggtagagtggtgtcagcgattcaagggtgttttttctacctctttagtgcctttttcagtgataaaaagttaaaagcagatattgctttcaatttgatgtttgattcttatgaagctgataagcaacttcagcgaagtctcaggatacaaaagcaatgtacaaaaatcacaagcattcttatacaccaacaacagacagagagccaaatcatgagtgaactcccattcacaattgcttcaaagacaataaaatacctaggaatccaccttacaagggacgtgaaggacctcttcaaggagaactacaaaccactgctcaatgaaataaaagaggatacaaacaaatggaagaacattccatgctcatgggtaggaagaatcaatatcgtgaaaatggtcatactgcccaaggtaatttatagattcaatgccatccccatcaagctaccaatgactttcttcacagaattggaaaaaactactttaaagttcatatggaaccaaaaaagagcccgcattgccaagtcaatcctaagccaaaagaacaaagctggaggcatcacactacctgacttcaaactacactacaaggctacagtaaccaaaacagcatag

SEQ ID NO: 135491 - DNA, 1071 bp, Homo sapiens
atgggagactttaacaccccactgtcaatattagacagatcaatgagacagaaagttaacaaggatatccaggaattcaacctcagctctgcaccaagcagaccagtgtgcagagagaaatttatagcactaaatgcccacaagagaaagcaggaaagatccaaaattgtcaccctaacatcacaattaaaagaactagagaagcaagagcaaacacattcaaaagctagcagaaggcaagaaataactaaaatcagagcagaactgaaggaaatagagacacaaaaaacccttcaaaaaatcagtgaatccaggagctggttttttgaaaagatcaacaaaattgatagaccactagcaagactaataaagaagaaaagagagaagaatcaaatagatgcaataaaaaatgataaaggggatatcatcaccactgatcccacagaaatacaaactaccatcagagaatactataaacatctctatgcaaataaactagaaaatctagaagaaatggataaattcctcgacacatacaccctcccaagactaaaccagaaagaagttgaatctctgaatagaccaataacaggctctgaaattgtggcaataatcaatagcttaccaaccacaaagagtccaggaccagatggattcacagccgaattttaccagaggtacaaggaggaactgagaataacatacctaggaatccaacttacaagggatgtgaaagaccacttcaaggagaactacaaaccactgctcaatgcaataaaagaggatacaaacaaatggaagaacattccatgctcatgggtaggaagaatcaatatcatgaaaatggccatactgcccaaggtaatttatagattcaatgccatccccatcaagctaccaatgactttcttcacagaattggaaaaaactactttaaagttcatatggaaccaaaaaagagcccgcatcgccaagtcgaccctaagccaaaagaacaaagctggaggcatcatgctacctgacttcaaactatactacaaggctacagtaaccaaaacagcatggtactag

SEQ ID NO: 135492 - DNA, 1191 bp, Homo sapiens; identical to SEQ ID NO: 125108

SEQ ID NO: 135493 - DNA, 1746 bp, Homo sapiens
ttagacgtgaatttcttgcccatgcttatgtcttgaattgcctaggctttcttctagggtttttatggttttaggtctaatgttgaagtctttaatccatcttgaattaatttttgtgtaaggtgtaaggaagggatccagtttccgctttctacctatggctagccagatttcccagcaccatttattaaatagggaatcctttccccattgcttgtttttgtcaggtttgtcaaagatcagatggttgcagatgtgtggtattgtttctgagggctctattctgttccattggtctacatctctcttttggtaccagtaccatgctgttttggttactatagccttgtagtatagtttgaagtcaggtagtgtgatgcctccagctttgttcttttggcttaggattgacttggcgatgcgtgctcttttttggttccatatgaactttaaagtagttttttccaattctgtgaagaaagtcattggtagcttgatggggatggcatcgaatctataaattaccttgggcagcatggccattttcatgatattgattcttcctatccatgagcatggaatgttcttccatttgtttgtatcctcttttatttcgttgagcagtggtttgtagttctccttgaagaggtccttcacatcccttgtaagttggatccctaggtattgtattctctttgaagcaattgtgaatgggagttcactcatgatttggctctctatttgtctgttattggtgtataagaatgcttgtgatttttgcacattgattttgtatcctgagactttgctgaagttgcttatcagcttaaggagattttgggctgagacgatggggttttctagatatacaatcatgtcatctgcaaacagggacaatttgacttcctcttttcctaatcgaatacactttttttctttctcctgtcttattgccctggccagaacttccaacactatattgaataggagtggtgagagaaggcatccctgtcttgtgccagttttcaaagggaatgcttccagtttttgcccattgaggatgatattggctgtgggtttgtcataaatagctcttattattttgagatatgtcccatcaatacctaatttattgagagtttttagcatgaagggctgttgaattttgtcagaggccttttctgcatctattgagataatcatgtggtttttgtctttggttctgtttatatactggattacgtttattaatttgtgtatgttgaaccagccttgcatcccagggatgaagcccacttgatcatggtggataagctttttgatgtgctgcagctcctccttgtacctctggtagaattcggctgtgaatccatctggtcctggaatttttttggttggtaagctattaattattgcctcaatttcagggcctgttattggtttattaagagattcagcttcttcctggtttagtcttgggagggtgtatgtgtcgaggaatttatccatttcttctagattttctagtttatttgcgtagaggtgtttatagtattctctgatggtagtttgtatttctgtgggatcggtggtgatatctcctttatcattttttattgtgtctatttgattcttctctctttttttctttattagtcttgctagcggtctatcaattttgttgatcttttcaaaaaaccagctccttgattcattgattttttgaagggttttttgtgtctccat

SEQ ID NO: 135494 - DNA, 733 bp, Homo sapiens
gctgcccttcatcctccagagctccaccagggtgatcgtagaccagaagggtccagtccaaaatctccttaagctgataagcaacttcagcaaagtctcaggatacaaaatcaatgtacaaaaatcacaagcattcttatacaccaataacagacaaacagagagccaaatcatgagtaaactcccattcacaattgcttcaaagagaataaaatacctaggaatccaacttacaagggacgtgaaggacctcttcaaggagaactacaaaccactgctcagtgaaataaaagaggatacaaacaaatggaagaacattccatgctcatgggtaggaagaatcaatattgtgaaaatggccatactgcccaaggtaatttatagattcaatgccatccccatcaagctaccaatgactttcttcacagaattggaaaaaactactttaaagttcatatggaaccaaaaaagagcccgcatcgccaagtcaatcctaagccaaaagaacaaagctggaggcatcatgctacgtgacttcaaactatactacaaggctacagtaaccaaaacagcatggtactggtaccaaaacagagatatagatcaatggaatagaacagagccctcagaaataacgccacatatctacaactatctgatctttgacaaacctgagaaaaacaagcaatggggaaaggattccctatttaataaatggtgctgggaaaactga

SEQ ID NO: 135495 - DNA, 755 bp, Homo sapiens
ttcaaattaccgtctttacgctgcataccgctaaacaattttttaccggtagcatcagtgacctccagccagcaatcggcagtaaagttcatcaccagcgcattcggatcagccaccggcgtggtcacgccagcctgatcggttggcaacggcgcagcaccatctggcgttgttgctgccgttggtgccggggtcgcggcggtatcaacatttgcctgcgaaggcgaaacaaccgcattctgttgcggatcaacagctggtgctggcgcagttacggcaggtgtttgcgtgttggttgcggtagtatccacagacgctggcggcgtggacgttgtatccggcaaaccgttgccgccgcggcgatggatgcattacaggtagacgaatggtactcccgcgtacgccgtgccgcaccgtggaaagatctgccaagacgtgtttttgacgccacgctggatatgctttccgggcgctatccctctggcgatttttctgcttttcgccccaaactggtctggaacagggagaccgggatattgaccgcccgacctggcgctcaattgttggcggttaccagcggcggcaccattccggatcgtggcatgtatagcgtgttattacccgaaggtgaagaaaaggccggttcgcggcgggtgggtgaactggatgaggagatggtatatgagtcgcgggtgaacgacattatcactctcggcgctacctcatggcggatccagcaaatcacccgcgatcag

SEQ ID NO: 135496 - DNA, 1032 bp, Homo sapiens
atggagctaaccgttaatccaggcgaaaacgtgcaaaagctgttgtttaacatgggaatgcactctgtaacagaccgatactggcgagcagcgtcacaattgccagcacaataccaagacttaacatccatttatgacgtttatacagtcgtagctctcaatacgccccgggcagatgactaccacccggtcatggtgctgtgcgcgaaaacggacaaagcgcaccggaatgtcatccacaccagtaaactctgcttcatcacgctgacgccagaaatcagtcagcggtcccatggtaaaagcagcaaacgcgttttctcttgtttcccagtctttttgctgctgaaacatcggcgtattgtggcacaaaaatatgcggaactggcctatgacctgttccatttggggtttgatgtcttaatcatcgaccatcgcgggcagggacgttccggtcgcctgttagccgatccgcatctcgggcatgttaatcgctttaatgattatgttgatgatctggcggcattctggcagcaggaggttcagcccggtccgtggcgtaaacgctatatactggcacattcgatgggcggtgcgatctccacattatttctgcaacgccatccaggtgtatgtgacgccattgcgctaactgcgccaatgtttgggatcgtgattcgtatgccgtcatttatggcacggcagatcctcaactgggccgaagcgcatccacgtttccgtgatggctatgcaataggcaccgggcgctggcgcgcgttgccgtttgctatcaacgtactgacccacagcagacagcgatatcgacgtaacttacgcttctatgctgatgacccaacgattcgcgtcggtgggccgacctaccattgggtacgcgaaagtattctggctggcgaacaggtgttagccggtgcgggtgatgacgccacgccaacgcttctcttgcaggctgaagaggaacgcgtggtggataaccgcatgcatgaccgtttttgtgaactccgcaccgccgcgggg

SEQ ID NO: 135497 - DNA, 1357 bp, Homo sapiens
ctgatgcctgagtcagcaggtgggtagagctggcatctgagtctaaaggcgctggcctggggcttgggccttctgtgtagacctgaatcctgggtttgtggtgcaagcctagtactggagtccaccagagtggacttgtcaactggatctgtaggaagaagcctgaagcacatgtctttggtgtccatcctgaagcctgggtccatggggtcaggcctggttcagggatggtcctagtccctgagtccacagggattggcctgaagcctaattccatgggagctgactgggaacatgctgttttggttactgtagccttgtagtatagtttgaagtcaggtagtgtgatgcctccagctttgttcttttggcttaggattgacttggctatgcgggctcttttttggttccatatgaactttaaagtagttttttccaattctgtgaagaaagtcactggtagcttgatggggatggcattgaatctataaattaccttgggcagtatggccattttcacgatattgattcttcctacccatgagcatggaatgttcttccatttgtttgtatcctcttttatttccttgagcagtggtttgtagttctccttgaagaggtccttcacgtcccttgtaagttggattcctaggtattttattctctttgaagcaattgtgaatgggagtttactcatgatttggctctctgtttgtctgttattggtgtataagaatgcttgtgatttttgtacattgattttttttttgtatcctgagactttgctgaagttgcttatcagcttaaggagattttgggctgaggcagtggggttttctagatatacaatcatgtcgtctgcaaacagggacaatttgacttcctcttttcctaattgaataccctttatttccttctcctgcctaattgccctggccagaacttccaacactatgttgaataggagtggtgagagagggcatccctgtcttgtgccagttttcaaagggaatgcttccagtttttgcccattcagtatgatattgggtgtggatttgtcatagatagctctaattattttgaaatacgtcccatcgatacctaatttattgagaggttttagcatgaagggttgttgaattttatcaaaggccttttctgcatctattgagataatcatgtggtttttgtcttcggttctgtttatatgctggattacatttattgatttgcgtatattgaaccagccttgcatcccagggatgaagcccacttgatcatggtggataagctttttgatgtgctgctggatttgttttgccagtattttattgaggatttttgcatcaatgttcat

SEQ ID NO: 135498 - DNA, 852 bp, Homo sapiens
atgccctctctcaccactcctattcaacatagtgttggaagttctgggccagggccaattaggcaggagaaggaaataaagggtattcaattaggaaaagaggaagtcaaattgttcctgtttgcagatgacatgattgtatatctagaaaaccccattgtctcagcccaaaatctccttaagctgataagaaacttcagcaaagtctccagatacaaaatcaatgtacaaaaatcacaagcattcttatacaccaataacagacaaacagagagccaaataatgagtgaactcccattcacgattgcttcaaagagaataaaatacttaagaatccaacttaaaagggacgtgaaggacctcttcaaggagaactacaaaccactgctcaacgaaataaaagaggatacaaagaaatggaagaacattccatgctcatgggtaggaagaatcagtatcgtgaaaatggccatactgcccaaggtaatttatagattcaatgccatccccatcaagctaccaatgactttcttcacagaattggaaaaaactactttaaagttcatatggaaccaaaaaagagcccgcatcgccaagtcaatcctaagccaaaagaacaaagctggaggcatcacactacctgacttcaaactatactacaaggctacagtaaccaaaacagcatggaaattccattttaccatgtttggagtggatctcaaagaaacctgcactgcaccttcactctggaaagatttagccctgaacacagtggagctggtttgcaaactctgtgtgcggcaggtggaaggagcaaggcagatcttccagctcaactgcaccgtgtcagag

SEQ ID NO: 135499 - DNA, 795 bp, Homo sapiens
gtgcgatgaatactgaagccacgcacgaccaaaatgaagcacttactaccggcgctcgcctgcgtaatgctcgcgaacaactaggacttagtcagcaggccgttgccgagcgactttgcctgaaggtttccacggtacgcgacattgaagaagataaggcacccgccgatcttgcttcaacattcctgcgcggatatatccgctcttatgcgcgtctggtacatattccagaagaagaactgctgccagggctggaaaagcaggctccacttcgggctgcaaaagttgcgccgatgcagagtttttccctcggtaaacgccgcaaaaaacgcgacggctggctgatgaccttcacttggctggtgttgtttgtggttatcggcctgagcggtgcctggtggtggcaagaccgcaaagctcagcaggaagagatcaccactatggccgatcaatcttcggcggaactgagcacccccccagccacggttggtgaagttcgtcttggaggagtagacctgggtggagggaggaccctggagggacctgcaggcatgcaagctcatcaaccccatggaggtaagagagcatgtgccccgcagaccctcatcaaccccatggaggtaagagagcatgtgccccgcaggcatgcaagccagtgcttctgggtgaagtcaggcagggatatgggggaccccagtggcctggtcagtctgtcgtctgtgacgctatccacgatcctgtgccagatggccagctacccactgactctggtgcgcaccaggatgcaggcccaag

SEQ ID NO: 135500 - DNA, 1023 bp, Homo sapiens
tcaaagtttggccgtaaaagccccaacgtagtttgcagtcttgaaagcgtcgataagctgattaccgacgcaggtatcgatccggcgtttcgtcaggcgctggaagagaaagggatcgatgtgatcataaccggagagagcaatgagtgaagcactacggaacgtctgggcgatgattttgttcgcgccgccaatatcatcctgcactgtgaaggcaaagtggtggtttcgggaattggcaaatcgggccacattggtaagaaaatcgccgcaacgcttgccagtaccggcactccggctttttttgtccatccggcagaagcgctgcacggcgatctggggatgatcgaaagccgcgatgtgatgctgtttatctcttactccggtggcgcgaaggaactggatctgattattccgcgtctggaagataaatctatcgcgcttgcgccgaactccagaacggtgattacctgatgttggtttagcgccggggatgggggcctgccgggcccggattatggacaagattttgcggctcacccagcgggggctggggccctctataaatgcagggatctcatcaatgacaacatcctgcggactgtttcctgccagtcccatgatgatggcgacatccgtggcatggcctttgcccgtcagtgacaacgacccgtacagatcgaccacaatatggctcgtcgcggttaataagccgctactttccagccgatcaataaaactttttccggcattcattggccccacggtatgcgaactggagggaccaatcccaattttgaaaatatcgaatgcactaatcatatccacaccctcggattgccgttcagtgaagtggagcggaacgactgcgatggcttcaatttccagcttcacatctttcggcaaacgcgcgacctgcacacagctccgggtcggataggtcgcctgatgctcatcgaagaactgcttatagacttcgttgatggtggcaaaatcattcagatcggtgataaacacggtcat

SEQ ID NO: 135501 - DNA, 2163 bp, Homo sapiens
atgaccgccatcgccagcgcgtcacccatcatcagggtattgacggtgctggaggtcggcgcaaggtgcatcgggcaggcttcgcgttctacggagatatccagcaccgcttttgccgccaggcccagcggtgacgtcggtttgccgcagcgcgatagatttatcttccagacgcggaataatcagatccagttccttcgcgccaccggagtaagagataaacagcatcacatcgcggctttcgatcatccccagatcgccgtgcagcgcttctgccggatggacaaaaaaagccggagtgccggtactggcaagcgttgcggcgattttcttaccaatgtggcccgatttgccaattcccgaaaccaccactttgccttcacagtgcaagatgatattggcggcgcgaacaaaatcatcgcccagacgagcaacatcatgacgcatattcggatcgaaaaaggaacgggtggctggggcggcccgcttgagctgaaagccacgccgggaaaaaaaatcgtctatatcaccgccggtacccggcctgcgattgttgacaaactggcacagcttactggctggcaggctattgacggatttaaagaaggtgaacccgcggaggcggaaattggtgtcgcggtaatcgactgtggcggcacattacgctgcggcatctatccgaaacgacgtattcccaccattaatatccactcgacgggcaagtccggtccgctggcgcagtacattgtggaagatatttatgtctctggcggtaaagaagaaaacatcactgtagtaggtgatgcgacaccacaaccctctttcgtgggcccggactatgacaccagtgaaaaattaatgatcgtcaggaagaagcccatcggcgtccagatgctgtaccaggtcggaacggtatcaatgctgttatacacacgcaccatcatccagacaaagatgacgccaagaaccatcgtcactatcagccacagcgtacgcaatgccggtgacagctttttcagcattgccagcaaccagccgatgccgcctacggcaaaaaagatcgaaccgctggcgatttcgttactgagtgctgaagcccctacccggttgagcgagttaaaagcgcgcattggtgaaccaagatggagcatagaggcgataaagccaatgcccatcagcacccataaaccaaacatgcaggcgataacgcccccagctagacgagccatactaagcccctgcgcttgtgagtccagaagcaggcaggaaccctgccctcctgggtgccactgcagctgcccaaaccacagctgcagatccaggctaaaaggagttctgagcatggaacaatacctgctacaacaaaagcacgtaggaactcccccggggccctttcgcccaccggacaccaaccaaccctgttggaaaacgaagcccagtcaaagggaagagtacacaagaagggtaggcttcacaggacacagtaaccagggagccaagataattcgaacacatattatatgtaggcggcgaacgagttttgccctggagcgccctggtgacggtttccaagcggtagtagggggcacagtcctaatggggctaccacggactaaaaacgttggtttgcccgtgaccatcctcggaagagttcacaggcggtccagcgagaggtttccccgaacgagcgagagcgcaattaaccggaaggacgccgggccaaaggacccagttagacaacgacttgcttacaaaaagcaccccatggagaggcgtcatgggccccacgttgttgcccggacttttggccgggccattccaacccttgggccacaccggaccgttctatccacaaggtttcaggtggcaaaaaacccattgggtccgattggcccaagcccattggcagttttaacttggacagttccgaggcccaaaaacggccgacggggggggaagcaaagggcccggattatctgccagtcacggcgcgaagcatcatgtaataacgtatgtttagccagatcttccggtgtcttcaagggtttttcgccagtcagcagtagcggcgaacacaccggcaataaatattcggcgtacagtttttccttgtgccccttatttgtctttcttccgctctctgggcggctcctgcaacggtaa

SEQ ID NO: 135502 - DNA, 1524 bp, Homo sapiens
ttatttttcacgaatgtagtcgaaattacgagtacgtaaaaactccgcccgcaccacgccgaccagactcatccagccaaacaagacagtaattgccagcagccaccagaagttaggctgtacgacgctggaaagtaaaataatcaaaaacagcgtcggcatccccgaccatacttcaataaagcgttgtccccagagatcgactttaccgccgtaatagccttgtagcgcccccgccagcacgcccatcacgctggaacagagagtcagcatcaggccaaacagaaccgagatccgcgtgccatagagaatgcgtgccagcacatcgccgccgttggcatccgttcccagccagttttgccgggagggtggagaagggaagggcttattggtagcaaagttgatactggtagcaccaaagcgaatcggtgcccacagtacccagccgttattttccagccgttgtttcagccacgggtcctgataatcagcctgacttgccagcgggccgccaaaatcgctttcgctgtagtttttcaataacgggaaataccaactgccgtcataacgcaccagcaacggtttatcgttggcgataagttcagaacacaaactcaaaccaaacaagacgaggaaaatccataacgaccagtagccgcgacggttatgacgaaaacgcgcccaacgggcctgattgacggggctgagtcgcgacattaacgtccgcggatcaaccagcgtatagctgatatcactgacaatattcagcagcaggccaatcagggtgaaaatatacaaggtaccaaacattacaggataatcgcgcgagacggtcgcttcgtagcccagtaagcccagaccattgagtgaaaacatcacctcaatcagcagcgagccggtaaaaaacatgctgataaacgtcgccggaaaaccggcaatcaccagcagcatggcgttgcggaacacatgtttccagagaatatttttttcacttacccctttcgcacgcgcggtcaccacgtattgcttgcgcacttcatcaaggaatgagttttttgtcagcatggtcagcgccgcaaagccaccaatcactgtcgccagcaccggcagcgtgatatgccacagataatcggtgattttctgataccacggcagcgaatcaaagttagcggaaaccaggccgcgtagagggaacaggtcgaaatagctgccgcccgcgaagaagacaatcagcaggatggcaaacaaaaaggccggaatggcgtagccgatgatgataaatgcgctactccagacgtcaaagcggctcccattataaacagctttgcgaatgcctaacggaatcgacaccagatagataatcagcgtgctccacaatccgagggtgatggaaaccggcagactgtctttaatcagcgtcagcaccgaggcgctgcgaaacaggctatcgccaaaatcaaagcggatgtagtcccagagcatttgaagaacgttcggggtcctctagagcacctggggcatcag

SEQ ID NO: 135503 - DNA, 2025 bp, Homo sapiens
atggaaggtcagtcgatcgtcaacgttgatgagatccaccgtgccgcccgctttttctatcaggccagacagcgggatttgtacggtgccggaggatcaaatgctatctgtgctgatgtacagcacaagttcttgcgcattggcgtacgctgtcaggcctatcctgatgctcacatcatgatgatgtccgcttcgttgttacaggaaggagatgttgtgctggtagtgacccattccgggcgaaccagtgatgtaaaagcggccgtagaactggcaaaaaagaacggggcaaagattatttgtataacccatagctaccattcaccgatagcgaaactggccgattatattatttgctcaccagccccggaaacgccgttattaggtccccagaactttagcaacaacgcccgcgccaacggtacggccgccttcacggattgcgaaacgcagaccgtcgtccatcgcgatcgggtggatcagggtaacaaccattttgatgttgtcgcccggcattaccatctctacgccttccggcagttcgatggtaccagtcacgtcagtagtacggaagtagaactgcggacggtagcctttgaagaacggagtatgacggccgccttcatctttggacagaatgtacacttcagattcgaacttggtgtgcggcttgatggtgcccggcttagccagtacctgaccacgttcgatttcttcacgtttgataccacgcagcagaacacctacgttctcaccagcacggccttcgtccagcagtttgcggaacatttcaacgccagtacagaactaaacataaagttagatcttgtctttgaatcaatggctaggcatttcgggttcccgttcaatgaccatccccagggcgttggctttttgattctggagacgatgtgcagcgaaattcaggctgcgtgtcgggaaacggcgcaacggatcccggaaagtgatgctgaactggcgcgctgcattttcgacagtctggcgctgctgtatgccgatgtgttgcatgagctggcgcagctgcgcggtgaagatttctcgcaactgcatattgtcgccgtgaggcttgccagatccccgttgctcaaccagctatgcgccgatgcctgcggtattcgggtgatcgccgggcctgttgaagcctcgacgctcggcaatatcggcatccagttaatgacgctggatgaactcaacaatgtggatgatttccgtcaggtcgtcagcaccaccgcgaatctgaccacctttacccctaatcctgacagtgaaattgcccactatgtggcgcagattcactctacacgacagacaaaggagctttgcgcatgaccactcaactggaacaggcctgggagctagcgaaacagcgtttcgcggcgatggggattgatgtcgaggaggcgctgcgccaacttgatcgtttacccgtttcaatgcactgctggcagggcgatgatgtttccggttttgaaaacccggaaggttcgctgaccggggggattcaggccacaggcaattatccgggcaaagcgcgtaatgccagtgagctacgtgccgatctggaacaggctatgcggctgattccggggccgaaacggcgtaatttacatgccatctatggatcaaaggttttcgcggtagcgggatgcgtcgtgttgatgacgaccatgcccgacagttgcaattcgtggcaaaaatgcaggaataaaacaatgaacaagaagattcattccctggccttgttggtcaatctggggatttatggggtagcgcaggcacaagagccgaccgatactcctgtttcacatgacgatactattgtcgttaccgccgccgagcagaacttacaggcgcctggcgtttcgaccatcaccgcagatgaaatccgcaaaaacccggttgcccgcgatgtgtcgaagatcatccgtaccatgccaggcgttaacctgaccggtaactccaccagtggtcagcgtgggaataaccgacagattgatattcgcg

SEQ ID NO: 135504 - DNA, 1454 bp, Homo sapiens
atggagtgcgatgcgtctgcgttgctacgttacgattcgcggcagtttattccgcttgccatcgacggtctggcaaaggatgtactcggtagacgctttgcgctggaagggcatccacggctggaagcgattgcccgcgccggggatgtggtgcgctttcccgcagacagcgaattgcccgatccctatgacggtttgattcctgggcaggagagtctgaaggttcacgcctgcgttggtctgccattgtttgccgggcaaaacctgatcggcgcactgacgctcgacgggatgcagcccgatcagttcgatgttttcagcgacgaagagctacggctgattgctgcgctggcggcgggagcgttaagcaatgcgttgctgattgaacaactggaaagccagaatatgctgccaggcgatgccacgccgtttgaagcggtgaaacagacgcagatgattggcttgtcccctggcatgacgcaactgaaaaaagagattgagattgtggcggcgtccgatctcaacgtcctgatcagcggtgagactggaaccggtaaggagctggtggcgaaagcgattcatgaagcctcgccacgggcggtgaatccgctggtctatctcaactgtgctgcactgccggaaagtgtgcggaaaagtgagttgttcgggcatgtgaaaggagcgtttactggcgctatcagtaatcgcagcgggaagtttgaaatggcggataacggcacgctgtttctggatgagatcggcgagttgtcgttggcattgcaggccaagctgctgagggtgttgcagtatggcgatattcagcgcgttggcgatgaccgttgtttgcgggtcgatgtgcgcgtgctggcggcgactaaccgcgatttacgcgaagaggtgctggcagggcgattccgcgccgatttgtttcatcgcctgagcgtgtttccactttcggtgccgccgctgcgtgagcggggcgatgatgtcattctgctggcggggtatttctgcgagcagtgtcgtttgcggcaggggctctcccgcgtggtattaagtgccggagcgcgaaatttactgcaacactacagttttccgggaaacgtgcgcgaactggaacatgctattcatcgggcggtagttctggcgagagccacccgcagcggcgatgaagtgattcttgaggcgcaacattttgcttttcctgaggtgacgttgccgacgccagaagtggcggcggtgcccgttgttaagcaaaacctgcgtgaagcgacagaagcgttccagcgtgaaactattcgtcaggcactggcacaaaatcatcacaactgggctgcctgcgcgcggatgctggaaaccgacgtcgccaacctgcatcggctggcgaaacgtctgggattgaaggattaaataatcccggcctgatagaaatcctgcaggtttattgcgccggt

SEQ ID NO: 135505 - DNA, 4303 bp, Homo sapiens
tcaccagcgcattcggatagccaccggcgtggtcacgccagcctgatcggttggcaacggcgcagcaccatctggcgttgttgctgccgttggtgccggggtcgcggcggtatcaacatttgcctgcgaaggcgaaacaaccgcattctgttgcggatcaacagctggtgctggcgcagttacggcaggtgtttgcgtgttggttgcggtagtatccacagacgctggcggcgtggacgttgtagccgggtctgtagttgtcgacgtatttaatggaacactctgcccctgctcgctattactgctcagttccgccgaagattgatcggccatagtggtgatctcttcctgctgagctttgcggtcttgccaccaccaggcaccgctcaggccgataaccacaaacaacaccagccaagtgaaggtcatcagccagccgtcgcgttttttgcggcgtttaccgagggaaaaactctgcatcggcgcaacttttgcagcccgaagtggagcctgcttttccagccctggcagcagttcttcttctggaatatgtaccagacgcgcataagagcggatatatccgcgcaggaatgttgaagcaagatcggcgggtgccttatcttcttcaatgtcgcgtaccgtggaaaccttcaggcaaagtcgctcggcaacggcctgctgactaagtcctagttgttcgcgagcattacgcaggcgagcgccggtagtaagtgcttcattttggtcgtgcgtggcttcagtattcattcgccgatgtttcagcagcaaaaagactgggaaacaagagaaaacgcgtttgctgcttttaccatgggaccgctgactgatttctggcgtcagcgtgatgaagcagagtttactggtgtggatgacattccggtgcgctttgtccgttttcgcgcacagcaccatgaccgggtggtagtcatctgcccggggcgtattgagagctacgtaaaatatgcggaactggcctatgacctgttccatttggggttatatctatcagtcaggtccagtcttgcggcgcgcgtgggtagcggcaacctggccggcgttgcgctggctattaccgccggtggacctggagccgtcttttggatgtgggttgccgcgtttatcggcatggcgacctcgtttgccgaatgttctctggcacaactttataaagaacgtgacgtcaatgggcagtttcgtggcggaccggcatggtatatggcgcgcgggctggggatgcgctggatgggcgttctgttcgccgtctttttgctcatcgcctatggcataattttcagcggagttcaagcgaacgccgttgcccgcgccctgagtttttcttttgattttcccccgctggtgacaggcattattctcgctgtctttactctgctggcaatcactcgcggtcttcatggcgtcgcccggctcatgcagggctttgtcccgttgatggcgataatctgggtactgaccagcctggtaatttgcgtaatgaatatcgggcaacttccccacgtcatttggtctatttttgagagtgcttttggctggcaggaagcggcaggcggcgcggcgggatataccttaagccaggcgattactaacggttttcagcgcactatgagcaaagtaactccccagccgaaaatcggctttgtttcccttggctgtccgaaaaaccttgttgattcagagcgtattctcaccgaactccgcactgaaggttatgacgtggtaccgagctatgacgatgcggacatggtgatcgtcaacacctgcggctttattgacagcgcggtacaagaatcactggaagccattggtgaagcgttgaatgaaaacggcaaggttattgtgaccggttgtctgggggcaaaagaagatcagatccgcgaagtccacccgaaagtgctggaaatcaccgggcctcatagctatgagcaggttctggagcacgttcatcactacgtgccaaaaccgaaacacaacccattcctgagcctggtgccagaacaaggtgtgaaactgacgccgcgtcattatgcctatctgaaaatttctgaaggctgtaatcaccgctgcaccttctgcattattccgtctatgcgcggcgacctgtcgcttttggcggtgaatgctgaattaaaacgcagaattttgtccgatagtggtatcggtgtaccattcgcgcagacgaaaattcttaaccttaatctggaatacgccatgaccacacgcgtgattgctctcgacttagacggcaccttattgaccccgaaaaagaccctgcttccttcatcgatagaagccctggcccgcgctcgcgaagcaggctatcaattaatcatcgtcacaggtcgccatcacgtcgctattcatcctttttatcaggcgctggcgctggatacacctgctatttgctgtaatggcacctatttgtatgattatcatgcaaaaaccgtgctggaagcggacccaatgcccgttattaaagccctgcaactcattgagatgctgaatgaacaccacattcacggtctgatgtatgtcgatgatgcaatggtctatgagcacccgaccgggcatgtcattcgcacatctaactgggcgcaaaccctgccgccggaacagcgtccgactttcacacaagtcgcttctctggctgaaacggcgcaacaagttaacgccgtatggaagttcgccctgacgcacgatgacctgccgcaattgcagcattttggtaagcatgtcgaacatgaactgggactggagtgtgaatggtcctggcacgatcaggttgatattgcacgcggcggcaacagcaaagattcaaacttcaaaaccgatcccggcgcgatatcgtcggggacaggcactgtccatgtggcaggccctgtctctttgccatcgaaagccgctggtatcgcagataaccctctggtgatccgcggacctggcgctgggcgcgacgtcaccgccggggcgattcagtcggatatcaaccggctggcacgcctgatccaccagctcggtaaacggcacgctaccgtcgaattgcaggaacagccagccggcaaggcaaacacgggccgaagtgcagtgaacccgaaggcagaactggcgaccaaaatggcggaatatccggatcaccggaacacgacgcagttaaccgggccacagcacgaccaggagtatcatcagcttcgtcagaaatcgtctcatggtatcctcaatgggcctgaattagtctttatcgattcggctggctaccgcgccctgctggttgcgatatttcgcatcttcacggcggttccagcccaccagatcggctggcagcgtcaccgactccagcgtcaccgccagcgccagctctcctgggtgaagatagaacgcctcgccctcgtcgagaacgatctcatcgctcatcacgcggtcaagcgcggcgctcacttcatctttgggaccgctcagatcgataaacgctgccgtgtgaccacggaagatgttgccacgcaaatgaccaacaagtcgggtttgctggaaattactcaactgcagggcaaacttaacggtggacaggtttcactgccgggcacgctggacgcgacatcaataaatccgcggataaacttccagccacggctggaaaacgttgagattggtaccattctgaaggcgtttaactatccgatttcgttgaccggaaaaatgtcactggctggtgatttctccggtgctgacatagatgccgacgcattccgccacaactggccaaggacaggcacatgtcgaaatgaccgacacgcgcatggaagggatgaacttccagcagatgattcagcaagcggtagagcgtaatggcggtgatgtgaaggccgctgaaaactttgataacgtgacgcggcttgaccgctttaccaccgatttgacgttgaaggatggcgtcgtgacgttaaacgacatgcaaggtcaatcgcctgtgctggcgctgacaggggaaggcatgttgaatctggcagatcaaacctgcgacacccagtttgatattcgggtcgtgggtggctggaacggggaaagcaaactgattgatttcctgaaagaaacgccagtaccgctgcgggtttatggcaactggcagcaactcaattacagcctgcaagtggatcagttactgcgcaaacatctacaggacgaagcgaaacgtcgcctgaatgactgggccgagcggaataaagattcccgtaatggcaaagatgtgaagaagttgctggagaagatgtag

SEQ ID NO: 135506 - DNA, 4810 bp, Homo sapiens
ttaaacgacatgcaaagtcaatcgcctgtgctggcgctgacagcggaaggcatgttgaatctggccgatcaaacctgcgacacccagttcgatattcgggtcgtgggtggctgaaccgggcacagcaactgattgattcctgaaagaacgcagtacgctggggttatgcaccggagcagtcattccgcctaagggctcgtcgtgcacttttcggaaacagactccgtaatatggcgaggatgacccgtgtgcactgcacgctctgaaattgtcaggcccctggctaagcgaggctcggtgggcaatcgtgtaaggcgccttccataggcggacggtccccccgcaagcattggacgccgtctgtcccgttgggctctcgctatacgccgagacgtccgattcgtccagattagttattcgagctcggtacctaacggcgaggagcagatggtggttatcacctaagttgaccggcctggcgcgcgtcctgattgggttgtggatcaggtattcgatctgttcgttaacctcgacgcgaccgacgagcagatggacttcccgatcgtttacgctcctgcgctgaactggtatcgcgggtctggaccacgaagatatggcggaagacatgacttcgccgacggtcaggctaataccgtcgatgccaataaatcctttgtacagaatatatttcatcaactgactatcctggactttaaaccatatctggcgattattttcccatgtaaaactcattggaacaggcctgggagctagcgaaacagcgtttcgcggcggtggggattgatgtcgaggaggcgctgcgccaacttgatcgtttacccgtttcaatgcactgctggcagggcgatgatgtttccggttttgaaaacccggaaggttcgctgaccggggggattcaggccacaggcaattatccgggcaaagcgcgtaatgccagtgagctacgtgccgatgctttcccatgccgacgacagcattcgccagttctggattgatcactgcaaagccagccgtcgcgtttcggcctattttggcgagcaactcggcacaccatcggtgatgaacatctggatcccggatggtatgaaagatatcaccgttgaccgtctcgccccgcgtcagcgtctgctggcagcacgttgctgccgttggtgccggggtcgcggcggtatcaacatttgcctgcgaaggcgaaacaaccgcattctgttgcggatcaacagctggtgctggcgcagttacggcaggtgtttgcgtgttggttgcggtagtatccacagacgctggcggcgtggacgttgtagccgggtctgtagttgtcgacgtatttaatggaacactctgcccctgctcgctattaaggaatgagttttttgtcagcatggtcagcgccgcaaagccaccaatcactgtcgccagcaccggcagcgtgatatgccacagataatcggtgattttctgataccacggcagcgaatcaaagttagcggaaaccaggccgcgtagagggaacaggtcgaaatagctgccgcccgcgaagaagacaatcagcaggatggcaaacaaaaaggccggaatggcgtagccgatgatgataaatgcgctactccagacgtcaaagcggctcccattataaacagctttgcgaatgcctaacggaatcgacacctggtggtatgacgtcaataaagcggccaaactgccgtccgccagcaaacagggaacacctaagttcgtatcgatccgattattgttgcccaggatggttcgctttctggtcctggtatggcatactgttttggttactatagccttgtagtatagtttgaagtcaggtagcgtgatgcctccagctttgttcttttggcttaggattgacttggcgatgcgggctctgttttggttccatatgaacttgaaagtagttttttccaattctgtgaagaaagtcattggtagcttgatggggatggcattgaatctataaattacttgggcagtgtgccatattcgcatatggaccagtagtgacacagaaacatctggctcgcctgacgggatgcgacgaattttcgccgccccataaagtacgcccacgactcgttcgcactggcccgtgccgtggagtagctcatctgggcgtaattccgggaaagccgccaggcgcttgatgcagtgtgggaagaggaacaggtgaagtttattgaagatatcaacttttccggaatgattcagggccgccgttcccgcagatggggcagaatagcccggcaaaccgatggtcggaatgccgccgtctggcgtgttgtgcaaggccaaaagcgacagaaggggcgacgccgtaacgctcatttttgactttgtcgcgtccggcatcgtgcgtttttttctctgacgtagtacgcgagaacgccaatcaagctgccgacaatcagcgataacgcatgcgaagccaaaattgttcgtcccgatacggatctggttttgctcgcggtggtacggttcgacgttgcggtctaaccagcgcaattcgaaataagggagccagtgttcattaatacggtaacggaaggtgttagtgatttcccaatgatgatctttcccgttgctactattaaagtcattcactcgcatgaagtaatgtggctcaaatgtataggaaaatttatcggtgattttaaaattccagtaggtgccaatttcataggtgtcattattatccagttccccgctcaaatctgttgaactatagttattatggttatagcgatttcgtactgtcagattaaaccatggtacaaatttagtagttgacgtccagatacacatcgaacccaatacgctgtttggttcgcgaccaccggtgctgccggacgatgacgcgttgtgggatatattcgaacatggtatcttgagatggtcgggtccgggctttccccactttctggacttgtgcgctggatcttttgccgatggcgccgctacaggggggctcgggacgccctattgggtctcttatcgccccatgccgagtccgccggcccgttggtgttatcccggtgttccccttgggccccctggtttgtgcccgggggacccctctttgttgcccttgcagcaatgtggttgcattgggtgccccgtgggccggttgaaagtccccccgcttggaccgtgggtcgttgctggccgctgacattgcagaaacggtggtcagccacgtcgagggggcgcgttttgcgctggtggaacgcgtggctgaagaggtggcggagctgctgttagcacgcttcaactcgccgtgggtgcgtatcaaactcagcaagccaggcgcagtggcgcgggcggcgaatgttggcgtaatcattgagcgtggcaataatccacatccgggttgatgtgctgaagtcgcgtaagtcattcggctgccttcgcgttctacggagatatccagcaccgcttttgccgccaggcccagcggtgacgtcgctttgccggtcatcgccagcagcgcgatagatttatcttccagacgcggaataatcagatccagttccttcgcgccaccggagtaagagataaacagcatcacatcgcggctttcgatcatccccagatcgccgtgcagcgcttctgccggatggacaaaaaaagccggagtgccggtactggcaagcgttgcggcgattttcttaccaatgtggcccgatttgccaattcccgaaaccaccactttgccttcacagtgcaggatgatattggcggcgcgaacaaaatcatcgcccagacgttccggtaaacggcttgcttcctgcaactccagcattaacgtctgacgtcccgcgttcagtagtgcttcactcattgctctccgatgcaggttggcgacgtcggtttccagcatccgcgcgcaggcagcccagttgtgatgattttgtgccagtgcctgacgaatagtttcacgctggaacgcttctgtcgcttcacgcaggttttgcttaaccacgggcaccgccgccacttctggcgtcggcaacgtcacctcaggaaaagcaaaatgttgcgcctcaagaatcacttcatcgccgctgcgggtggctctcgccagaactaccgcccgatgaatagcatgttccagttcgcgcacgtttcccggaaactgtagtgttgcagtaaatttcgcgctccggcacttaatagccaccgctgggagagcccctgccgcaaaacggtagttgagcgttttgagccggaagcggtgattgtactgtttaccatcttcatactgcgccgccgatgcgctaaacgctaaaactacataattaccgatcgccaggctaacattgttaaatgccgcaccggtatcggtattgaaaatggtgtaataattgccgctatttgcagaagaaacggtaccagtaaaggtagtggtcattgtttcctgagtatcaaatacgcaatcttgcaggcgaatcgcctgttcagccaaatccggattaatctcgcgtttaatttctactcctaaaccgcgaaacgcttctgcctgcgccagcacatttccgcgccctgaagagagttttttcattgcctgccgataattatcctgcgctttgtcgagactttgaccactcgcggacatgtcatcgatgaacaatacggtgcaggtataattgtcttttgggtgagttttattgaacgcgtaaggccctgtgtcatcgttgtcgtatggtgttctgaataaccttttgcctaagcctgttcggccagacgaccaagttacacgaaacat

SEQ ID NO: 135507 - DNA, 2341 bp, Homo sapiens
atgggagactttaacaccccactgtcaacattagacagatcaatgagacagaaagtcaacaaggatacccaggaattgaactcagctctgcaccaagcagacctaatagacatctacagaactctccaccccaaatcaacagaatatacatttttttcagcaccacaccacacctattctaaaattgaccacatacttggaagtaaagctctcctcagcaaatgtaaaagaacagagattataacaaactatctctcagaccacagtgcaatcaaactagaactcaggattaagaatctcactcaaaaccactcaactacatggaaactgaacaacctgctcctgagtgactactgggtacataacgaaatgaaggcagaaataaagatgttctttgaaaccaacgagaacaaagacacaacataccagaatctctgggacgcattcaaagcagtgtgtagagggaaatttatagcactaaatgcccacaagagaaagcaggaaagatccaaaattgacaccctaacatcacaattaaaagaactagaaaagcaagagcaaacacattcaaaagctagcagaaggcaagaaataactaaaatcagagcagaactgaaggaaatagagacacaaaaaacccttcaaaaaattaatgaatccaggagctggttttttgaaaggatcaacaaaattgatagaccgctagccagactaataaagaaaaaaagagagaagaatcaaatagacacaataaaaaatgataaaggggatatcaccaccgatcccacagaaatacaaactaccatcagagaatactacaaacacctctacgcaaataaactagaaaatctagaagaaatggataaattcctcgacacatacactctcccaagactaaaccaggaagaagttgaatctctgaatagaccaataacaggagctgaaaatgtggcaataatcaatagtttaccaaccaaaaagagtccaggaccagatggattcacagccgaattctaccagaggtacaaggaggaactgctgataagcaacttcagcaaagtctcaggatacaaaatcaatgtacgaaaatcaccaagcattcctatacaccaacaacagacaaacagagagccaaatcatgagtgaactcccattcacacttactacaacaagaataaaatacctaggaatccaacttacaagggatgtgaaggacctcttcacggagaactacaaaccactgctcaatgaaataaaagaggatacaaacaaatggaagaacattccatgctcatgggtaggaagaatcaatatcgtgaaaatggccatacttgcccaaggtaatttacagattcaatgccatccccatcaagctaccaatgactttcttcacagaattggaaaaaaactactttaaagttcatatggaaccaaaaaagagcccgcattgccaagtcaatcctaagacaaaagaacaaagctggaggcatcacactacctgacttcaaactatactacaaggctacaataaccaaaatggcatggtaatgttaccaaaacagagttatagatcaatgcaccagaacacagcccctcagaaataacgccacatatctacaactatctgatctttgacaaacctgacaaaaacaagaaatggggaaaggattccctatttaataaatggtgctgggaaaactggctagccatatgtagaaagctgaaactggatcccttccttacaccttatacaaaaattaattcaagatggattaaagacttaaatgttagacctaaaaccataaaaaccttagaagaaaacctaggcaataccattcaggacataggcatgagcaaggactttatgtctaaaacaccaaaagcaatggcaacaaaagccaaaattgacaaatgggatctaattaaactaaagagcttctgcacagcaaaagaaactaccatcagagtgaacaggcaacctacagaatgggagaaaatttttgcaatctactcatctgacaaagggctaatatccagaatctacaatgaactcaaacaaatttacaagaaaaaaacaaacaaccccatcaaaaagtgggcaaaggacatgaacagacacttctcaaaaaaagacatttatgcagccaaaagacacatgaaaaaatgctcatcatcactggccatcagagaaatgcaaatcaaaaccacaatgagatgccatttcacaccagttagaatggtgatcattaaaaagtcaggaaacaacaggtgggaactgaacaatgacaacacatggacacgggaaggggaacatcacacaccggggactattgtggggtag

SEQ ID NO: 135508 - DNA, 595 bp, Homo sapiens
atgttgctcaggctggtcttgaactcctgggctcaggcaatcctccttgagcccatctgcctttgcctcccaaaatgctggtgtgtccggaattggtggattcttggtctcgctgacttcaagaatgaagccgtggaccctcgcgatgttcagatgtgtctggagtttcttccttctggtgggttcatggtcttgttggcttcaggagtaaagctgcagaccttcgcagtgagtgtcacagttcttaaaagcagcgcatctggagttgtttgttgctcctgtctggagttgttcgtccctcccggtgggtttgtggtctcgctggcttcaagagtgaagctgcagaccttcacagtgagtgttacagctcataaaggcggtgtggacccaaagagtgaacagcagcaagatttagtgcaaaaagcaaaagaacacagcttctgcagtgtggaagcagacctgagcgggttgccgctgctggctggggcagcctgcttttattcccttatggagccccacccacatcctgctgattggtccattttacagagagctgattgatccgttttccagagagctgattggtccattttga

SEQ ID NO: 135509 - DNA, 418 bp, Homo sapiens
ggacctctggcagcagcttcactaaggtgggatggatagcagggtctcaggcacaaccagtaatggagagacaaaaccagtgtatccagtcatggaaaagaaggaggaagatggcaccctggagcgggggcactggaacaacaagatggagtttgtgctgtcagtggctggggagatcattggcttaggcaacgtctggaggtttccctatctctgctacaaaaatgggggaggtgagatgagagcccttgtgccaccccacccactcctggaaggaggatacttccatctcctgcacttacggcccctctggggagtcccatagatgtatagaattctggaggtaggaggacgcttagaggtcattaaggacactctgtaagagactaagacctagaaaggttacgtgactatccca

SEQ ID NO: 135510 - DNA, 736 bp, Homo sapiens
atgtttggtggctatgagactatagaagcatatgaagatgatctttatagggacgagttatctagtgaactgagtgttgatagtgaggtggaatttcaactctatagccgaatttattatgcccaagatcttgatgatgtcatcagggaggaagaacatgaaaaaaagaactctgggaatttggaatcttcgagtagtaaaccaaatcagaagaagctaattgtcctttcagatagtgaggtcatccagctgtcagatggttttaaaacccagaagccttccaagctccaagccctttcatcattcatcgcattgccatatatcgagagaagacaagtctcccaaggaggcccttgggtggttgatgggactgggtgccgtggagcagggggtggtgctcgtcggggaggctcgggccgcacaggagcccatggagggggagggaggctcaggcatggcgagctgcaggttccgagccctgccccacgggaaggcagctaaggcccagcgagaaattgagcacagcagctgctggcccagactccgtgcattccgtggaggaataagaggtggcaaggacaagaacaaaaggatctgggaggacatcgggccagggtattgtcccatcaggctctccacattggacggcagtgtgcgttccaattatagctcctctccccgtgtacaaatgcagtacgctctaacaagaggcatccccacagtggaatcctcataa

SEQ ID NO: 135511 - DNA, 2106 bp, Homo sapiens
agcgtgtcgaattccacctacgtggtagagaggggcggctgtgtggcggtttgtcacatctagatccatgttttgcttccctggagccgcattcttttaggactaccttgatttattccgtccctgggctggtggggccgaggagtgtcggaggagagccagtgctttgcgtggtcctctgaattctgccaggtagccctgctccggcgtccgtgaaggggccaggacagtgtccgccaggaggggctgtgctcccagacaggaagcaggagaggttgcagccctgttctgaccctgccattccgccctctcctcacccctgccccacagggactgcatcgccctctgcttcctcaacagcggcaccagctttgtggccggctttgccatcttctccatcctggggcttcatgttttcaggagcagggggtgcccatttctgaggtggccgagtcaggccctggcctggctttcatcgcttacccgcgggctgtggtgatgctgcccttctctcctctctgggcctgctgtttcttcttcatggtcgttctcctgggactggatagccagtttgtgtgtgtagaaagcctggtgacagcgctggtggacatgtaccctcacgtgttccgcaagaagaaccggagggaagtcctcatccttggagtatctgtcatctccttccttgtggggctgatcatgctcacagagggcggaatgtacgtgttccagctctttgactactatgcggccagtggcatgtgcctcctgttcgtggccatcttcgagtccctctgtgtggcttgggtttacggagccaagcgcttctacgacaacatcgaagacatgattgggtacaggccatggcctcttatcaaatactgttggctcttcctcacaccagctgtgtgcacagccacctttctcttctccctgataaagtacactccgctgacctacaacaagaagtacacgtacccgtggtggggcgatgccctgggctggctcctggctctgtcctccatggtctgcattcctgcctggagcctctacagactcggaaccctcaagggccccttcagagaggttataatacctgtctccatccgtatgaccaaagttgccggaactgccggcctcagcgggaatgtgggacccagatgtgatctcagtcgcatcgaggagcttcctgatggtggaacacggtgtgggatggatagcagggtctcaggcacaaccagtaatggagagacaaaaccagtgtatccagtcatggaaaagaaggaggaagatggcaccctggagcgggggcactggaacaacaagatggagtttgtgctgtcagtggctggggagatcattggcttaggcaacgtctggaggtttccctatctctgctacaaaaatgggggagttgttggcttctacaattcaattaaaaatatccccatcctccagagagttattttattcgtcagaattcataacatgctcaacaaaggtcaaggcgttttggcaaagtgcgatgcggctaagaaaatagaagagaaggaagctgatgcaggatctgccagtgttcctggtgatgtcatgaggacgaagaaactctcttttgagggggcctggcatccctgtttgctggtgggtctcaaactgagtgatgcattggaattgcgtggcgggtttattagtgcacggattgctgggccccgagccgcagagtctgattcagtgggcctggagcgggaactgagagtttgcattgctaacaagcttccaggtgaagctgacgctgctggtccagggaccaccttttggaagcactgctctatgccaataacagatggagcagacgcagtggagggaaggaacacccaggaagctttcttccggcagctcaacccagaagctgccttcctgcatttcatggagatggtagacaccaatgctctccacgtgcatgggattcacaccagaaaaaatcatccaggccagaaagaggccgctcacagccagcatggaacgttccccatccgctggactttaaacctgctgaagcgaacatttcagaaaggaaatagagcagagccaaattccccagccatgtga

SEQ ID NO: 135512 - DNA, 549 bp, Homo sapiens
atgaagctgcggaccctcgcggtgagtgctacagctcttaaggtggcgcgtctggagtttgttccttttgatgttcggatgtgttcggagtttctttcttccggagtgaagctgcagaccttcgcggtgagtgttacagctcttaatgcactgcgtctggagttgttcgttcctcccggtgggctcatggtctcgctggcttcaggagtgaagctgcagatcttcacggtgagtgttacagctcataaaagcagtgtggacccaaagacccttgggtggtcgatgggactgggcgccgtggagcagggggcggcgctcatcggggaggcttgggccgcacaggagcccatggagggggtgggaggctcaggcatggcgggctgcaggtctcgagccctgccccgcggaaaggcagctaaggccccgtgagaaatcgagcgcagcgctggagtcttcctggctgtgcccaccaacgggcaggcagtggcggcccccgtcggtcaaagctgtgtcatcgctcagaggcttgctaagctgcaagtcatgcag

SEQ ID NO: 135513 - DNA, 1756 bp, Homo sapiens
  misc_feature (1)...(1756): n = a,t,c or g
ggctctggcagcagcttcactaaggtgggatggatagcagggtctcaggcacaaccagtaatggagagacaaaaccagtgtatccagtcatggaaaagaaggaggaagatggcaccctggagcgggggcactggaacaacaagatggagtttgtgctgtcagtggctggggagatcattggcttaggcaacgtctggaggtttccctatctctgctacaaaaatgggggaggtgccttcttcatcccctacctcgtcttcctctttacctgtggcattcctgtcttccttctggagacagcactaggccagtacactagccagggaggcgtcacagcctggaggaagatctgccccatctttgagggcattggctatgcctcccagatgatcgtcatcctcctcaacgtctactacatcattgtgttggcctgggccctgttctacctcttcagcagcttcaccatcgacctgccctggggcggctgctaccatgagtggaacacagggaactgggtggacgtggtagagccggtggctgaggggaatggtgtgggaatggatccaacacaccccacgtgtgcagggaacagggtggacgtggtagagccggtggctgaagggaatggtgtgggaatggatccaacacaccccatgtgtgcagggaacagggtggacgtggtagagcacgtggctgaaggggcagggaacagggtggacgtggtagagcatgtggctgagggaaatggtgtgggaatggatccaacacaccccacgtgtgcagggaacagggtggacgtggtagagcaggtggctgaggggaatgaacactgtatggagttccagaagaccaacggctccctgaatggtacctctgagaatgccacctctcctgtcatcgagttctgggattcccctcctggcccacagtttgtctgtgtggagtgcctggtgacagcctccatagacatgttccccaggcagctccggaagagcgggcggcgcgagctcctcatcctcaccatcgccgtcatgtgctacctgatagggcttttcctggtcaccgagggcgggatgtacatcttccagctgtttgactactatgcttccagtggcatatgcctgctgttcctgtcattgtttgaagtggtctgcataagctgggtgtatggggcggaccgtttctatgacaacattgaggacatgattggctaccggccatggcccctggtgaagatctcctggctcttcctgacccctggactttgcctggccactttcctcttctccttgagcaagtacacccccctcaagtacaacaacgtctatgtgtacccgccctggggatacctccattggctggttcctggctctgtcctccatggtctgtgtcccactcttcgtcgtcatcaccctcctgaagactcggggtcctttcaggaaggtaggtggtgtaggggagagtgacctcttaaaggagggcactgagagaggctggacttggggcaggacacacaactggggccagggagcagacacaaactctgagtgtggggcagcccttcagtctcacagaatcttaacgagacgaactttgaagaccagtccagtggcttttcagaaatgctctgaaaagtcctagagtcctagacctacagaatctgacctcccatggatgatctgggcaggctaacggagggcaaactgctgaaaggttcangagaaaactaagtcacanacatgaacagggaggtgcc

SEQ ID NO: 135514 - DNA, 7080 bp, Homo sapiens
gaggaagcgattctggggtttctgtgttgaacggttcttgtccgcgaagatgcgcttcggcctctgtcaggggacttgaacgggcttagtgggcttcagccagcttttctccaccggttccccacggggaccccccccccccggccgttgcaatggcgggcgtggggccggggggctacgcggcggagttcgtgccaccgccagagtgccccgtctttgagccgagttgggaggagttcacagatccgctcagctttatcggccgcatccggcctttggcggagaaaaccggcatctgcaaaattcggccgcccaaggactggcagcctccatttgcctgtgaagtaaaaagctttcgtttcactccaagagtccagcgcctgaatgaacttgaggcaatgaccagagtgagattggatttcttggatcaactagcaaaattttgggaacttcaaggatctactctgaagatccctgtggtagagagaaaaatcctggatctgtatgctttgagcaagattgttgccagcaaaggaggttttgaaatggtcaccaaagagaagaaatggtctaaagtgggtagtcgcttgggatatctgccaggaaaaggaactgggtctcttttgaagtcacattatgaaagaattctctacccatatgagcttttccagtctggtgtgagccttatgggtgtgcagatgcctaatttagatcttaaagaaaaagtggagcctgaggttctcagcactgatacccaaacttccccagagccaggcacaaggatgaacattctgccgaagagaacaagacgtgtgaagactcagtcagaatctggagatgtgagtagaaacacggaactgaagaaacttcagatttttggggctgggcccaaggttgtgggcttggcaatgggaacaaaagataaagaagatgaggtcacccgaagacgaaaagttaccaacaggtcagacgcatttaacatgcaaatgagacaacggaaaggcactctctctgttaactttgttgatctctatgtttgtatgttttgtggtcggggaaacaatgaagataaattgcttttgtgtgatggatgtgatgacagctatcatacattttgtctaattcctccactacctgatgtgcccaaaggagactggaggtgtcctaaatgtgtcgccgaggaatgtagcaaacctcgagaagcctttggatttgaacaagctgtacgagagtatacacttcagagctttggagagatggcagataattttaagtctgattattttaatatgccagtccatatggttcccacagaactagtagaaaaggaattttggcggctggtaagcagcattgaagaagatgttattgtggaatatggagcagatatctcctcaaaagactttggaagtggatttccggtgaaggatgggcggagaaagattctgccagaagaagaggaatatgcactttctggttggaatttgaataacatgcctgtcctggaacagtctgttcttgcacatattaatgtggacatctctggtatgaaagtgccgtggctctatgtgggaatgtgcttctcttctttttgctggcacattgaggatcactggagttattccatcaactacttgcactggggggagccaaagacatggtatggtgtgccatctcatgctgcagagcaactggaggaggtgatgagagagctggcccccgagttatttgaatcccagcctgatcttctgcatcagttagttaccatcatgaaccccaacgtgctaatggagcatggtgtgcctgtgtacaggaccaatcagtgtgctggcgagtttgttgtgacatttcctcgtgcctatcactctggatttaaccagggctacaactttgctgaagctgtgaacttctgtactgctgactggttgcccattggacgtcaatgtgtaaatcattaccgacgcctaaggcgccactgtgtcttttcacacgaggaactaattttcaagatggcagcagatccagaatgcttagatgtggggctggctgccatggtctgcaaagaattgactctcatgactgaagaagaaacacgattaagagagtctgttgtacagatgggtgtcctgatgtcagaagaagaagtgtttgaacttgttcctgatgatgagcggcagtgttcagcatgcagaaccacatgttttctctctgctctcacatgttcctgtaatcctgagcggcttgtatgtctctaccatccaactgatctgtgcccctgccccatgcagaagaaatgtcttagatatcgctacccattagaagacctcccttctctgctatatggtgtaaaagtcagggcacagtcctatgacacttgggtcagtcgtgttacagaagcattgtctgctaacttcaaccacaaaaaagatttgattgaattgcgagtaatgctggaagatgctgaggataggaaatacccagagaatgatctctttcgaaaactcagggatgctgtaaaagaagctgagacctgtgcttctgtggctcagctgcttctgagcaaaaagcagaaacacagacagagcccagatagtgggaggactcggaccaaactgacagtggaagaattgaaggcctttgtccaacaactttttagtcttccgtgtgtcatcagccaagctcggcaagtaaagaatctgctagatgatgtggaagagtttcatgaacgtgctcaggaggccatgatggatgaaaccccagattcttccaaactccagatgttgatagatatgggctctagtctctatgtggaactccctgaattaccacgactgaagcaagagctacaacaggctcggtggttggacgaagtaagactgaccttatcagatccgcaacaagtcactttggatgtcatgaagaagctgatagactctggggtagggttggcaccccaccatgctgtggagaaagcaatggctgaactacaggagctccttacagtctctgaacgatgggaagaaaaggctaaggtctgcctacaggcaagaccgaggcacagtgtggcaagtttagaaagcattgtgaatgaagccaagaacattccagcctttctacccaatgtgttgtccttgaaagaagccttacaaaaggctcgagaatggaccgctaaagtggaagctattcagagtggcagcaattacgcttatttggagcagcttgagagcttgtctgcgaaaggacgccctattcctgtgcgtcttgaagcactgccgcaagtggaatcacaggtagcagcagcacgggcatggagagaacggactgggcggacgtttcttaagaagaattctagccatacattgttacaggtgctgagcccccggaccgacattggtgtatatgggagtggcaaaaataggaggaaaaaagtaaaagaactaatagaaaaagaaaaagaaaaggatctggacctggagcctctgagtgatctggaggaaggattggaggaaaccagagatacagccatggtggtggcagttttcaaagaacgggagcaaaaagagattgaagccatgcattctctcagagcagccaacctagccaagatgacaatggtggaccgcatagaagaagtaaaattttgcatttgccgcaagacagccagtgggtttatgctacagtgtgagctctgcaaagactggttccataacagctgtgttcctcttcctaaatcaagttcccaaaaaaaaggatccagctggcaagctaaagaagtaaaattcctttgccctctttgtatgcggtctcgaaggcccaggctagagactattctgtcactcctggtatcccttcagaagttgcccgtacggttgcctgaaggagaggccctgcagtgtttgacagaacgtgctatgagttggcaagatagagcgcggcaggctctagccacagatgaactatcctctgccctggccaaactatctgtgttgagccagcgtatggtggaacaggcggctcgagaaaaaactgaaaagatcatcagtgcagaactccaaaaagcagctgccaatccagacttacagggacacttacctagtttccagcagtctgcttttaaccgggtggtgagcagtgtgtcatcttctcctcgacaaacaatggactatgatgatgaagaaacagactctgatgaagacattcgagagacatatggctacgacatgaaggacacagccagtgtgaagtcctctagtagtcttgaacccaatcttttttgtgatgaagagattcccatcaaatccgaggaggtggtgacccacatgtggacagcaccttcattttgtgcagagcatgcttattcttctgcttctaagagttgttctcaagtattttttgggaaaggttctagcaccccaaggaaacaacctcggaagagccctttggtgccccgaagtttggaacctccagtgctggagttgtcacctggagctaaggcacaactggaagaacttatgatggttggagatctcctggaagtatctctggacgagactcaacacatatggcggattttgcaggccacacacccaccctctgaagacagattcttgcatatcatggaggatgacagcatggaagagaaacccactaaaagtgaaaggaaaggactcttcagagaagaaacggaaacggaagctagaaaaggtagagcaactttttggagaaggaaaacagaagtccaagggattaaaagaaaatggacaaacctaggaaaggaaggaaattaaaattaggtgcagacaattcaaaggagctgaataaactgggccaaggaacttggcaaaagaagaagagagaaagaaaaagaaggagaaggctgctgcagccaaagttgaacttgtgaaagagagcactgaaaagaaaagagagaaaaaggtgctggacatcccctcaaagtatgactggtcaggagcagaggagtctgatgatgagaatgctgtgtgcgcagaaccagactgccaaaggccctgcaaggacaagggagttgtatttgtaacggaagaagagaagaataaaaaatattagttttaaaagtggcctatgtgactgcttttctaaaaaggtagactgggtacaatgtgatggtggctgtgatgaagtggtttcatcaagttttgtgtgggtgtatctccaagaaatggctgaaaatgaagattacatctgtataaactgtgcaaagaagcaggggccagttagcccaggtccagcaccacctccttccttcataatgagctacaaactaccaatggaggatcttaaagagaccagttagcagatgcttgggttagtttgggacatggggggacatggaccacatttgagaccttagtcatcaagtaagagtggtttatatccacttgggaattgttgcttccaaagatgaatggccttcagagaaagtccccttagtgctggcttcctctttgccagggctctgtgggttacattgctctatcaacatatctatgcagagggtgtcttctttggtacaacagccaatatctcatgtctcctttgagtgtggtttactgcattaaggccagatgcttaattgagctctagggtggctggttagtattaatacattggtgtgctaacagggcatataggatgtggcttttgtccagctgatagtagttagaggcttacaacttaggagcagcaccaactgaaggtgctaattgcttggatctccttcattaggatagttggagagggattggagtaccactttccttccactgttacctggtacttaatgccctaaagatacaactaggagtaacagggccaaagttatttctgttagacgtcaaggaatggtatcacagtctattgacctcagcgatttgtgcttgtttgtgctagaagaacatcccaaataggagaacctctcacaagctggggcaggtcaccttatctttgtaagatgaggatatcatctagatcagaaatctgactagattggattctgaggagaagaacctactacaaggcaaggagccgttttttggctttgaaaagtcttgctgtcttgggtctacattttagggaagagcaggtacatggatccaggcttctgccaaaaaaaaaaagagaagaagatgacgatgatgaccagtcgtactatcttactgagccacagtgatgcatgcttttcggggaaaacttcattcacaagtattccagacaccaggcttcaggcatggccatgagcaagaccagcaaataacagctttttgccttgcagccctgaccccaatgtctgctgtttccaacactggtgatttctaactacggcccacagcagatgctgttgaataacaccatggcttcatcagaggatgtggggttgtagtacctctgggtgatgaagttgttttagtaaatccatcagaggatgtggggttgtagtacctctgggtgatgaagttgttttagtaaatccatttttaaaaaaaaaaaaggacttgtttttacttttttctaaatgtctctgactactgactgttctatacatagattatttttccttttttaatatacatatatgaatatataaatatatatatttactgttaccagcagcatatgacagagtttcaacatcaaaaatccatttgggggcttgctttttcttttttgctttaaaaaaaaaaatcccattccttctttgtagtacaaggagttagcactccctcctccatcccagcctgaccagatcttccattttgcttttgttcatatagataattatatgtcctttgtgtgttgggacttgtccctgtctgttgggaaacttggtctcactctagtctgtgctggctcttttttcttttgtgtgtgaatgtttgaaactatggtgctgtgtcctcttccctcctgttgtgttctctgttcttcttaaggtattaggtaagctgtatgtaaactcttattagaaggggactaatttttttttaaaggacaaaaaaaaaaaatgactaaaaatagtgttttgtcaaaaaaaaaaaaaaaaaa

SEQ ID NO: 135515 - DNA, 5774 bp, Homo sapiens
atggaagagaaaccactaaaagtgaaaggaaaggactcttcagagaagaaacggaaacggaagctagaaaaggtagagcaactttttggagaaggaaaacagaagtccaaggagttaaagaaaatggacaaacctagaaagaagaaattaaaattaggtgcagacaaatcaaaggagctgaataaactggccaagaaactagcaaaagaagaagagagaaagaaaaagaaggagaaggctgctgcagccaaagttgaacttgtgaaagagagcactgaaaagaaaagagagaaaaaggtgctggacatcccctcaaagtatgactggtcaggagcagaggagtctgatgatgagaatgctgtgtgcgcagcacagaactgccaaaggccctgcaaggacaaggtagactgggtacaatgtgatggtggctgtgatgagtggtttcatcaagtttgtgtgggtgtatctccagaaatggctgaaaatgaagattacatctgtataaactgtgcaaagaagcaggggccagttagcccagggtctcacaaggctgtcatcacggtggtggttaaggctgtgtcatatctgaagtttgaggaagaatctacttctgagctcatgtggttgttggcagcctttagttccttttgggtcgtcggaataaaggccttagattttgtttggccactggccagagaggaaaaagaaattggggataacaaagatttggagaggaataaaataggagtcaacatggtaacatggcagcagttatgtaaaaacaaaagagttggtgggatggatagcagggtctcaggcacaaccagtaatggagagacaaaaccagtgtatccagtcatggaaaagaaggaggaagatggcaccctggagcgggggcactggaacaacaagatggagtttgtgctgtcagtggctggggagatcattggcttaggcaacgtctggaggtttccctatctctgctacaaaaatgggggagggcctgtagcccctccttgcaggtgtggactttgtccctcttggcaggctgccaaggagctcaacgaggcagaggaaggaggtgccttcttcatcccctacctcgtcttcctctttacctgtggcattcctgtcttccttctggagacagcactaggccagtacactagccagggaggcgtcacagcctggaggaagatctgccccatctttgaggcccaattctgcagtttccccgcaggcattggctatgcctcccagatgatcgtcatcctcctcaacgtctactacatcattgtgttggcctgggccctgttctacctcttcagcagcttcaccatcgacctgccctggggcggctgctaccatgagtggaacacagggaaccgggtggacgtggtagagccggtggctgaggggaatggtgtgggaatggatccaacacaccccacgtgtgcagggaacagggtggacgtggtagagccggtggctgaagggaatggtgtgggaatggatccaacacaacccatgtgtgcagggaacagggtggacgtggtagagcacgtggctgaaggggcagggaacagggtggacgtggtagagcatgtggctgagggaaatggtgtgggaatggatccaacacaccccacgtgtgcagggaacagggtggacgtggtagagcaggtggctgaggggaatgaacactgtatggagttccagaagaccaacggctccctgaatggtacctctgagaatgccacctctcctgtcatcgagttctgggagcggcgggtcttgaagatctctgatgggatccagcacctgggggccctgcgctgggagctggctctgtgcctcctgctggcctgggtcatctgctacttctgcatctggaagggggtgaagtccacaggcaaggtggtgtacttcacggccacatttccttacctcatgctggtggtcctgttaattcgaggggtgacgttgcctggggcagcccaaggaattcagttttacctgtacccaaacctcacgcgtctgtgggatccccagacagcatggagatacagattgctactgcctcatgtccacgcagggtacgagggcagcggtcaggctttggagccaaactgtagaagcacaaccagggtcctagaaggattccagtgcacgttcctcattgtgtggatggatgcaggcacccagatattcttctccttcgccatctgtcttgggtgcctgacagccctgggcagctacaacaagtaccacaacaactgctacagggactgcatcgccctctgcttcctcaacagcggcaccagctttgtggccggctttgccatcttctccatcctgggcttcatgtctcaggagcagggggtgcccatttctgaggtggccgagtcaggccctggcctggctttcatcgcttacccgcgggctgtggtgatgctgcccttctctcctctctgggcctgctgtttcttcttcatggtcgttctcctgggactggatagccagtttgtgtgtgtagaaagcctggtgacagcgctggtggacatgtaccctcacgtgttccgcaagaagaaccggagggaagtcctcatccttggagtatctgtcgtctccttccttgtggggctgatcatgctcacagagggcggaatgtacgtgttccagctctttgactactatgcggccagtggcatgtgcctcctgttcgtggccatcttcgagtccctctgtgtggcttgggtttacggagccaagcgcttctacgacaacatcgaagacatgattgggtacaggccatggcctcttatcaaatactgttggctcttcctcacaccagctgtgtgcacagccacctttctcttctccctgataaagtacactccgctgacctacaacaagaagtacacgtacccgtggtggggcgatgccctgggctggctcctggctctgtcctccatggtctgcattcctgcctggagcctctacagactcggaaccctcaagggccccttcagagaggttataatacctgtctccatccgtatgaccaaagttgccggaactgccggcctcagcgggaatgtgggacccagatgtgatctgagtcgcatcgaggagcttcctgatggtggaacacggttctcagtttatagcctggagtctctggctttggccctcgtcatcctgcccacccagcggggcttcccaacccaccacacagccatggacgggaaggtggcagtgcaagagtgtgggcctcctgcagtctcctgggtccccgaggagggagagaagttggaccaggaagacgaggaccaggtgaaggatcggggccaatggaccaacaagatggagtttgtgctgtcagtggccggggagatcattgggctgggcaatgtctggaggtttccctatctctgctacaaaaacggaggtggagccttcttcatcccctacttcatcttcttctttgtctgcggcatcccggtgttcttcctggaggtggcgttgggccaatacaccagccaagggagtgtcacagcctggaggaagatctgccccctcttccagggcattggtctggcatctgtggtcatcgagtcatatttgaatgtctactacatcatcatccttgcctgggctctcttctacctgttcagctccttcacttctgagctgccctggacgacctgcaacaacttttggaacacagagcattgcacggactttctgaaccactcaggagccggcacagtgaccccatttgagaattttaccttcccctgtcatggaattctgggagtagcagccgagttctgggcatcacctcgggcatccatgacctgggctccctgcgctgggagatggccctgtgcctcctgctcgcctgggtcatctgctatttctgcatctggaagggggtcaagtccacaggcaaggtggtttatttcacagccacgtttccgtacctgatgcttgtcattttggtgatcagaggtgtcacccttcccggagcctaccagggcatcatttactacttgaagccagatttgttccgcctcaaggaccctcaggtgtggatggatgcgggcacccagatcttcttctcctttgccatctgccaggggtgcctgacagccctgggcagctacaacaagtatcacaacaactgctacaaggactgcatcgccctctgcttcctgaacagtgccaccagctttgtggctgggtttgttgtcttctccatcctgggcttcatgtcccaagagcaaggggtgcccatttctgaagtggccgagtcaggtcctgggctggccttcatcgccttccccaaggctgtgactatgatgcccttatcccagctgtggtcctgcctgttctttatcatgctcatattcctagggctggacagccagtttgtctgtgtggagtgcctggtgacagcctccatagacatgttccccaggcagctccggaagagcgggcggcgcgagctcctcatcctcaccatcgccgtcatgtgctacctgatagggcttttcctggtcaccgagggcgggatgtacatcttccagctgtttgactactatgcttccagtggcatatgcctgctgttcctgtcattgtttgaagtggtctgcataagctgggtgtatggggcggaccgtttctatgacaacattgaggacatgattggctaccggccatggcccctggtgaagatctcctggctcttcctgacccctggactttgcctggccactttcctcttctccttgagcaagtacacccccctcaagtacaacaacgtctatgtgtacccgccctggggatactccattggctggttcctggctctgtcctccatggtctgtgtcccactcttcgtcgtcatcaccctcctgaagactcggggtcctttcaggaagcgtctgcgtcagctcatcacccctgactccagtctgccacagcccaagcaacatccctgcttggatggcagtgctggccggaactttgggccctccccaacaagggaaggactgatagccggggagaaggagacccatttggctcggaacctgcagctcgccatgcctgagcctccctccccctccatgggctcctgtgcggcccgagcctccccgaccagcgccgccccctgctccagggcacccagtcccatcgaccacccaagggctgagaagtgcgggcgcacggaaccggactgggaggcagctccacctgtggccccactcaaggtttgtaaacacaccaatcagcaccctgtgtctagctcagggtttgtgaatgcaccaatccacactctgtatctagcttctctggtggggacttggagaacctttgtgtctagctcaggcgttgtaaacacaccaatcaaaaccctgtcaaaacggaccaatcagcgctctgtaaaatggaccaatcggctctctgtaaaatggaccaatcagcaggatgtgggtggggccagtctggccacagcaggggcagatggcctgtcaggtctgaggaacctgctggcacgtgactgggaagtaacgggaggcgagtgcaagttgccagatgatgccacagacagagaggggagcttgctccctgccaaggctgagtccttgcaggctcgtgtccatccacagggctccgccctggacggagcgtccttcttgcctgggcgtcttcagaccttcatctgtgacaccgggggccatgtggctcaccccgaggaaggtgagtga

SEQ ID NO: 135516 - DNA, 1523 bp, Homo sapiens
  misc_feature (1)...(1523): n = a,t,c or g
aagtgcggnnnnnattgcagccgaagagttcacaagtgtgaagcctggaagccggcgggtgccgctgtgtaggaaagaagctaaagcacttccagagctctgtccggagctcagaggttcggaagacttatcgaccatggagcgcgcgtccctgctttgttgctgctgctgctgccgctggatgcacgtctctgcgaccacgccagaacctcgtgatgctggacgatgaagatttccgctgcgtctgcaacttctccgaacctcagcccgactggtccgaagccttccagtgtgtttctgcaggtagaggtggagatccatgccgggcggtctcaacctaggagccgtttcttaaagcgcgtcgatgcggacgccgacccgcggcagtatgcttgacacggtcaagggttttccgcgttgcggcgggcttcacaagtgggagccgcacaggttcctgcttcagctactggtaggcgccctgcgtggtgctagcgtaattcccgcttcaaggaactgacgctcgaggacctaaagataaccgggcaccatgcctccgctgcctctggaagccacaggacttgcactttccaagcttgcgcctacgcaacgtgtcgtggggcgacagggcgttcttggcttcgccgagctggcagcagtggctcaagccagggcctcaaggtactgagcattgcccaagcacactcgcctgccttttcctgcgaacaggttcgctgctttcccggcccatcaccagcctaagacctgtctgacaatcctgggactggggcgaacgcggagctgatggcggctctctgtccccacaagttcccggcccatccagaatcttagcgctgcgcaacacagggaatgggagacgcccacagggcgtgtgcgccgcactggcggcggcaggtgtgcagccccacagcctagacgtcagccacaactcgctgcgcgccaaccgaaaccctagcggctccgagcatgcatgttggtccaacgcccctgaactcccctcaaatctgtcgtttcgctggggctggaacaggggtgcctaaaggacctgccccagccaagctccagagtgcttcgatcttcagcttgcaacagacttgaacagggctgccgcagccttggacgagcttgcccgaaggtggataaccttggacaactggacgggaatccctttcctgggtcccctggaactggcccctcccccacggagggctcaatgaactaccggcgtggtacccagcctgtgcaacgttcggacctgtcgggtgggggtgtcgggaaccctggtgctgctccaaggggcccggggctttgcctaagatccaaggggcccggggctttgcctaagatcctaagatccaagacagaataatgaatggactcaaactgccttggcttcaggggagtcccgtgcaggacgttgaggacttttcgaccaattcaaccctttgctcccacctttattaaaatcttaaaacaacgaaaaaaaaaaaaaaagggcggccgct

SEQ ID NO: 135517 - DNA, 7856 bp, Homo sapiens
ctaaaaataccattaagtaatagtattagcttttgtattctgagattcaacagcagcagtcacttccctccactcctatgtgtatcccaggaccaccctgggcggggagggctgaggtcagggaggtctgaagctggtcctgggctccgggggtgacagtgatgaggaactgggtgcacacatgagtggggcagccgggcctggccagagaagcaacacacacgtgcacagacatgtttatccacatacacatgtgcacgcatgtgcacaaacacattgcaggcaggcatgttgacgcctcaggcagcggaggaccctgactctgggccctgctgacccgggcaaggcccattgtgatgcgtgccatgacctcagaatgtcactggtgcttagcacctatccgctctccagactgcgtctgtgttctacggcagttacacacacgcagtggtattcacaagcggttttgtggactcaaaggttttctccctgagaggcataacccaggccagctgattcatcagaatcaggtgagtgtgacctgctctcttccctccaggctgacttggggacagtggctatggtatgggcggtgttggcctctgggcagctacagaggagggtcatccctgagcactcaccgggcgcccgttctacactgcccatgtagacgattttctctttcgtcttcatggtggcttcgtagagtgggtgctgttcccaaatgtacccattcgacaggtgagccgtctggggtcagagaggcagtaactggcctgggaatccagacaagaccctgggttttgctctcagccctgctgtgtgccatgctagacttcaggcctcaaccctgagacctccctgctctagatcccaaatctgcccagatttccgatccaatgggcagagcctggccctggcagagacactgggatggatccactgtgggtggggaggagggaagggtcctcagaacacacctggggcctaagctgggtcttgatggtcactgtgggacccactggacacacacagtcccttgtctgggagtggcatggggagccttctgcccttgggcagttgtggaaagtgaaggagccctggagagctggctgaggggagactatcttcccttgtgttcaaaggggtccaggcactggggctctccccaagtatttcttattctgtctggcctcgctttccttttgccctgagtattctcaggagggacggtccatctagatgtcctccaggagcaaggacccactgttcttcatcagtgacccaggaaaatgaagccccctcctgtggggacagctcagaatggtggagtccacagtccctccctgagagacatggtttccatgagcacagtggctgctttggagacagtaatcattttcatccccaaaaccaaacacactcctgctcaaatggtgttattgctaaagcagcttcactggttagactgaagggccatggtagcccaagtgatgagcggggtagaatggagcagtcaggagagatcttgttccccgtaggaaactgggcatctctgtggccctgaacatcccaggaggccgatcgtacagagacctctggtgcctgaccgcagttcacatccacatccctggaatagaccatcacaggctcttcacccttggcaggtggacaccattcaacctgccggggcaggatggacatggtagagaatgcagatagtttgcaggcacaggagcggaaggacatacttatgaagtatgacaagggacaccgagctgggctgccagaggacaaggggcctgagcccgttggaatcaacagcagcattgatcgttttggcattttgcatgagacggagctgcctcctgtgactgcacgggaggcgaagaaaattcggcgggagatgacacgaacgagcaagtggatggaaatgctgggagaatgggagacatataagcacagtagcaaactcatagatcgagtgtacaagggaattcccatgaacatccggggcccggtgtggtcagtcctcctgaacattcaggaaatcaagttgaaaaaccccggaagataccagatcatgaaggagaggggcaagaggtcatctgaacacatccaccacatcgacctggacgtgaggacgactctccggaaccatgtcttctttagggatcgatatggagccaagcagagggaactattctacatcctcctggcctattcggagtataacccggaggtgggctactgcagggacctgagccacatcaccgccttgttcctcctttatctgcctgaggaggacgcattctgggcactggtgcagctgctggccagtgagaggcactccctgccaggattccacagcccaaatggtgggacagtccaggggctccaagaccaacaggagcatgtggtacccaagtcacaacccaagaccatgtggcatcaggacaaggaaggtctatgcgggcagtgtgcctcgttaggctgccttctccggaacctgattgacgggatctctctcgggctcaccctgcgcctgtgggacgtgtatttggtggaaggagaacaggtgttgatgccaataaccagcattgctcttaaggttcagcagaagcgcctcatgaagacatccaggtgtggcctgtgggcacgtctgcggaaccaattcttcgatacctgggccatgaacgatgacaccgtgctcaagcatcttagggcctctacgaagaaactaacaaggaagcaaggggacctgccacccccagccaaacgcgagcaagggtccttggcacccaggcctgtgccggcttcacgtggtgggaagaccctctgcaaggggtataggcaggcccctccaggcccaccagcccagttccagcggcccatttgctcagcttccccgccatgggcatctcgtttttccacgccctgtcctggtggggctgtccgggaagacacgtaccctgtgggcactcagggtgtgcccagcctggccctggctcagggaggacctcagggttcctggagattcctggagtggaagtcaatgccccggctcccaacggacctggatatagggggcccttggttcccccattatgattttgaacggagctgctgggtccgtgccatatcccaggaggaccagctggccacctgctggcaggctgaacactgcggagaggttcacaacaaagatatgagttggcctgaggagatgtcttttacagcaaatagtagtaaaatagatagacaaaaggttcccacagaaaagggagccacaggtctaagcaacctgggaaacacatgcttcatgaactcaagcatccagtgcgttagtaacacacagccactgacacagtattttatctcagggagacatctttatgaactcaacaggacaaatcccattggtatgaaggggcatatggctaaatgctatggtgatttagtgcaggaactctggagtggaactcagaagagtgttgccccattaaagcttcggcggaccatagcaaaatatgctcccaagtttgatgggtttcagcaacaagactcccaagaacttctggcttttctcttggatggtcttcatgaagatctcaaccgagtccatgaaaagccatatgtggaactgaaggacagtgatggccgaccagactgggaagtagctgcagaggcctgggacaaccatctaagaagaaatagatcaattattgtggatttgttccatgggcagctaagatctcaagtcaaatgcaagacatgtgggcatataagtgtccgatttgaccctttcaattttttgtctttgccactaccaatggacagttacatggacttagaaataacagtgattaagttagatggtactacccctgtacggtatggactaagactgaatatggatgaaaagtacacaggtttaaaaaaacagctgagggatctctgtggacttaattcagaacaaatcctactagcagaagtacatgattccaacataaagatttctcctcttcaccatctacaaatggaatgttcaccctaactaccaatggggacctacccaaaccaatattcatccccaatggaatgccaaacactgttgtgccatgtggaactgagaagaacttcacaaatggaatggttaatggtcacatgccatctcttcctgacagcccctttacaggttacatcattgcagtccaccgaaaaatgatgaggacagaactgtatttcctgtcacctcaggagaatcgccccagcctctttggaatgccattgattgttccatgcactgtgcatacccagaagaaagacctatatgatgcggtttggattcaagtatcctggttagcaagaccactcccacctcaggaagctagtattcatgcccaggatcgtgataactgtatgggctatcaatatccattcactctacgagttgtgcagaaagatgggatctcctgtgcttggtgcccacagtatagattttgcagaggctgtaaaattgattgtggggaagacagagctttcattggaaatgcctatattgctgtggattggcaccccacagcccttcaccttcgctatcaaacatcccaggaaagggttgtagataagcatgagagtgtggagcagagtcggcgagcgcaagccgagcccatcaacctggacagctgtctccgtgctttcaccagtgaggaagagctaggggaaagtgagatgtactactgttccaagtgtaagacccactgcttagcaacaaagaagctggatctctggaggcttccacccttcctgattattcaccttaagcgatttcaatttgtaaatgatcagtggataaaatcacagaaaattgtcagatttcttcgggaaagttttgatccgagtgcttttttggtaccacgagacccggccctctgccagcataaaccactcacaccccagggggatgagctctccaagcccaggattctggcaagagaggtgaagaaagtggatgcgcagagttcggctggaaaagaggacatgctcctaagcaaaagcccatcttcactcagcgctaacatcagcagcagcccaaaaggttctccttcttcatcaagaaaaagtggaaccagctgtccctccagcaaaaacagcagccctaatagcagcccacggactttggggaggagcaaagggaggctccggctgccccagattggcagcaaaaataagccgtcaagtagtaagaagaacttggatgccagcaaagagaatggggctgggcagatctgtgagctggctgacgccttgagccgagggcatatgcgggggggcagccaaccagagctggtcactcctcaggaccatgaggtagctttggccaatggattcctttatgagcatgaagcatgtggcaatggctgtggcgatggctacagcaatggtcagcttggaaaccacagtgaagaagacagcactgatgaccaaagagaagacactcatattaagcctatttataatctatatgcaatttcatgccattcaggaattctgagtgggggccattacatcacttatgccaaaaacccaaactgcaagtggtactgttataatgacagcagctgtgaggaacttcaccctgatgaaattgacaccgactctgcctacattcttttctatgagcagcaggggatagactacgcacaatttctgccaaagattgatggcaaaaagatggcagacacaagcagtacggatgaagactctgagtctgattacgaaaagtactctatgttacagtaaagctaccactctggctgctagacagcttggtggcgagggagatgactccttgtagctgatacttggcaaaagtgtcactgaaagacaagctaaatgtagttattttatcctgttagaacaaaaattctaattaaaatagttaacttgaagagtagaaacaattgtattttgaagtctcatacaagctgtctgatagagaactttcaggcagatcccaccattagcctgtaaacaaaaggtgtggcaccagccacctgggaccaaataagaattgaattgtgcttgtccagatatgaacaaatatgtagtgagtatagagtttaccaataatcataacaaatattaaagatttccttggagtcagaggaaaaaacaaacaattataatgttgtctagggacgacatgatacgctacctcctttttcctgaagttttattccattatattgacaagatggagaaagcaagatcatgaaggtgtgcaaatgattcttacggcatggacaaggatttttcaatttattttttaaactgtttccataccctttctttttcttgctttttgtttttgccattgtgtttacgtttgagacacaaccagtcattggtggcaggggcatagagtggtcagtctgaaagggaggctctcttaagagctatgtgccttccaaccagagggagacccagtagaaagaaaaacatcctgggaaatccagctaccagggccctcccagtggaggcatcttacatttaggctacttcaagtatcctcagaaatgtattctgcacccccggccccgcccatgctgagggaaggggagcagttgccaatatttgcaccatcttcacatgcacatgttgcaacaagagcttctgggaaggtaagcggcatcggagctagatcacgtttcacaattagtggttattcttttctgtgtttgttttgcactttaaaaaagagagaacacatgcaaatgaacttgcttgtgtgtatttgatggctctaagggctataaattacaaacaaaacacatcccagacattaggagttcataagtatatttaatgaaattggtggttttaggaagtcaactttagttttgctttgtttgcatgtccactggtttttttattttgatatttgtctttttttaaattttacagtagtcattgaaagttatgtttctttgcttacttcattttttccctctaattatttaagattggaacaaaagtataaatattatttatttgaggtagaatttttttcatgtagtttcttaatatatacttgaaggaaatgtttcaccttatttttggtctttgtttattcatttagaccctgcaagttgattctcattgccagattccattaccctttcttcctcataggtagtaattaccaatgtaactaagcatttgtgttctgatatctgaggccagtaactattaatatctagttctcagagcatttggaaaggttatcttaaatggctacctaaattgaaatccttttcagaaaaaatataattgcaagtaggtaggagtggcctaaattgtctaatgtaataaagtcagacaaaatgcacactttatagtttcaagattttcagtaaataaaatctgtccattcctacctggacatgtcccattaaaaagtggaagattttaaataatttctttacagatgttttatttaaacaggtagcacaatctactaatgttgtgtgatttgtgttatactggttgtaattaatttttttaattcatgaactagcggaaaatttattaaattaactattaactacattcaccttgtaaattactgtataaaacttgttgacaatgcactgactttagaaagatgttaatgtacataaatagagtgtaaataaaatagtgttgatgtactgaaatatgaactgtatcaaaagtattggtaattgtatatggggtgtacctgtttatctgttaactattatccaaacaaattaaatactgtggttgcctctatgtgctgtttttcctcatacaagtaaacacagaaagtc

SEQ ID NO: 135518 - DNA, 963 bp, Homo sapiens
atgggctggcaaagacattttcagagcagcgccgtgtttatgtcctgtgcccagttgtttgcgctgatgcgttacaagcccctctggtggtcccccgctgactctttggtaaaagtctgctgcatctgccaattcttttacgagtttgccgtgagcattcctggatgtggcaacctcagtctcaagaagagcgacaggacgccagctcccatgcagagacagatccaggattccactgcaatgagctggtggaggaataatttctggatcatcttagctgtggccatcatcgttgtctctgtgggtctgggcctcatcctgtactgtgtctgcaagaaatgggaaattgccaagcccctgaaacacaagcaagtagatgaagaaaagatgtatgaattttgcagaggctgtaaaattgattgtggggaagacagagctttcattggaaatgcctatattgctgtggattggcaccccacagcccttcaccttcgctatcaaacatcccaggaaagggttgtagataagcatgagagtgtggagcagagtcggcgagcgcaagccgagcccatcaacctggacagctgtctccgtgctttcaccagtgaggaagagctaggggaaagtgagatgtactactgttccaagtgtaagacccactgcttagcaacaaagaagctggatctctggaggcttccacccttcctgctctccaagcccaggattctggcaagagaggtgaagaaagtggatgcgcagagttcggctggaaaagaggacatgctcctaagcaaaagcccatcctcactcagcgctaacagcagcagcagcccaaaaggttctccttcttcatcaagaaaaagtggaaccagctgtccctccagcaaaaacagcagccctaatagcagcccacggaccgaaaaaaggagggaaaaaaaaaaacacaaggccaaaagcttgtag

SEQ ID NO: 135519 - DNA, 1320 bp, Homo sapiens
atgcgggggggcagccaaccagagctgttcactcctcaggaccatgaggtagctttggccaatggattcctttatgagcatgaagcatgtggcaatggctgtggcgatggctacagcaatggtcagcttggaaaccacagtgaagaagacagcactgatgaccaaagagaagacactcatattaagcctatttataatctatatgcaatttcatgccattcaggaattctgagtgggggccattacatcacttatgccaaaaacccaaactgcaagtggtactgttataatgacagcagctgtgagcggaccatagcaaaatatgctcccaagtttgatgggtttcagcaacaagactcccaagaacttctggcttttctcttggatggtcttcatgaagatctcaaccgagtccatgaaaagccatatgtggaactgaaggacagtgatggccgaccagactgggaagtagctgcagagctaagatctcaagtcaaatgcaagacatgtgggcatataagtgtccgatttgaccctttcaattttttgtctttgccactaccaatggacagttacatggacttagaaataacagtgattaagttagatggtactacccctgtacggtatggactaagactgaatatggatgaaaagtacacaggtttaaaaaaacagctgagggatctctgtggacttaattcagaacaaatcctactagcagaagtacatgattccaacataaagaactttcctcaggataaccaaaaagtacacctctcagtgagcggatttttgtgtgcatttgaaattcctgtcccttcatctccaatttcagcttctagtccaacacaaatagatttctcctcttcaccatctacaaatggaatgttcaccctaactaccaatggggacctacccaaaccaatattcatccccaatggaatgccaaacactgttgtgccatgtggaactgagaagaacttcacaaatggtgttcaagccttaacccccagtgaggctatatgtggccatagggatgaggccttgatccaacaggatcagtgtccttgtaagaggaaacaccagaaatctgactccctgatgctcttccccagcttgaatgcaccaaggaaaggccatttgtggggccatagcaagaaggcagctgtctgcaagccaggaggagaaccctcaccagaaacctcacagaaatcggccaacaccctcatctcgggcttccagcttcagaacaacgagaaaacaaatttctgttgtgtaagcaccccagtctatggtatttttgttacagcagcctga

SEQ ID NO: 135520 - DNA, 3396 bp, Homo sapiens
atggacactgtgcctggagtgaacctgagctggatcctgaatgagatgcatgaccaggacaagaaattggtggagaagagctacaaggatgccaagggctgtttcttcagcatgggtgagcccagccttatagacccctgcttggaggtgtgttacgggacccaactggcccagctgcaggggctcatcagaagcatggagcagcagctgtgcgagctctgctgcgacgcggagcaccaggaccatgagcaccaggtccttctggacgtgaagacacggctggagcaggagatcgccacctacagccgcttgctagaggttgaggacgctcagcaaggccccattgtgatgcgtgccatgacctcagaatgtcactggtgcttagcacctatccgctctccagactgcgtctgtgttctacggcagttacacacacgcagtggtattcacaagcggttttgtggactcaaaggttttctccctgagaggcataacccaggccagctgattcatcagaatcagagtgggtgctgttcccgaatgtacccattcgacaggaaactgggcatctctgtggccctgaacatcccaggaggccgatcgtacagagacctctggtgcctgaccgcagttcacatccacatccctggaatagaccatcacaggctcttcacccttggcaggatggacatggtagagaatgcagatagtttgcaggcacaggagcggaaggacatacttatgaagtatgacaagggacaccgagctgggctgccagaggacaaggggcctgagcccgttggaatcaacagcagcattgatcgttttggcattttgcatgagacggagctgcctcctgtgactgcacgggaggcgaagctcatagatcgagtgtacaagggaattcccatgaacatccggggcccggtgtggtcagtcctcctgaacattcaggaaatcaagttgaaaaaccccggaagataccagatcatgaaggagaggggcaagaggtcatctgaacacatccaccacatcgacctggacgtgaggacgactctccggaaccatgtcttctttagggatcgatatggagccaagcagagggaactattctacatcctcctggcctattcggagtataacccggaggtgggctactgcagggacctgagccacatcaccgccttgttcctcctttatctgcctgaggaggacgcattctgggcactggtgcagctgctggccagtgagaggcactccctgccagctgcctgggctcctgctgcccttggtgcccacaaatgggctgaccaagcccaggtggcagcatctcaccatcccgtgtcccctggcccgaccccacttccaggagatgaccaggaagctcagcacccaccctgttctggccgctctgttgtggcctcaaagtcaggcttgcccttttgcaccctggcccaggaggcttccaggggaacctccagccaggctccaggggatgttcctgtcccacctccccagggcaaaggccgcatgatctctctcgggctcaccctgcgcctgtgggacgtgtatttggtggaaggagaacaggtgttgatgccaataaccagcattgctcttaaggttcagcagaagcgcctcatgaagacatccaggtgtggcctgtgggcacgtctgcggaaccaattcttcgatacctgggccatgaacgatgacaccgtgctcaagcatcttagggcctctacgaagaaactaacaaggaagcaaggggacctgccacccccagccaaacgcgagcaagggtccttggcacccaggcctgtgccggcttcacgtggtgggaagaccctctgcaaggggtataggcaggcccctccaggcccaccagcccagttccagcggcccatttgctcagcttccccgccatgggcatctcgtttttccacgccctgtcctggtggggctgtccgggaagacacgtaccctgtgggcactcagggtgtgcccagcctggccctggctcagggaggacctcagggttcctggagattcctggagtggaagtcaatgccccggctcccaacggacctggatatagggggcccttggttcccccattatgattttgaatggagctgctgggtccgtgccatatcccaggaggaccagctggccacctgctggcaggctgaacactgcggagaggttcacaacaaagatatgagttggcctgaggagatgtcttttacagcaaatagtagtaaaatagatagacaaaaggttcccacagaaaagggagccacaggtctaagcaacctgggaaacacatgcttcatgaactcaagcatccagtgcgttagtaacacacagccactgacacagtattttatctcagggagacatctttatgaactcaacaggacaaatcccattggtatgaaggggcatatggctaaatgctatggtgatttagtgcaggaactctggagtggaactcagaagagtgttgccccattaaagcttcggcggaccatagcaaaatatgctcccaagtttgatgggtttcagcaacaagactcccaagaacttctggcttttctcttggatggtcttcatgaagatctcaaccgagtccatgaaaagccatatgtggaactgaaggacagtgatggccgaccagactgggaagtagctgcagagctaagatctcaagtcaaatgcaagacatgtgggcatataagtgtccgatttgaccctttcaattttttgtctttgccactaccaatggacagttacatggacttagaaataacagtgattaagttagatggtactacccctgtacggtatggactaagactgaatatggatgaaaagtacacaggtttaaaaaaacagctgagggatctctgtggacttaattcagaacaaatcctactagcagaagtacatgattccaacataaagaactttcctcaggataaccaaaaagtacaactctcagtgagcggatttttgtgtgcatttgaaattcctgtcccttcatctccaatttcagcttctagtccaacacaaatagagactacactgtctctcgtcctcaggatacttgagaaaagagcaaagatgaaaataccacaagcttatgatgctgtacttatctttgaatttgtagatttctcctcttcaccatctacaaatggaatgttcaccctaactaccaatggggacctacccaaaccaatattcatccccaatggaatgccaaacactgttgtgccatgtggaactgagaagaacttcacaaatggaatggttaatggtcacatgccatctcttcctgacagcccctttacaggttacatcattgcagtccaccgaaaaatggttagttaa

SEQ ID NO: 135521 - DNA, 8284 bp, Homo sapiens
ctaaaaataccattaagtaatagtattagcttttgtattctgagattcaacagcagcagtcacttccctccactcctatgtgtatcccaggaccaccctgggcggggagggctgaggtcagggaggtctgaagctggtcctgggctccgggggtgacagtgatgaggaactgggtgcacacatgagtggggcagccgggcctggccagagaagcaacacacacgtgcacagacatgtttatccacatacacatgtgcacgcatgtgcacaaacacattgcaggcaggcatgttgacgcctcaggcagcggaggaccctgactctgggccctgctgacccgggcaaggcccattgtgatgcgtgccatgacctcagaatgtcactggtgcttagcacctatccgctctccagactgcgtctgtgttctacggcagttacacacacgcagtggtattcacaagcggttttgtggactcaaaggttttctccctgagaggcataacccaggccagctgattcatcagaatcaggtgagtgtgacctgctctcttccctccaggctgacttggggacagtggctatggtatgggcggtgttggcctctgggcagctacagaggagggtcatccctgagcactcaccgggcgcccgttctacactgcccatgtagacgattttctctttcgtcttcatggtggcttcgtagagtgggtgctgttcccaaatgtacccattcgacaggtgagccgtctggggtcagagaggcagtaactggcctgggaatccagacaagaccctgggttttgctctcagccctgctgtgtgccatgctagacttcaggcctcaaccctgagacctccctgctctagatcccaaatctgcccagatttccgatccaatgggcagagcctggccctggcagagacactgggatggatccactgtgggtggggaggagggaagggtcctcagaacacacctggggcctaagctgggtcttgatggtcactgtgggacccactggacacacacagtcccttgtctgggagtggcatggggagccttctgcccttgggcagttgtggaaagtgaaggagccctggagagctggctgaggggagactatcttcccttgtgttcaaaggggtccaggcactggggctctccccaagtatttcttattctgtctggcctcgctttccttttgccctgagtattctcaggagggacggtccatctagatgtcctccaggagcaaggacccactgttcttcatcagtgacccaggaaaatgaagccccctcctgtggggacagctcagaatggtggagtccacagtccctccctgagagacatggtttccatgagcacagtggctgctttggagacagtaatcattttcatccccaaaaccaaacacactcctgctcaaatggtgttattgctaaagcagcttcactggttagactgaagggccatggtagcccaagtgatgagcggggtagaatggagcagtcaggagagatcttgttccccgtaggaaactgggcatctctgtggccctgaacatcccaggaggccgatcgtacagagacctctggtgcctgaccgcagttcacatccacatccctggaatagaccatcacaggctcttcacccttggcaggtggacaccattcaacctgccggggcaggatggacatggtagagaatgcagatagtttgcaggcacaggagcggaaggacatacttatgaagtatgacaagggacaccgagctgggctgccagaggacaaggggcctgagcccgttggaatcaacagcagcattgatcgttttggcattttgcatgagacggagctgcctcctgtgactgcacgggaggcgaagaaaattcggcgggagatgacacgaacgagcaagtggatggaaatgctgggagaatgggagacatataagcacagtagcaaactcatagatcgagtgtacaagggaattcccatgaacatccggggcccggtgtggtcagtcctcctgaacattcaggaaatcaagttgaaaaaccccggaagataccagatcatgaaggagaggggcaagaggtcatctgaacacatccaccacatcgacctggacgtgaggacgactctccggaaccatgtcttctttagggatcgatatggagccaagcagagggaactattctacatcctcctggcctattcggagtataacccggaggtgggctactgcagggacctgagccacatcaccgccttgttcctcctttatctgcctgaggaggacgcattctgggcactggtgcagctgctggccagtgagaggcactccctgccaggattccacagcccaaatggtgggacagtccaggggctccaagaccaacaggagcatgtggtacccaagtcacaacccaagaccatgtggcatcaggacaaggaaggtctatgcgggcagtgtgcctcgttaggctgccttctccggaacctgattgacgggatctctctcgggctcaccctgcgcctgtgggacgtgtatttggtggaaggagaacaggtgttgatgccaataaccagcattgctcttaaggttcagcagaagcgcctcatgaagacatccaggtgtggcctgtgggcacgtctgcggaaccaattcttcgatacctgggccatgaacgatgacaccgtgctcaagcatcttagggcctctacgaagaaactaacaaggaagcaaggggacctgccacccccaggcccaacagccctgggacgaaggtgtgtggcaggaagcccccagccagtctgaaccctgggggcagtcccaggagccacccaccatgccccaacggcttccccatgccaggcagcacacacccctccctctgggatcagcagactacaggcgtgtcgtcagtgtcagaccacaggggccacacagagaccccaaggactccagagatgcagccaaacgcgagcaagggtccttggcacccaggcctgtgccggcttcacgtggtgggaagaccctctgcaaggggtataggcaggcccctccaggcccaccagcccagttccagcggcccatttgctcagcttccccgccatgggcatctcgtttttccacgccctgtcctggtggggctgtccgggaagacacgtaccctgtgggcactcagggtgtgcccagcctggccctggctcagggaggacctcagggttcctggagattcctggagtggaagtcaatgccccggctcccaacggacctggatatagggggcccttggttcccccattatgattttgaacggagctgctgggtccgtgccatatcccaggaggaccagctggccacctgctggcaggctgaacactgcggagaggttcacaacaaagatatgagttggcctgaggagatgtcttttacagcaaatagtagtaaaatagatagacaaaaggttcccacagaaaagggagccacaggtctaagcaacctgggaaacacatgcttcatgaactcaagcatccagtgcgttagtaacacacagccactgacacagtattttatctcagggagacatctttatgaactcaacaggacaaatcccattggtatgaaggggcatatggctaaatgctatggtgatttagtgcaggaactctggagtggaactcagaagagtgttgccccattaaagcttcggcggaccatagcaaaatatgctcccaagtttgatgggtttcagcaacaagactcccaagaacttctggcttttctcttggatggtcttcatgaagatctcaaccgagtccatgaaaagccatatgtggaactgaaggacagtgatggccgaccagactgggaagtagctgcagaggcctgggacaaccatctaagaagaaatagatcaattattgtggatttgttccatgggcagctaagatctcaagtcaaatgcaagacatgtgggcatataagtgtccgatttgaccctttcaattttttgtctttgccactaccaatggacagttacatggacttagaaataacagtgattaagttagatggtactacccctgtacgggtatggactaagactgaatatggatgaaaagtacacaggcttaaaaaaacagctgagtgatctctgtggacttaattcagaacaaatccttctagcagaagtacatggttccaacataaagaactttccttaggacaaccaaaaagttcgactctcagtgagtggatttttgttgtgcattagaaattcctgtccctgtgtctccaatttcagcttctagtccaacacagacagatttctccttttcgccatctacaaatgaaatgttcaccctaactaccaatggggacctaccccgaccaatattcatccccaatggaatgccaaacactgttgtgccatgtggaactgacaagaacttcacaaatggaatggttaatggtcacatgccatctcttcctgacagcccctttacaggttacatcattgcagtccaccgaaaaatgatgaggacagaactgtatttcctgtcatctcagaagaatcgccccagcctctttggaatgccattgattgttccatgtactgtgcatacccggaagaaagacctatatgatgcggtttggattcaagtatcccggttagcgagcccactcccacctcaggaagctagtaatcatgcccaggattgtgacgacagtatgggctatcaatatccattcactctacgagttgtgcagaaagatgggaactcctgtgcttggtgcccatggtatagattttgcagaggcttgtaaattgattgtggagaagacagagctttcattggaaatgcctatatcgctgtggattgggatcccacagcccttcaccttcgctatcaaacatcccaggaaagggttgtagatgagcatgagagtgtggagcagagtcggcgagcgcaagccgagcccatcaacctggacagctgtctccgtgctttcaccagtgaggaagagctaggggaaaatgagatgtactactgttccaaagtgtaagacccactgctttagcaacaaagaagctggatctctggaggcttccacccttcctgattattcaccttaagcgatttcaatttgtaaatgatcagtggataaaatcacagaaaattgtcaaatttcctcgggaaagttttgatccgagtgcttttttggtaccacgaaaacccggctctttggcagcattaaccactcacaccccagggggatgagctctccaagcccaggattctggcaagagaggtgaagaaagtggatgtgcagagtttggctggggaataggacatgctcctgagcaaaagcccatcctcactcagcgctaacatcagcagcagcccaaaaggttctccttctttcatcaagaaaaagtgggaaccagctgttccctccagcaaaaacagcagccctaattagcagcccacgggattttgggggaggagcaaagggaggctccggctgccccagattggcagcaaaaataagccgtcaagtagtaagaagaacttggatgccagcaaagagaatggggctgggcagatctgtgagctggctgacgcccttgagtcgagggcatatgcggggggtgggcagccaaccagagctggtcactcctcaggaccatgatgtatcatttggccaatggatttcctttgtgagcctgagccatgtggcaatggctgtggcgatggctccagcaattggtcagcttggaaacccccagtgaagaagcccgcactgatgaccaaagagaagacactcatatttagcctaatttataatctataagcaatttcatgccattcagaaattctgagtgggggccattacatcacttatgccaaaaacccaaacctgcaagttggtactgttataatgacagcagctgtgaggaactcacccgggatgaaattgacaccgactctgcctacattctttttctatgagcagcaggggatagactatgcacaatttctgccaaagactgatggcaaaaagatggcagacacaagcagtaccggatgaagactctgagtctggactctacaaaaagtgactgtgtgttacagcaaagctaccactctggctgctagacagcttggctggggagggaggatggactccttggtagctgacatttgggcaaaagcgtccactggaaagggcaagctaaatgtagttattttatcctgttagaatacaaattctaattaaaatagttaactttaagagtagtagtaattttattttgaagtctcatgcaagttgtctgatagagaactttcaggcagatcccaccattagcctgtaaacaaaaggtttggcaccagccacctgggaccaaataagaattcaattgtgcttgtccagatatgaacaaatatgtagtgagtatagagtttatcaataatcataacaaatattaaagatttccttggagtcaaagtaaaaaacaaacaattataatgttgtctagggacgacatgatatgctacctcctttttcctgaagttttattccattatattgacaagatggagaaaagcaagatcaccgagggtgtgccaaatgattccttaaggcatgggaccgaggatttttcaatttattttttaaacctgtttccataccctttcctttgtctttcttgctttttgtttttgccattgtgtttacagtttgagatacaaccaagtcattgggtggcaggggcatatagtgggtcagtctgaaagggagggcccctcttaagagctatgtgccttccacccagagccttgtgggagacccagtagaaagaaacagcatcctgggaaatccagctaccatggtccctcccagtggaggcatcttacatttaggatacttcaagtatcctcagaaatgtattctgcaccccccggccccgcccatgctgagggaaggggagcagttgccaatatttgcaccatcttcacatgcacatgttgcaacaacgagcttctgggaaggtaagtggcattggagctagatcacgtttcacaattagtggttgttcttttctgtgtttgtcttgcactttaaaaaagagagaacacatgcaaatgaacttgcttgtgtgtatttgaatggctctaagggctataaattacaaacaaaacacatcccaggacattaggagttcataaagtatatttaatgaaattggtggtttttaggaagtcaactttagttttgctttgtttgcatgtccactaattttttttattttgatattagtcttttttaaaaaattttacagtagtcattgaaagttatgtttctttgtttacttcattttttccctctaattatttaagattggaacaaaagtataaatattatttatttgaggtagaatttttttcatgtagtttcttaatatatacttgaaggaaatgtttcaccttatttttggtctttgtttattcatttagaccctgcaagttgattctcattaattgtcagattccactacactttcttcctcataggtagtaattaccagtgtaactaagcatttgtgttctgatatctgaggccagtaactattaatatctagttctcagaggcatttggaaaggttatcttaaatggctacctaaattgaaatccttttcagaaaaaatataattgcaagtaggtaggactggcctaaattgtctaatgtaataaagtcagacaaaatgcatactttatagtttcaagattttcagtatataaaatctgtccattcctacctggacatgtcccattaaaaagtggaagattttaaataatttctttcccaaaggtcttatttaaagcagggtagctcaatctactaatgttgtttgatctgtgtttgttatactggttgtaattaaatttttttaaattccatgaacctagcggaaaatttaattaaaattaacctattaacccacattcacccttgtaaatgactgtataaaacttgttgacaatgcactgactttagaaagatgttaatgtgcataaatagagtgtaaataaaatagtgttgatgtactgaaatatgaactgtataaaaagtattagtaattgtatatggggtgtacctgtttatctgtaactaggtatacaaacaaattaaatactgtggatgcctttatgtactgtttttcctcatacaagtaaacacagaaagtcaaattcttcagc

SEQ ID NO: 135522 - DNA, 379 bp, Homo sapiens
aaagaggcttcttgattgtgctgttcattgttgtaaatccatggagctgtgcaacagtgagtaactccagatgtcctccctccctactgcagcccctgcccttgatgtggactggcagagcagcacgacctttgcctcctgtagcacagacatgtgtatccatgtgtgcaggctcggctgtgaccgcccagtcaaaaccttccagggacacacagtaagtgagagctcttgtcactggtctcgagtttgtgagaatgtgatgtgggagccgattcttgtgtgcctagaattaaaagctactgcagcagcagaccagctctaatgtgccccttggctatttgagctgtcatggttaccccatggtaaccatggtggatgg

SEQ ID NO: 135523 - DNA, 505 bp, Homo sapiens
caagaatatggacagaaaatggtaacctggccatcactttatgccaacataaaggccccatcttcgctctgaaatggaacaaaaaggggaattatgttttgagtgctggtgtagacaaaacaacaataatttgggatgctcacacaggagaagccaaacagcagtttccttttcattcagcccccgcccttgatgtggactggcagaacaacatgacctttgcctcctgtagcacagacatgtgtatccatgtgtgcaggctcggctgtgaccacccagtcaaaacctttcagggacacacaaacgaggtcaatgccatcaaatgggatccttctggaatgttgctggcggtctgctcggatgacatgacattgaagatctggagcatgaaacaggaggtgtgcatccatgatcttcaggctcacaataaagagatctacaccatcaagtggagccccactgggcccgccaccagcaacccaaactccaacatcatgttggcaag

SEQ ID NO: 135524 - DNA, 1887 bp, Homo sapiens
atgccgctgtcattcggaactgtcgggcagctcattatgatctgcacgcgcgggataggcggtgcgattggcgcagtgggttttcggtcacaagctgccagtactctagctggacagccagatggcaatggagtctgtgtccatgcagggaattcaagaatttttgttcctctgcctgtgggtcttgaagtgaaaggtttttctcactcggctttcacgtttgggatcgagagccacatcagccagtccaacatcaatgggacactagtgccaccgtctgccctcatctccattctccagaagggactgcagtatgtagaggctgagataagcatcaacaaggatggcacagtgttcgacagccgccctatagagtccctgtccctgatagttgctgtgattcctgatgtggtgcagatgcggcagcaggcatttggagagaagctcactcagcagcaagccagtgcagcagccacagaggcatcagcaatggcaaaggcggcaaccatgaccccagctgctatttcccagcaaaatcctccaaagaaccgagaggccacagtgaacggggaagagaatggagcacatgaaatcaataatcactcaaagccaatggaaatagatggggatgttgagattccacccaacaaagccacagtccttcggggccacgagtctgaggtgttcatttgtgcctggaaccctgtcagtgatttgctagcctctggatctggagactcaactgcaaggatatggaacctgaatgagaatagcaacgggggctccacccagctcgtgttgagacattgtatacgagaaggggggcacgacgtcccaagtaataaagatgtcacctcactggactggaacagtgatggaacactattggctatgggttcatatgatggtttcgcaagaatatggacagaaaatgcccccgcccttgatgtggactggcagaacaacatgacctttgcctcctgtagcacagacatgtgtatccatgtgtgcaggctcggctgtgaccacccagtcaaaaccttccagggacacacattttgcacctgtatagaaagcatctgcttctggggaggactcaggaagcttacaaccatgacagaaggtaaaaggctgaggcctaagaccttctgcagcgacggtggcgcgctgctgccccctgctggaaggcgacctcatctactcacaggtcctgatatatttttcaagagactctccgctctgtttcagaacgaggtcaatgccatcaaatgggatccttctggaatgttgctggcgtcctgctcggatgacatgacattgaagatctggagtatgaagcaggatgcatgcgtccacgatcttcaggctcacagcaaagagatctacaccatcaagtggagccccaccgggcctgccaccagcaacccaaactccagcatcatgttggcaagtgcttcatttgattctacagtgcgactgtgggatgtggagcaaggtgtctgcacccacacactcatgaagcatcaagagcctgtctacagtgtagctttcagccccgatggaaagtacttggctagtggatcctttgacaagtatgttcatatctggaatactcagagtggaagtctcgtccacagctaccaaggcactggcggtatcttcgaggtgtgctggaacgcccgaggagataaagtgggcgccagcgcgtctgatggctcttgtgtgcatactttggcagctgtcaggaaagcagtgaaggaccacatgctctctagcctcaagggagtgttggcagaacaaaaaggtactgccgaagccctagaaactgacagcttggctggatttggcctgttggctacatctttgccacagccatgttatgagtga

SEQ ID NO: 135525 - DNA, 1650 bp, Homo sapiens
atggttattattcaacaggttccaacaatcataaaacagtcaaaagtccaagttgcctttcccttcgatgagtattttcaaattgaatgtgaagctaaaggaaatccagaaccaacattttcgtggactaaggatggcaaccctttttatttcactgaccatcggataattccatcgaacaattcaggaacattcaggatcccaaacgaggggcacatatctcactttcaagggaaataccgctgctttgcttcaaataaactgggaatcgctatgtcagaagaaatagaatttatagttccaaaattagaacacatcgaacaagatgaaagagtatacatgagccaaaagggagatctatacttcgcaaacgtggaagaaaaggacagtcgcaatgactactgttgctttgctgcatttccaagattaaggactattgtacagaaaatgccaatgaaactaacagttaacagtttaaagcatgctaatgactcaagttcatccacagaaattggttccaaggcaaattccatcaagcaaagaaaacccaaactgctgttgcctcccactgagagtggcagtgagtcttcaattaccatcctcaaaggggaaatcttgctgcttgagtgttttgctgaaggcttgccaactccacaggttgattggaacaaaattggtggtgacttaccaaaggggagagaaacaaaagaaaattatggcaagactttgaagatagagaatgtctcctaccaggacaaaggaaattatcgctgcacagccagcaatttcttgggaacagccactcacgattttcacgttatagtagaagataacatctctcatgagctcttcactttacatccagagcctcctcgctggacaaagaagcctcagagtgctgtgtatagcaccggaagcaatggcatcttgttatgtgaggctgaaggagaacctcaacccacaatcaagtggagagtcaatggctccccagttgacaatcatccatttgctggtgatgttgtcttccccagggaaatcagttttaccaaccttcaaccaaatcatactgctgtgtaccagtgtgaagcctcaaatgtccatggaactatccttgccaatgccaatattgatgttgtggatgtccgtccattgatacaaaccaaagatggagaaaattacgctacagtggttgggtacagtgctttcttacattgcgagttctttgcttcacctgaggcagtcgtgtcctggcagaaggtggaagaagtgaaacccctggagggcaggcggtatcatatctatgaaaatggcacattgcagatcaacagaaccaccgaagaagatgctgggtcttactcatgttgggtagaaaatgctataggaaaaactgcagtcacagccaatttggatattagaaatgctacaaaacttagagtttctcctaagaatcctcgtatccccaaattgcatatgcttgaattacattgtgaaagcaaatgtgactcacatttgaaacacagtttgaagttgtcctggagtaaagatggagaagcctttgaaattaatggcacagaagatggcagcatttgtgaatgggaattcattcatgatttggctctctgcttgcctactgttggtgtaaaggaatga

SEQ ID NO: 135526 - DNA, 458 bp, Homo sapiens
tccatggagcagaatggaccaggcctagagtacagagtgacctggaagccacagggagccccagtggagtgggaagaagaaacagtcacaaaccacacattgcgggtgatgacccctgctgtctatgccccttatgatgtcaaggtccaggctatcaatcaactaggatctgggcctgaccctcagtcagtgactctctattctggagaagactatcctgatacagctccagtgatccatggggtggacgttataaacacaacatatgtaagcaacgctactggttcaccccaaccttccatatttatctgttcaaaggagcaagaactttcatataggaatagaaacatgttggccgaagatttcatccagaagtcaacatcctgcaattatgttgaaaagagtagtactttcttcaaaatataaaatgccaagcacttcaaaaaaaaaaaaaaaaa

SEQ ID NO: 135527 - DNA, 2223 bp, Homo sapiens
  misc_feature (1)...(2223): n = a,t,c or g
atgatgagactggatgccatagagcatggctggcaaaaaggcatcatggctcacagattgaagagtttggctacggagtctctaggcggtaacagacttcggagtgatttgggcaagaaaactgggacatctggagttcagaagtcgaggaaaatggggaagaaccaggaagatgaatacatgatcatcagctacacaaaagaacggagcaaaaagaagccgggatttgggcacaggcgtctggcaaggaggccggcagcagggctaatgaagcatttgcggcgtgggacatttgccaacgcaacaaagaagatgtgcttgggctctgcagatgtgccagggcccccagagcaaaataatgacataatcaccatcagtgtcacagaccagactgtacacaaggatggcaaccctttttatttcactgaccatcggataattccatcgaacaattcaggaacattcaggatcacaaacgaggggcacatatctcactttcaagggaaataccgctgctttgcttcaaataaactgggaatcgctatgtcagaagaaatagaatttatagttccaagtgtttctttagaaaaatgtgagaataaactgatacggaatattggtaccaagaagcagggcactgctataaggatacctgaaaatgtggaagcagctttggaattgagaaagcagcagaagttggaagagtgtggagggttcagaagaagagagaatgcaatttatgaaaaaaagaaaaatgaacttggcttatcccaggaatctgtcgcagacaagatggggatggggcagtcaggcgttggtgctttatttaatggcatcaatgcattaaatgcttataacgccgcattgcttgcaaaaattctcaaagttagcgttgaagaatttagcccttcaatcgccagagaaatctacgagatgtatgaagcggttagtatgcagccgtcacttagaagtgagtatgagtaccctgttttttctcatgttcaggcagggatgttctcacctgagcttagaacctttaccaaaggtgatgcggagagatgggctccaagccaagctagcttcacgctgccgcaagcactcagggcgcaagggctgctaaaggaagcggaacacgtagaaagccagtccgcagaaacggtgctgaccccggatgaatgtcagctactgggctatctggacaagggaaaacgcaagcgcaaagagaaagcagcaatggcaacaacgttgcccggatcgatccggtcgcgcgaattgatccgggaccaaagcggccatcgtgcctccccactcctgcagttcgggggcatggatgcgcggatagccgctgctggtttcctggatgccgacggatttgcactgccggtagaactccgcgaggtcgtccagcctcaggcagcagctgaaccaactcgcgaggggatcgagcccggggtgggcgaagaactccagcatgagatccccgcgctggaggatcatccagccggcgtcccggaaaacgattccgaagcccaacctttcatagaaggcggcggttgggcgtcgcttggtcggtcatttcgaaccccagagtcccgctcagaagaactcgtcaagaaggcgatagaaggcgatgcgctgcgaatcgggagcggcgataccgtaaagcacgaggaagcggtcagcccattcgccgccaagctcttcagcaatatcacgggtagccaacgctatgtcctgatagcggtccgccacacccagccggccacagtcgatgaatccagaaaagcggccattttccaccatgatattcggcaagcaggcatcgncatgggtctatgttctcataggccagcccagctcctaggaatagtcaggttgatcacagtattcagcgactgtggctacagaaaacaggggctagaatatcccagtggaatgtctaacaactggaaggagcatgttgacaagcaatcccaggagcaggcagacaagaaatttcaggaaggttcttccctgagctggtggcatgtggacttagtggaaattagaaacatggttggtgtcaagatacagtgtggcataaaaagggaagctttagcaggaaattcagttgaggtcaacaccaggaggctcagaagagcagccagcatcagagaagtgtgcaaggcagcacaaaccctcaaatggatagatgttggagtaccagttgcatttctgagatag

SEQ ID NO: 135528 - DNA, 543 bp, Homo sapiens
gggttgagtcaagaccaaaatgttgtgtgtgaacctttgagggagccaataacttcgtaggagatccaattgtcctcccatgcaatcctcccaaaggcctcccacctttacacatttattggatgaatattgaattagaacacatcgaacaagatgaaagagtatacatgagccaaaagggagatctatacttcgcaaacgtgggaaggaaaagggacagtcgcaatgacttactgttgctttgctggcatttccaaggattaagggactattgtacaggaaaatgccaatggaaacttaacagttaacagttcaaattccatcaaggcaaaggaaaaccccaaactgctgttggcctccccactgaggagtggcagtgagtcttcaattaccatcctcaaaggggaaatcttgctgcttgagtgttttgctgaaggcttgccaactccacaggttgattggaacaaaattggtggtgacttaccaaaggggagagaagcaaaagaaaattatggcaagactttgaagatagagaatgtgtat

SEQ ID NO: 135529 - DNA, 1601 bp, Homo sapiens
ctaccctgtgtgaatgtgaggatgtagacatccatcagtgcaactcgagctccatcctcctccgatttctaaggttccagttttcttaatttgggtgggcacaatataatcagctgccagtgcagagtgagtccagtgggttaccggactcatgctgtggtcatttccccagtgccagaatgcagatttggcatagacatacttagcagctggcagaacccccacattggatccctggaaccaggaaagatgcacaatgcctagtgggtctatttggattttggagacaacacattcctcatttgggtgggttactgtggcccatttatcgagtgacccaaaaggctgccagttttgagtggggtccagaataggagaaggctctgcaacagatccagccttctgtgcaagctgctctgccacttggaccataagacctagcagatccaatggtgcttgaggtgtcaatggctgataggtgtgctggttggagcctttggcaggcccccataggtgaattacagcagaagcctctaggattttggagcaaggccctgccatcttctgcagataactattctccttttgagagacagttctttgcctgttactgggctttggtggaaactgaatgtttgcctacgggtcatcaactcaccatgcaacctgaactgcctatcatgaactgggtgctttcagacccatctagccataaatgggtccatggacaaagtggccatggtggcagagatagcggttactcatggactcagcaacatggacttccactcaccaagggtgacctatctatgaccactgctgagtgccaaattttccagcagcagagaccaatactgagccctcgatatggcaccattccttggggtgatcagccagctacttggcggcagaaatggcagaggtttgtcctcactggaatagacacttattccagatatgagtttgcctatcccgcatgccatgcttctaccaagactaccatccatggactcatggaattcctcatccaccatcatggtattccacacagcattgcctctgaccaaggcactcaccttatggctaaagaagtgcggcagtgggctcatgctcatggaattcactggtcttaccatgttccccatcatcctgaagtagctggattgatagaacggtggaatgaatggccttttgaagtcacaattacaacaccaactagtcaacaggctaagaagggagttacagtgttggctggggtgattgacccggactatcacaatgaaatcagtctactactccacaatggagaatccaagttcttcagttttggactggctctccttgctcctcagcctgcagatggcctattgcgggaccttgtgatcaggtgtttaaatcatgtgtccagcagccctattaatgaggaagtaggagagaagaactctttggttaccactagcagtttttgtcataagacagcaacaagctataaagaaagcaaattgagatatttgttaaaaactggaaccttagaaatcggaggaggatggagctcgagttgcactgatggatgtctacatcctcacattcacacagggtag

SEQ ID NO: 135530 - DNA, 1768 bp, Homo sapiens
atgaatgttgcactgacacacatagatacgcatcatgcggaatttgaaatggctctacaagcagcattggtttggaacacactgagaactgctggggggaagaaatctgtacacctggcatctgccctgcttgtgcatgagataattattgatggagctaatttgaccatatctaatgtaactttagaggaccaaggtatttactgctgttcagctcatactgctctagacagtgctgccgatataactcaagtaactgttcttgatgttccggatccaccagaaaaccttcacttgtctgaaagacagaacaggagtgttcggctgacctgggaagctggagctgaccacaacagcaatattagcgagtatattgttgaatttgaaggaaacaaagaagagcctggaaggtgggaggaactgaccagagtccaaggaaagaaaaccacagttatcttacctttggctccatttgtgagataccagttcagggtcatagccgtgaacgaagtagggagaagtcagcctagccagccgtcagaccatcatgaaacaccaccagcagctccagataggaatccacaaaacataagggttcaagcctctcaacccaaggaaatgattataaagtgggagcctttgaaatccatggagcagaatggaccagagcctagagtacagagtgacctggaagccacagggagccccagtggagtgggaagaagaaacagtcacaaaccacacattgcgggtgatgacgcctgctgtctatgccccttatgatgtcaaggtccaggctatcaatcaactaggatctgggcctgaccctcagtcagtgactctctattctggagaagacttacctgaacagccaacttttctaaaggtcatcaaagttgataaagacactgccactttatcttggggactacctaagaaattaaatggaaacttaactggctatcttttgcaatatcagataataaatgacacctacgagattggagaattaaatgatattaacattacaactccatcaaagcccagctggcacctctcaaacctgaatgcaactaccaagtacaaattctacttgagggcttgcacttcacagggctgtggaaaaccgatcacggaggaaagctccaccttaggagaagggagtgtttctttagaaaaatgtgagaataaactgatacggaatattggtaccaagaagcagggcactgctataaggatacctgaaaatgtggaagcagctttggaattgagaaagcagcagaagttggaagagtgtggagggttcagaagaagagagaatgccaatgaacagcaaggagtcactgaagaatttaaacaacagaatgagaaactcagatttttattattgaaaattgtcattctggcagtagcacgtgaaatgacttggaatggggaaggcagggatctctctgaaccttccttaacagtggtctttgctgacctttcctctcctgcctattctttacataccaccatggcccaagagccaggccctggcctcttcttgtcactttctacaattccttggccaatctcatccattcccatgattcacgcatctgtacaagtgagctggatccctctcttgagaaatagtctgatggtacacattcacagcagcttggagcagaggaatctcaaagtccacatatccaaggaacagaagaagctcaactctgtggattcagatctgactgacaaccctccaactcataccgtgaactga

SEQ ID NO: 135531 - DNA, 1443 bp, Homo sapiens
atgaagcacagtaagggacaattgcccttttcaatggcaagatatctcttttcagaattagaacacatcgaacaagatgaaagagtatacatgagccaaaagggagatctatacttcgcaaacgtggaagaaaaggacagtcgcaatgactactgttgctttgctgcatttccaagattaaggactattgtacagaaaatgccaatgaaactaacagttaacagtttaaagcatgctaatgactcaagttcatccacagaaattggttccaaggcaaattccatcaagcaaagaaaacccaaactgctgttgcctcccactgagagtggcagtgagtcttcaattaccatcctcaaaggggaaatcttgctgcttgagtgttttgctgaaggcttgccaactccacaggttgattggaacaaaattggtggtgacttaccaaaggggagagaaacaaaagaaaattatggcaagactttgaagatagagaatgtctcctaccaggacaaaggaaattatcgctgcacagccagcaatttcttgggaacagccactcacgattttcacgttatagtagaagataacatctctcatgagctcttcactttacatccagagcctcctcgctggacaaagaagcctcagagtgctgtgtatagcaccggaagcaatggcatcttgttatgtgaggctgaaggagaacctcaacccacaatcaagtggagagtcaatggctccccagttgacaatcatccatttgctggtgatgttgtcttccccagggaaatcagttttaccaaccttcaaccaaatcatactgctgtgtaccagtgtgaagcctcaaatgtccatggaactatccttgccaatgccaatattgatgttgtggatgtccgtccattgatacaaaccaaagatggagaaaattacgctacagtggttgggtacagtgctttcttacattgcgagttctttgcttcacctgaggcagtcgtgtcctggcagaaggtggaagaagtgaaacccctggagggcaggcggtatcatatctatgaaaatggcacattgcagatcaacagaaccaccgaagaagatgctgggtcttactcatgttgggtagaaaatgctataggaaaaactgcagtcacagccaatttggatattagaaatgctacaaaacttagagtttctcctaagaatcctcgtatccccaaattgcatatgcttgaattacattgtgaaagcaaatgtgactcacatttgaaacacagtttgaagttgtcctggagtaaagatggagaagcctttgaaattaatggcacagaagatggcaggataaaatctgggaagactttagaagaagctgtgattatagaactgagccttgaagtatttcaacagaaggagcgggaagaaccttctagcagaagagaagtaatatga

SEQ ID NO: 135532 - DNA, 7722 bp, Homo sapiens
cggaccctgcgcgcccccgtcccggctcccggccggctcgggggagaaggcgcccgaggggaggcgccggacagatcgcgtttcggaggcggcgcaggtgctgtaaactgcaaaccataatcctgtcttaatactgcaaacaaatcatagtggaactaaggggaacttaatttactgtttccaggttaactaaggtctcagctgtaaaccaaaagtgagaggagacattaagattttcattcttaccgggttgtcttcttcctgaagagcaatggagccgcttttacttggaagaggactaatcgtatatctaatgttcctcctgttaaaattctcaaaagcaattgaaataccatcttcagttcaacaggttccaacaatcataaaacagtcaaaagtccaagttgcctttcccttcgatgagtattttcaaattgaatgtgaagctaaaggaaatccagaaccaacattttcgtggactaaggatggcaaccctttttatttcactgaccatcggataattccatcgaacaattcaggaacattcaggatcccaaacgaggggcacatatctcactttcaagggaaataccgctgctttgcttcaaataaactgggaatcgctatgtcagaagaaatagaatttatagttccaagtgttccaaaattcccaaaagaaaaaattgaccctcttgaagtggaggagggagatccaattgtcctcccatgcaatcctcccaaaggcctcccacctttacacatttattggatgaatattgaattagaacacatcgaacaagatgaaagagtatacatgagccaaaagggagatctatacttcgcaaacgtggaagaaaaggacagtcgcaatgactactgttgctttgctgcatttccaagattaaggactattgtacagaaaatgccaatgaaactaacagttaacagtttaaagcatgctaatgactcaagttcatccacagaaattggttccaaggcaaattccatcaagcaaagaaaacccaaactgctgttgcctcccactgagagtggcagtgagtcttcaattaccatcctcaaaggggaaatcttgctgcttgagtgttttttgctaaaggcttgccaactcccacaggttgattggaccaaaattggtggtgacttcccaaaggggagagaagcaaaagaaaattatggcaagactttgaagatagagaatgtctcctaccaggacaaaggaaattatcgctgcacagccagcaatttcttgggaacagccactcacgattttcacgttatagtagaagagcctcctcgccggacaaagaagcctcagagtgctgtgtatagcaccggaagcaatggcatcttgttatgtgaggctgaaggagaacctcaacccacaatcaagtggagagtcaatggctccccagttgacaatcatccatttgctggtgatgttgtcttcaacagggaaatcagttttaccaaccttcaaccaaatcatactgctgtgtaccagtgtgaagcctcaaatgtccatggaactatccttgccaatgcccaatattgatgttgtggatgtcccgtcccattgatacaaaccaaagatggagaaaattacgcctaacagtggttgggtacagtgcctttccttaacattgccgaagttcctttgccttccaccctgaggcagtcgtgtccctggcagaaggtggaaagaagtgaaaacccccggagggcaggcggtatccatatcctatgaaaatggcacattgccagatcaacagaaccaccgaagaagatgcctgggtccttactcatgttgggtagaaaatgctataggaaaaactgcagtcacagccaatttggatattagaaatgctacaaaacttagagtttctcctaagaatcctcgtatccccaaattgcatatgcttgaattacattgtgaaagcaaatgtgactcacatttgaaacacagtttgaagttgtcctggagtaaagatggagaagcctttgaaattaatggcacagaagatggcaggataattattgatggagctaatttgaccatatctaatgtaactttagaggaccaaggtatttactgctgttcagctcatactgctctagacagtgctgccgatataactcaagtaactgttcttgatgttccggatccaccagaaaaccttcacttgtctgaaagacagaacaggagtgttcggctgacctgggaagctggagctgaccacaacagcaatattagcgagtatattgttgaatttgaaggaaacaaagaagagcctggaaggtgggaggaactgaccagagtccaaggaaagaaaaccacagttatcttacctttggctccatttgtgagataccagttcagggtcatagccgtgaacgaagtagggagaagtcagcctagccagccgtcagaccatcatgaaacaccaccagcagctccagataggaatccacaaaacataagggttcaagcctctcaacccaaggaaatgattataaagtgggagcctttgaaatccatggagcagaatggaccaggcctagagtacagagtgacctggaagcccacagggagccccagtggagtgggaagaagaaacagtcacaaaccacacattgcgggtgatgacgcctgctgtctatgccccttatgatgtcaaggtccaggctatcaatcaactaggatctgggcctgaccctcagtcagtgactctctattctggagaagactatcctgatacagctccagtgatccatggggtggacgttataaacagtacattagttaaagttacctggtcaacagttccaaaggacagagtacatggacgtctgaaaggctatcagataaattggtggaaaacaaaaagtctgttggatggaagaacacatcccaaagaagtgaacattctaagattttcaggacaaagaaactctggaatggttccttccttagatgcctttagtgaatttcatttaacagtcttagcctataactctaaaggagctggtcctgaaagtgagccttatatatttcaaacaccagaaggagtacctgaacagccaacttttctaaaggtcatcaaagttgataaagacactgccactttatcttggggactacctaagaaattaaatggaaacttaactggctatcttttgcaatatcagataataaatgacacctacgagattggagaattaaatgatattaacattacaacttccatcaaagcccagctggcacctctcaaacctgaatgcaactaccaagtacaaattctacttgagggcttgcacttcacagggctgtggaaaaccgatcacggaggaaagctccaccttaggagaagggagtaaaggtatcgggaagatatcaggagtaaatcttactcaaaagactcacccagtagaggtatttgagccgggagctgaacatatagttcgcctaatgactaagaattggggcgataacgatagcatttttcaagatgtaattgagacaagagggagagaatatgctggtttatatgatgacatctccactcaaggctggtttattggactgatgtgtgcgattgctcttctcacactactattattaactgttttgctttgtgaagagggatagaggtggaaagtactcagttaaagaaaaggaagatttgcatccagacccagaaattcagtcagtaaaagatgaaacctttggtgaatacagtgacagtgatgaaaagcctctcaaaggaagccttcggtcccttaatagggatatgcagcctactgaaagtgctgacagcttagtcgaatacggagagggagaccatggtctcttcagtgaagatggatcatttattggtgcctacgctggatctaaggagaagggatctgttgaaagcaatggaagttctacagcaacttttccccttcgggcataaacacaacatatgtaagcaacgctactggttcaccccaaccttccatatttatctgttcaaaggagcaagaactttcatataggaatagaaacatgctggccgaagatttcatccagaagtcaacatcctgcaattatgttgaaaagagtagtactttcttcaaaatataaaatgccaagcacttcaggcctatgttttgcttatattgttttcaggtgctcaaaatgcaaaacacaaaacaaatcctgcatttagatacacctcaactaaatccaaagtccccattcagtatattccatatttgcctgattttactattcggtgtgtttgcatagatgttgctacttggtgggtttttctccgtatgcacattggtatacagtctctgagaactggcttggtgactttgcttcactacaggttaaaagaccataagcaaactggttatttaaaatgtaaaaaggaatatgaaagtcttattaaaacacttcattgaaaatatacagtctaaatttattatttaaattttactagcaaaagtcttaggtgaacaatcaactagtatttgttgagctcctatttgcccagagatgggtcatatttaaacagaagtatacgtttttcagtttcaacatgaatttttttatttctgtcagttatgacatccacgagcatcactttttgtgtctgttttttttttttttcttggactaaattcaactgcatggaagcggtggtcagaaggttgttttatacgagaacaggcagaaagtgccccattgttccaggattctaatagctacatctacttaatatcttcatttctaaattgactgcttttacctttttctcatgtttatataatggtatgcttgcatatatttcatgaatacattgtacatattatgttaatatttacacaatttaaaatatagatgtgttttattttgaagtgagaaaatgaacattaacaggcatgtttgtacagctagaatatattagtaagatactgtttttcgtcattccagagctacaactaataacacgaggttccaaagctgaagactttgtataaagtatttgggttttgttcttgtattgctttctttcaacagtttcaaaataaaatatcatacaaatattgagggaaatgttttcatatttttcaaaataggtttttattgttgaatgtacatctaccccagcccctcaaaagaaaaactgtttacatagaaattcctacacatacgtttgcgtatatgttattttaaacatctttgtggtgagaattttttccccgatattctccttctgtcaaagtcagaacaaattcccggaatttaattttttggcagaggggctccaatcctttaaaaattgcacatgaacatgttttagaaacaatatggaggatgatgcatacatgtcggtcaagttcagcgctcgacattttatggaaagatttttttaaccttaccacgaaatacttaactactgtttaagtgaattgacttatttcactttagtttttgaactgtgattattggtatactgttatatcctcaacttggatttatggtaaccccttttagttcatggagaccaaaatttggggtatttataatagtcagcgcaggaatgcacatgggaatatctacttgtccttttgaacctcacgagtcatccagaatgtataggacagggaaaagcatgtcttatttaaaactgtaatttatggggctcagggtctgacccgcagtcccggggagtaaggcattttcaaagggggggaagggcagtgtgggtcccctacccctgtgtgaatgtgaggatgtagacatccatcagtgcaactcgagctccatcctcctccgatttctaaggttccagttttctggagggacagtcatcatggtttgatgtatctgggagaaaactgtggcgctcaacttgtgaggagggcaaggttgtgacgttcgagcttagttctggtgttattctgtctcctcttctttgtcatcagccaaaacgtggtttttaaagagagtcatgcaggttagaaataatgtcaaaaatatttaggaatttaataacctttaagtcagaaactaaaacaaatactgaaatattagctcttcctacacttcgtgttcccctttagctgcctgaaaatcaagattgctcctactcagatcttctgagtggctaaaacttatggatatgaaaaatgagattgaatgatgactatgctttgctatcattgttacctttcctcaatactatttggcaactactgggactcttcagcacaaaaggaatagatctatgattgaccctgattttaattgtgaaattatatgattcatatattttatgaatcagaataaccttcaaataaaataaatctaagtcggttaaaatgggatttcatggattttccctcaggaaaatgagtaacggagtcccacgggcgtgcaatgggtaattattaaattgggtgatgcttgtttgcaaattgcccactcgtgataaggtcaacagccaatatttaaaactttgttcgttactggctttaccctaactttctctagtctactgtcaatatcattttaatgtaattgattgtatatagtctcaagaatggttggtgggcatgagttcctagagaactgtccaagggttgggaaaatccaaattctcttcctggctccagcactgattttgtacataaacattaagcaggttgcttaacctttttatttcaaactctctcaactctaaagtgctaataataatctcagttaccttatctttgtcacagggtgttcttttttatgaagaaaaatttgaaaatgataaaagctaagatgccttctaacttcataagcaaacctttaactaattatgtatctgaaagtcacccccacataccaactcaacttttttcctgtgaacacataaatatatttttatagaaaaacaaatctacataaaataaatctactgtttagtgagcagtatgacttgtacatgccattgaaaattattaatcagaagaaaattaagcagggtctttgctatacaaaagtgttttccactaattttgcatgcgtatttataagaaaaatgtgaatttggtggttttattctatcggtataaaggcatcgatattttagatgcacccgtgtttgtaaaaatgtagagcacaatggaattatgctggaagtctcaaataatatttttttcctattttatactcatggaagagataagctaaagaggggacaataatgagaaatgttggtgtgcttttctaagcatttaaaacataattgcccattggaacccttaaataggtttccataccattaagatatgattcatgtaacaatgttaaaactaattaataatgggattgggtttggttacctgtggtagtatatatcctagtgttcctatagtgaaataagtagggttcagcccaaagctttctttgttttgtaccttaaattgttcgattacgtccatccaaaagagatgaaaggtatgtagaacaggttcacgtgattacctttttcttttggcttggattaatattcatagtagaactttataaaacgtgtttgtattgtaggtggtgtttgtattatgcttatgactatgtatggtttgaaaatattttcattatacatgaaattcaactttccaaataaaagttctacttcatgtaatccaaaaaaaaaaaaa

SEQ ID NO: 135533 - DNA, 2489 bp, Homo sapiens
caggccggcgccatggcctccgggagtgtggccgagtgcctgcagcaggagaccacctgccccgtgtgcctgcagtacttcgcagagcccatgatgctcgactgcggccataacatctgttgcgcgtgcctcgcccgctgctggggcacggcagagactaacgtgtcgtgcccgcagtgccgggagaccttcccgcagaggcacatgcggcccaaccggcacctggccaacgtgacccaactggtaaagcagctgcgcaccgagcggccgtcggggcccggcggcgagatgggcgtgtgcgagaagcaccgcgagcccctgaagctgtactgcgaggaggaccagatgcccatctgcgtggtgtgcgaccgctcccgcgagcaccgcggccacagcgtgctgccgctcgaggaggcggtggagggcttcaaggagcaaatccagaaccagctcgaccatttaaaaagagtgacaagacttaaatttacagactttttggcccagggggaacaggcacgagctgaactcttgagcctaacccacatggagagggagaagattgtttgggagtttgagcagctgtatcactccttaaaggagcatgagtatcgcctcctggcccgccttgaggagctagacttggccatctacaatagcatcaatggtgccatcacccagttctcttgcaacatctcccacctcagcagcctgatcgctcagctagaagagaagcaccagcagcccaccagggagctcctgcaggacattggggacacattgagcaaggctgaaagaatcaaggattcctgaaccttggatcacacctccagatttgcaagagaaaatccacatttttgccccaaaatgtctattcttgacggagagtctaaagcagttcacagaaaaaatgcagtcagatatggagaaaatccaagaattaagagaggctcagttatactcagggggcagcattgttgggggacacgagcctggggagccccgggggattaaagctggctatggcacctgcaactgcttccctgaggaggagaagtgcttctgcgagcccgaagacatccaggatccactgtgcgacgagctgtgccgcacggtgatcgcagccgctgtcctcttctccttcgtcgtctcggtgctgctgtctgccttctgcatccactgctaccacaagtttgcccacaagccacccatctcctcagctgagatgaccttccggaggcccgcccaggccttcccggtcagctactcctcttccggtgcccgccggccctcgctggactccatggagaaccaggtctccgtggatgccttcaagatcctggaggatccaaagtgggaattccctcggaagaacttggttcttggaaaaactctaggagaaggcgaatttggaaaagtggtcaaggcaacggccttccatctgaaaggcagagcagggtacaccacggtggccgtgaagatgctgaaagagaacgcctccccgagtgagcttcgagacctgctgtcagagttcaacgtcctgaagcaggtcaaccacccacatgtcatcaaattgtatggggcctgcagccaggatggcccgctcctcctcatcgtggagtacgccaaatacggctccctgcggggcttcctccgcgagagccgcaaagtggggcctggctacctgggcagtggaggcagccgcaactccagctccctggaccacccggatgagcgggccctcaccatgggcgacctcatctcatttgcctggcagatctcacaggggatgcagtatctggccgagatgaagctcgttcatcgggacttggcagccagaaacatcctggtagctgaggggcggaagatgaagatttcggatttcggcttgtcccgagatgtttatgaagaggatccctacgtgaagaggagccagggtcggattccagttaaatggatggcaattgaatccctttttgatcatatctacaccacgcaaagtgatgtatggtcttttggtgtcctgctgtgggagatcgtgaccctagggggaaacccctatcctgggattcctcctgagcggctcttcaaccttctgaagaccggccaccggatggagaggccagacaactgcagcgaggagatgtaccgcctgatgctgcaatgctggaagcaggagccggacaaaaggccggtgtttgcggacatcagcaaagacctggagaagatgatggttaagaggagagactacttggaccttgcggcgtccactccatctgactccctgatttatgacgacggcctctcagaggaggagacaccgctggtggactgtaataatgcccccctccctcgagccctcccttccacatggattgaaaacaaactctatggtagaatttcccatgcatttactagattctagcaccgctgtcccctctgcactatccttcctctctgtgatgctttttaaaaatgtttctggtctgaac

SEQ ID NO: 135534 - DNA, 3078 bp, Homo sapiens
  misc_feature (1)...(3078): n = a,t,c or g
gtttacgctgccgccgcatccgctcggacgcggccacgttgtcttgcgcgctttgcccgcctggccctgggactctgaccctcggctaccctttcctgccccactagcgtggccgcgagcctcggtgagccggccgtattcccgctctcgcttagggggcacaggcgcaggcatcggcccggccactccaagccttcggtgcgcgggcgcgtctgggatacgggcccgggaggcgccgccctccgtccgcccggtgcctctcaggaacagcgaaccggagagagcgccggagagttgggctcagtgcagagctcggcgccggggcccatgcccgtgcgcccccgcaggcccggcgccatggcctccgggagtgtggccgagtgcctgcagcaagagaccacctgccccgtgtgcctgcagtacttcgcagagcccatgatgctcgactgcggccataacatctgttgcgcgtgcctcgcccgctgcttggggcacggaagaaacttaacgtgtcgtggcccgcagtgccgggaggaccttcccgcagaggcacatgcggcccaaccggcacctggccaacgtgacccaactggtaaagcagctgcgcaccgagcggccggtcggggcccggcggcgagatgggctgtgtgcgagaatgcaccgcgagcccctgaagctgtactgcgaggaggaccagatgcccatctgcgtggtgtgcgaccgctcccgcgagcaccgcggccacagcgtgctgccgctcgaggaggcggtggagggcttcaaggagcaaatccagaaccagctcgaccatttaaaaagagtgaaagatttaaagaagagacgtcgggcccagggggaacaggcacgagctgaactcttgagccttaacccagattggagagggagaagattgtttgggaagtttgagcagctgtatcactccttaaaggagcatgagtatcgcctcctggcccgccttgaggagctagacttggccatctacaatagcatcaatggtgccatcacccagttctcttgcaacatctcccacctcagcagcctgatcgctcagctagaagagaagcagcagcagcccaccaagggagctcctgcaggacattggggacacattgagcagggctgaaagaatcaggattcctgaaccttggatcacacctccagatttgcaagagaaaatccacattttttgcccaaaaagtgtctattcttgacggagagtctaaagcagttcacagaaaaaatgcagtcagatatggagaaaatccaagaattaagagaggctcagttatactcagtggacgtgactctggacccagacacggcctaccccagcctgatcctctctgataatctgcggcaagtgcggtacagttacctccaacaggacctgcctgacaaccccgagaggttcaatctagtttccctgtgtcttgggctctccatagcttcatcgccggggagaccattatttgggagggtagaggttggggagataaagccaagtggaccataggttgtctgttgaagactcagttgtcaagaaaagggtggagtaacctcagccccccagaatggattctggggcagtgtctttgtggtatgggaaaagaatattggggctcttacctccccaatgactgccctacccctgcggaccccgttccaagcgggtggggattttcctggaactatgatgcctggtgaggtctccttcttacaaccgtgacagagaggtgtcaacacccttcactttctcctcatgcctaccttttgggggcctggtccggcccctactttccagtctgagttactcggggagggaaaaggtgcagctccctctgatcaatctgcccccatgaagtgggatagatgggggttttctggcccatgttgggaaatcatgggtcattcccatggaagaccttcccctttgagggaagggtgaattcagggccaaaagggctgttggctgtaatcctacgcccaggcacaaggcatcttgtttgccttgccaacgtcctgtcaaagctgggtatccttaaccatgttccacgcccttgcagtgggagacatggatgtccatgttctctaccatcctttttccttcccatgcagattgtgaaatgtaatgagatgtatcaagatatcctagaaataaaaaccagatgtccacctccagtgtttcatacttttctggttttacacatcgctgggagggataaagagtatggataatctttgcgatttggagagccgtttcaaggttantttccagcttcttcggctcagcctggcttcctctggttcagccccacataatgattatggctatttgctgtcatttctgggctagggctcctttctaacaacctagactggaataaggccctgtcagcatggctcccttttatcccagttttccgtctgggaacagtacctctgcccctgattcccaatgtgccatagttttattaactccattaaagaagcctgtatgtgttttggttagttacagttattttacaataatgggtggggtaatgggccccacctctgttatgagataatgttctaatcaatgtctctgcctttgtatcttttctgagggctttgtctgttctcttcattctaatgaaaagttgtattcttagtgctgggtgcatatcatccaggataatattctggcccaactcccatcctctgttactagatccccttacccagtcacatttgtggactggtggccagtcgtataccatccctgggaaggatttctgggacaaatattccagggattcattgacttcattggctccttttctccatttcctttgggggaagggggaatttgaccatgcttaagtgcatcctattcaaggggcagctccgtccccatgggcccattgggatccatgagacactctggaagtcagaagggctgggggcagatccactttcaagcaagcccccatgatggttctcagtcctgcttctctgtgtggtacgtgcccctctgtttaaaaataaactgaatatggatgtttaaaaaaaaaaaaa

SEQ ID NO: 135535 - DNA, 1071 bp, Homo sapiens
atggtggcggcaagagaaaatgaggaagataaaaaagcagaatcccctgataaaaccatcagatctcatgagacttattcactaccacgagaacagtatgggggaaactgccctcatgattcaaattacctcccaccgggtccctcccacaacataatgttgcctgcatactatatggtaacttgtcaccatatgactgtagcttgtccagaaatcacatcgatattcaaagcaagaaaatggaggaaagaaggtgcattagcagtatctgttcccttaatcgggaaagcaaaagctttcctagaagcctgcttagcaaactcctgctcatatgtcatcatccagaactgtgtcatatgtgacctcctagctgcaaaacaggctaataaaccatctcttcctgtactctataccctgtctagccaggctacacatgaagctgttcatctcctttgcaggatgttggtctttgatccatccaaaagaatatccgctaaggatgccttagcccacccctacctagatgaagggcgactacgatatcacacatgtatgtgtaaatgttgcttttccacctccactggaagagtttataccagtgactttgagcctgtcaccaatcccaaatttgatgacactttcgagaagaacctcagttctgtccgacaggttaaaggccattttactcttcccactgatggggttgcagtctgtgtaatgccaccagtaggtttcttatatttagcaacagctgtcattttagttttaggaagttcagctgaattcctagtaggtggaggctgcgttgttacatctttaaccacagcattttcctctggcaaatgtgaactgcagacaaaaaggtcagtaacagatccaagagatggaaagagagtagcgctcaaaaagatgcccaacgtcttccagaatctggtctcttgcaaaagggtcttccgggaattgaagatgttgtgtttttttaagcatgataatgtactctctgcccttgacatactccaacctccacacattgactattttgaagaaatgtatcctaaccagggaatgtga

SEQ ID NO: 135536 - DNA, 4330 bp, Homo sapiens
  misc_feature (1)...(4330): n = a,t,c or g
gcgggtggccacccgatctcccccccaaccctcctcaagcgagaagcagccggggggagaggcaggagtcagcccggttgcgaccgtagcgcgcccgcctcccggggctcctgttctttggccccgggaccctacccttctcccggggcggttccctccgtctgggcgtccgagcgctgcccacatctttcattcctccctgcacctccttcccttcacttttgccccggctctctttctcctctctgtcctgctgtcgcctcctctcctcactccagcctccttcccttggcttattctgcccaaggaaagtttggaacccccgccccccctccccaatcaggtcaaccttganttaggagtagggggagatgtaggaaaggcctgagagttcgggggggggggaagctggaagctggtttcccagaaaatttccccccatcttctccatttagggtggtgggaattttttttaatcctgtttttgacggacggtggtaggtgtttaggaaaacggatgtgggaatggaaggggtagatgagtcaaccctctttcaagattccaacgggtggtgtgttacctgatccttttcgtgtgtggagttcagggggtcgggaggtttggcctttattcccacattcaaagttggaacctcccccaaattaagaatggagttttagtacccacttgtggcaggaaatcctggggggaaggggtccttttttcctttttcttttcttttttcccttttttttccttttggcaacccacacccttccacacacgctcaccccaaaattaaacaccaagatcctctaacttgtttggattgactgatgaagacataaagctctatgttttttgaggtggagtgagtggtttttcttcatttttaaatggccaaatgacagcttgacccagtttgctttccaatcaaagggcatttattttgaatgtctctttgtggcgcaagagccaacgcaaaaatgatggcggcttacaatggcggtacatctgcagcagcagcaggtcaccaccaccaccatcaccaccaccttccacacctccctcctcctcacctgcaccaccaccaccaccctcaacaccatcttcatccggggtcggctgccgctgtacaccctgtacagcagcacacctcttcggcagctgcggcagccgcagcagcggctgcagctgcagccatgttaaaccctgggcaacaacagccatatttcccatcaccggcaccggggcaggctcctggaccagctgcagcagccccagctcaggtacaggctgccgcagctgctacagttaaggcgcaccatcatcagcactcgcatcatccacagcagcagctggatattgagccggatagacctattggatatggagcctttggtgttgtctggtcagtaacagatccaagagatggaaagagagtagcgctcaaaaagatgcccaacgtcttccagaatctggtctcttgcaaaagggtcttccgggaattgaagatgttgtgtttttttaagcatgataatgtactctctgcccttgacatactctaacctccacacattgactattttgaagaaatatatgttgtcacagaattgatgcagagtgacctacataaaattatcgtctctcctcaaccactcagctcagatcatgtcaaagtttttctttatcagattttgcgaggtttggaaatatctccatttcaggctgggcattttacattcgagacattaagccagggaatctccttgtgaacagcaactgtgttctaaagatttgtgattttggattggccagagtggaagaattagatgaatcccgtcatatgactcaggaagttgttactcagtattatcgggctccagaaatcctgatgggcagccgtcattacagcaatgctattgacatctggtctgtgggatgtatctttgcagaactactaggacgaagaatattgtttcaggcacagagtcccattcagcagttggatttgatcacggatctgttgggcacaccatcactggaagcaatgaggacagcttgtgaaggcgctaaggcacatatactcaggggtcctcataaacagccatctcttcctgtactctataccctgtctagccaggctacaccattgaactggtcatctcctttttgcagaatgtggctttgatccatccaaaagaatatccgctaaggatgccttatcccacccctacctagatgaagggcgactacgatatcacacatgtatgtgtaaatgttgcctttccccctcccactggaagagttaatacccagtgacttggagcctgtcacccaatcccaaatttgatgacactttcgagaagaacctcagtcctgtccgacaggttaaagaaattattcatcagttcattttggaacaggcagaaaggaaacagagtggcctttatggatcaaccctcagtctgctgtctttaagagctttattagttccactgttgctcagccatctgagatgcccccaatctcctctggtgtgggagtgatggtggaagataaatgtaccactgaaagatgtaaatgtagctttcccactgggagtctgtgatttgcaattctgggaggttaattcatgcttgtactgtaattttactaatggaagttttaaattaacaaccactacttgtatggatatggaataatatttaggaaatgttactaggacttttaatcttgtaaagtggttgtgcttttagaagaaaaatattttacccagagttgcacatgtttttatggaatttaagtgcagctgtttattggctcacctcagaacaaaagagaattgaaccaaatttgggagtttggggttttatgttttgtttttcttttctaaaatgaagtgagattggttcacacacacacacacacacacacacacacacaaacacaaaggacagtcatacattttgatatttgagccattcctaaagatttggggttttctaaaactaaagaatctaggataccttgccttgcgaccaatcattggagccacgtgagctggatcgtgggctgcacctggggggagggtagggaggaggggcatgccacctaatgatcaagccctataattagcttctcattagagccgtgatggtgatgtgtgctgtctaaaatccaattgttgtgggtagagaagaatgagtttgtgactaaggagagactaaacttttgttttccttacccagtataaatatatatatatatatttaatctatttttattagaagtttttctgctctttcttacataaaagacccccaagcatgcatctttcatgtgtgtaaataattcatttctgggctaatttcaaaagaatcccaatattgctgtatagaaagagacctagcttgcacattttaggtctgtgaaattttgtgagactttttcctgcactggacagtaaaaaaataataaaagacaaaaacaaatttaaaaaaaaatttaagccacaaaaaaaggcacatagggaattatgtcaaatgtgtttgtgtccttaggcaaagctgtgggagtcttgaaatgtcacagtagtaaataacttattactttttgacaagttcttttttttctgttggaacactgaattcttctgtgcatatgtacatatgaatacaaatcgaaggcctctacctcctgggagttatacaacttgggcttgtttacctccacatgctgatgatgactattttttttttttttgagttcagtgtggagacttgaaacttgaatgtcccttccaacttttatattaaaaataaaaagacaagggaaattgaagatcatttttcacctgtacaaggaatactaatggatcgtcttaaaattggtctaggaaaaaaccttggtgtgtgttatggacaattaactgttaaagttattgtaagttatctgtatttagcagagtattttcaacttgagtgatctgagctgaatttgaagactattaataagttatgtttggaagttttaacttcaatgaagtaattatttgctgtgaaagaaacaaacattgaattactaaacaaagatggtgcaatatctttgtttttttttttatgaggctcctgagaatcaacccaactgaagcatttcaattcacttgaatgagaaacgtgtttagtatcaaaagagcccaagaagacactggtgtgaaaggtacaatctcagaggttggtcaattaccgtggcacactttctggtcactttgtacaatgtagatttaaagtacactggtgaaaacattaaatgtgacatttgaaaaaa

SEQ ID NO: 135537 - DNA, 1090 bp, Homo sapiens
  misc_feature (1)...(1090): n = a,t,c or g
gtgttcgcagccgccgccgcgccgcgntacgctctccaacgccagacgccgcctctcgctcgcagtgctccagccgaagagcaaggggggtaagtaaggaggtctctgtaacatatgatcgtacaaaagcagactggcccgcaaatcggaccggtggtaaagccccccaggaagcaactggcttacaaaaagccggcttcgcaagagtgcggccctctaactggaggggtgaagaaacctcatcgttacagggcctggtactgtggcggctccgtgaaatttagacggttatcagaagtccactgaacgtcatgattcgcaaacattcgcttccagcgatctagtgcgagaaattgctcaaggacttttaaaacagatctgcgcttccagagcgcagtaatcaggtggctttgcaggatggcaagtggaggcctatctggtttggccttttttgaaagacaccaacctagtgtgcttatccatgcccaaacgtgtaacaatttatgccaaaaagacattccagctaagcacgccggcatcacgtggagaacgtgctttaaggatccactcatggatggggaaacatttcattctcaaaaaaaaaaaaaaaaaatttctcttcttcctgttattggtagttctgaacgttagatatttttttttccatggggtcaaaaggtacctaagtatatgattgcgagtggaaaaataggggacagaaatacaggtattggcagtttttccattttcatttgtgtgtgaatttttaatataaatgcggagacgtaaagcattaatgcaagttaaaatgtttcagtgaacaagtttcagcggttcaactttataataattataaataaacctgttaaacttttctggacaatgccagcatttggaatttttttaaaacaagtaaatttcttattgatggcaactaaatggtgtttgtagcatttttatcatacagtagattccatccattcactatacttttctaactgagttgtcctacatgcaagtacatgtttttaatgttgtctgtcttctgtgctgttcctgtaagtttgctattaaaatacattaaactata

SEQ ID NO: 135538 - DNA, 529 bp, Homo sapiens; identical to SEQ ID NO: 117835

SEQ ID NO: 135539 - DNA, 2622 bp, Homo sapiens
atgagaaacctaaggaatattcagaaggcaaaagcaactataaacttgggaatatcctttgatgaaggcttgaaggggtttatgtggtccagaatagaggcagctcctcttccaaacaccaggtggtgtctgccacatggctactcaggtcctgcgaactctggtggctgctactacatcactacagggatgtcctgctggctctcagatctctatccaagacatgatggtgtccatgttggactccaaggcaaggacctggagcatgacattccagtggacctagggtccaggcccacctctgtggacccagtttccaggtctgccccagggccccagggccccaaggctccagtggactcagggtccaggaccactccagcaaaccctggtgctggaccatcccctgtagacccaagctcccggccagcccctgtggcttcaggctttagactcatcatgatagaccaaaacaccaagctaattccagtgccaggttggcccctgcgactcaggctcaagatctacctcagcagtaggtcagcctctttggactcaggctccaggtttgcccctgtggacacaaattttatacctgtccccacagaccgaggccatagccatgcccctgaagacccagttgacaggctaacctcagtggacccaacaaaggaaaaaaactggatggagaatgagtttgacaagttgacagaagtaggcttcagaaggtcggtaataacaaacttctctgagctaaaggagcatgttctaacccatcgcaaggaagctaaaaaccttgaaaaaaggttagatgaatggctaagtagaataacttgtgcagagaagagcttaaatgacctgatggagctgaaaaccacagtacgagaactgcgtgaagcatacacaagcttcatgagtcaattcgatcaagcggaagaaaggatatcagtgattgaagaccaaattaatgaaataaagcttaaatctcttcaagctcaggaggatgcccgccacagaaacacagatcagaggagctcagagaataggcggtcagagccttggagcttggaggagcggaagcgtgagcagtggaactcactcaagcagaatgcagaccagcaggacacagaagccatgtccgattataagaaacagctccgaaacctgaaggaggagatagctgttctgtctgctgagaaaagtgcactccaaggaaggaccctgaaagaaggatcagagagaaacaagaaatcagaaaggactgggtttcttaagggacagaccccagtgggtctcagggaaaatgaagcaagagtgtttacaacttggaacgccatggccataaataatcatcgggcagtggcaatatttcccaagagacggcatgggcgtgaggacggacttttgtcgaatcttccaacgtttggctcgtatgcgcctttgcgaagggtgtctaatgaattcatagcttctgccgtccaacgaattctccttgagagacgggcgcttcctcatggaaactgtaaacttggaggtttgaccccccaatttatgaaccggaaaaatgctctagtgttggaagttctggccagggcgatcaggcaggagaaggaaataaagggtattcaattaggaaaagaggaagtcaaattgtccctgtttgcagacgacatgattgtttatctagaaaaccccatcgtctcagcccaaaatctccttaagctgataagcaacttcagcaaagtctcaggatacaaaatcaatgtacaaaaatcacaagcattcttatacaccaacaacagacaaacagagagccaaatcatgagtgaactcccattcacaattgcttcaaagagaataaaatacctaggaatccaacttacaagggatgtgaaggacctcttcaaggagaactacaaaccactgctcaatgaaataaaagaggatacaaacaaatggaagaacattccatgctcatgggtaggaagaatcaatatcgtgaaaatggccatactgcccaaggtaatttacagattcaatgccatccccatcaagctaccaatgactttcttcacagaattggaaaaaactactttaaagttcatatggaaccaaaaaagagcccgcatcgccaagtcaatcctaagccaaaagaacaaagctggaggcatcacactacctgacttcaaactacactacaaggctacagtaaccaaaacagcatggtactggttccaaaacacagatatagatcaatggaacagaacagagccctcagaaataatgccgcatatctacaactatctgatctttgacaatcctgaaaaaaacaagcaatggggaacggatttcctatttaataaatggtgctgggaaaactggctagccatatgtagaaagctgaaactggatcccttccttacaccttatacaaaaattaagtcaagatggattaaagacataaatgttagacctaaaaccataaaagccctagaagaaaacctaggcaataccatccaggacataggcatgggcaaggacttcatgtctgaaacaccaaaagcaatgacaacaaaagtgaaaattgacaaatgggatctcattaaactgaagagcttctga

SEQ ID NO: 135540 - DNA, 2883 bp, Homo sapiens
atgagccctgtgacactttgggtgagaacctccagcagaggtgaggaccggtgtggaatgtgcacccctggccgtgacacaggatttgcacccataagtggaatgtgtagtaaatatcgcagctgcacgattaatgaagatacaggtcttggactggccttcaccatgcccatgagtctggacacaaagcacatccccaactttggaaaggtgcacgggtacatcatgcgacatcataaaaacgaagatacaattccttggaggaggaacaccaaaaaggaggaagctagaggaacacagcccctggaggctgatgatcaaaatcctggctgggaagatgggaagccaggatccctagagaatgaaggaagacgcagccataggggcaatccagccccagacatgccccagcctcccaaggaagacctcttcatcttgccagatgagtataagtcttgcttacggcataagcgctctcttctgaggtcccatagaaatgaagaactgaacgtggagaccttggtggtggtcgacaaaaagatgatgcaaaaccatggccatgaaaatatcaccacctacgtgctcacgatactcaacatggaaagaattcttaaaaagacatcatttaccattatccatccatctgccatggagagatgtcccgtgctgaacttacagataagggactctctctggaatcattgcttcagtttagcaacgacagtccatagatttcaccccgtgggcagacatgctttgaagaaaatgtacaagcttccatcagcttacataaatgtcagcatcactaaatacacacaaagattcgcccttacatacatttcttgcgtcttccacagaaatgctgcttttgtggcagtcccaggcgaaggtcgctgctgtgcaggggttgatgtgccagctcccatgtccttgaggtcaccaggacctcactggccccaggagcatggggctctgtggatctcttgtacagtacgtgggatggcgagctgccttgggcagctctgccgagtttccatgagagtgagagcgaacattggaaaggttcaaaaaccccggctgagaattagcaatgggaaaggcctccacacacagtctgagctctctggctctgcatacctggagaaaggctggcgtggagctgctccaggactggactccaggaatgagaaagggacagagggggcccgggactcgggaacacccgggcgccagtcccagacgctccaaaggggcccaccgggaccggtgcctggaagcagtaagattgctccacaaaccctcactagacaaggctcaatgacagcttccaggaaactggtcctgcttctgcctgaattttgtgaaagaaccggagagcagagcggacaactctacccaccctccccactcctagttgaatgggtcatgcctgctgggacttccagcacagtggacccacttctgcctgaactctgcagacgttgggaaagacaggcactaagtctgtgcagactttaccgccagaggacttctgtttctatcaaggctctttgcgatcacacagaaactcgctcagtggccctttcaacctgccaaggcttggaatgcaactcctcaccagcaaggaaacaaaactggatggagaatgagtttgaagagttgacagaagtaggcttcagaaagtcagtaataacaaaattctccaagctaaaggagcatattctaacccatcgcaaggaagctaaaaaccttgaaaaaaggttagacgaatggctaactagaataaccagtgtagagaagagcttaaatgacctgatggagctgaaaaccacagtacgaaaaacttcatgaagcatacacaagcttcaatagccgatttgatcaagtggaagaaagaatattagtgattgaacatcaaattaatgaaataaagcaagaagataaagttagagaaaaaagagtaaaaagaaatgaacaaagcctccaagaaatatgggactgtgtgaaaagaccaaatctatgtttgattggtgtacctgaaagtgatggggagaatggaaccaagttggaaaacactccttcaggatattatccaggagaacttccccaacctagcaaggcaggccaacattcaaattcaggaaataccagagaacgccacaaagatactccttgagaagagcaactccaagcacacctaattgtcagattcaccaaagttgaaatgaaggaaaaaaatgttaagggcagccagagagaaaggtcggggttacctacccacaaaggggaagcccttcagactaacaacagctgatctctcagcagaaactctacaagccagaagacagagtgggggccaatattcaacattcttaaagaaaagaatttttcaacccagaaatttcatatccagcccaaactaagcttcataagcgaaggagaaataaaatactttatagacaagccaaatgctgagagatttttgtcaccaccagggcctgcccttaaaagagctccctgaaggaagaagcacttaaacatgggaaagggaacaaccgggtacccagccacttgcaaaaattcattgcttaaatttgttaaaggccatttgagggcttggggaggaaacttgcatcaacttaatgggccaaaattaccagctaacattcttaattgacaggatccaaattcacatattaccattatttaccttaaatgtaaatggggctaaatgctcccatttaaaagacacagactgggcaaattggataaagagtcaagacccatcagtgtgctgtatttaggagacccatctcatgtgcagagacacatataggctcaaaataaagggatggaggagatcacaagcaatggaagacaaaa

SEQ ID NO: 135541 - DNA, 1478 bp, Homo sapiens
aaaaatgtcggggcaggacggacggcagttcccggcggcatagctcctctggccagctacttaattcttccaggggaaccgcgctagctgggaccgcaccttcctgagacatactttcgtcaaacaggagagcttcaaaccagacccgccaaagcccagaccggaaactcgcagtcccgccaacccttgcgcgctctccgccggctccaaaaccatagagaggagggcggctggtttcttggtgagaatctgaatttaaagattgtgtgcatttaataagaggatgacctttcagtttaatttcactatagaagaccatctggaaaatgaattaacacccattagagatggagctttgaccctggattcctcaaaagagctgtcagtctcagaaagtcaaaaaggagaagagagggacagaaaatgttctgcagaacaatttgacttgcctcaggatcacttgtgggaacataagtcaatggaaaatgcagctccctctcaagacacagacagtccactcagtgcagccagcagttcaaggaacttggagccacatggaaaacagccctccttgagagctgccaaagagcatgctatgcctaaagatttaaagaagatgttagaaaataaagtcatagaaacattaccaggtttccagcatgttaagttatcagtagtgaaaaccatcttgttgaaagagaacttccctggagaaaacatagtttcaaaaagcttttcttctcactctgatctgattacaggtgtttatgagggaggcttaaaaatctgggaatgtacctttgacctcctggcttatttcacaaaggccaaagtgaaatttgctgggaaaaaagtcttggatcttggttgtggatcaggtttactaggtataactgcattcaagggagggtccaaagaaattcactttcaagattataacagtatggtgattgatgaagtaacctttacctaatgtagtagctaactccactttggaagatgaagaaaatgatgtaaatgagccagatgtgaaaagatgcaggaaaccaaaagtaacacaactatataaatgccgatttttttctggtgagtggtctgagttttgtaagcttgtactaagtagtgaaaaactttttgtaaaatatgatctcatttctcacctcagaaaccatttacaacccagattattatagtaatttgcaccagactttccttagactgttaagtaaaaatggacgtgtacttttggccagcaaagcacacgtccaaagaaattcactttcaagattataacagtatggtgattgatgaagtaaccttacctaatgtagtagctaactccactttggaagatgaagaaaatgatgtaaatgagccagatgtgaaaagatgcaggaaaccaaaagtaacacaactatataaatgccgatttttttctggtgagtggtctgagttttgtaagcttgtactaagtagtg

SEQ ID NO: 135542 - DNA, 1526 bp, Homo sapiens
  misc_feature (1)...(1526): n = a,t,c or g
cgatttaagtccggaggaggcgttgtgaggtgagctttttcagaagcgcgtccccaggacacgtcgggaagcaagcatccccagagctgcttggaaagaggaccaaagacgtctaaaaagtcatttggaaatatctctaaatatttgttaccatgtataagctgctaaagagaaattgggcccaacaaaactaattgaataattgaggcagatttgtgtgtatcatcaaattctatccagaagttgaagaatctgaatttaaagattgtgtgcatttaataagaggatgacctttcagtttaatttcactatagaagaccatctgggaaaatgaattaacacccattagagatgggagctttgaccctgggattcctcaaaagagctgttcagtctcagaaagtcaaaaagggaggaaggaggagggacagaaaatgttctgcagaacaattttgacttgcctcaggatcacttgtgggggaacataagttcaatgggaaaatggcaggctccctcttcaaggacacaggaccagttccacttcagtggcagccagcagttcaaggaacttgggagccacatgggaaaacagccctccttgnaggagctggccaaaggagcatggctatgcctaaaaggttttaaagaagatgtttagaaaattaaagtccattagaaacatttaccaggtttccagcatgttaagttatcagtagtgaaaaccatcttgttgaaagagaacttccctggagaaaacatagtttcaaaaagcttttcttctcactctgatctgattacaggtgtttatgagggaggcttaaaaatctgggaatgtacctttgacctcctggcttatttcacaaaggccaaagtgaaatttgctgggaaaaaagtcttggatcttggttgtggatcaggtttactaggtataactgcattcaagggagcgtccaaagaaattcactttccaggattataacagtatggtgattgatgaagtaaccttacctaatgtagtagcctaactcccactttggaagatggaggaaaaatggatgtaaaatggagcccagatgtggaaaagatgccaggaaacccaaaagtaacacaacctatataaatgcccgatttttttcctggtgagtggtcctgagttttgtaagccttgtacctaagtagtgaaaaacctttttgtaaaatatgatcctcattcctcaccctcagaaacccatttacaaccccagattattatagtaatttgcgaccagactttccttagactgttaagtaaaaatggaccgtgtacttttggccagcaaagcacattattttggtgtaggtggaggtgttcatctctttcagaagtttgtagaagaaagagatgtttttaagaccagaatactcaaaataattgatgaaggattgaagaggttcataattgaaataacttttaagtttcctggttaattaacattcactgagcatccaaaatgaaataaacagaaggaacaaaaaaaaaaaaaaaa

SEQ ID NO: 135543 - DNA, 369 bp, Homo sapiens; identical to SEQ ID NO: 122077

SEQ ID NO: 135544 - DNA, 394 bp, Homo sapiens; identical to SEQ ID NO: 120248

SEQ ID NO: 135545 - DNA, 693 bp, Homo sapiens
atgtgcccctctgagatgaagcttccagaggaacgatcaggcagcaacatttgctgttctgcaatatttgctgttctgcagcccctgctggtgatacccaggcaaacatggtctggagtggacctccagcaaactccaacagacctgcagctgagggtcctgtttgttagaaggaaaactaacaaacagaaaggacatccacaccaaaaccccatctgtatgtcacaatcatcaaagaccaaagcaaggcaggccagcattcaaattcaggaaatacagagaatgccacaaagatactcctcgagcagagcaactccaagacacataattgtcagattcaccaaagttcgaatgaaggaaaaaatgttaagggcagccagagagaaaggtcgggttacccacaaagggaagcccatcagactaacagtggatctctcggcagaaactctacaagccagaagagagtgggggccaatattcaacattcttaaagaaaagaattttcaacccagaatttcatatccagccaaactaagcttcataagtgaaggagaaataaaatcctttacaaacaagcaaatgctgagagattttgtcaccaccaggcctgccttacaagagctcctgaaggaagcactaaacatggaaaggaacaaccagtaccagccacttcaaaaacatgcaaaattgtaa

SEQ ID NO: 135546 - DNA, 717 bp, Homo sapiens; identical to SEQ ID NO: 126282

SEQ ID NO: 135547 - DNA, 1539 bp, Homo sapiens; identical to SEQ ID NO: 117840

SEQ ID NO: 135548 - DNA, 768 bp, Homo sapiens
atggacaatgactttgacgagttgaaagaagaaggcttcagacgattggtaataacaaacttctctgagctaaagaaggatgttcgaacccatcgcaaagaagctgaaaaccttgaaaaaagattagacgaatggctaactagaataaacagtgtagagaagaccttaaataaccttatgaaactgaaaaccatggcacaagaactacatgacgcatgcacaagcttcagtagccgatttgatcaaggtgatggggagaatggaaccaaattggaaaacattcttcaggatattatccagggaaatttccccaaactagcaaggcaggccaacattcaaattcaggaaatacagagaatgccacaaagatactcctcgagaagagcaactccaagacacataattgtcagattcaccaaagttgaaatgaaggaaaaaatgttaagggcagccagagagaaaggtcgggttacccacaaagggaatcccatcagactaacagcagatctctcggcagaaactctacaagccagaatagagtggggtccaatattcaacattcttaaagaaaagaattttcaacccagaatttcatatccagccaaactaagcttcataagtgaaggagaaataaaatcctttacagacaaacaaatgctgagagattttgtcaccaccaggcctgccttacaagagctcctgaaggaagcactaaccaaggaaaggaacaactggtaccagccactgcagaaacgtgccaaattgtaa

SEQ ID NO: 135549 - DNA, 975 bp, Homo sapiens
atggggaaaaaacagaacagaaaaactggaaactctaaaacgcagagcgcctctcctcctccaaaggaacgcagttccttaccagcaacggaacaaagctggatggagaatgattttgacgagctgagagaggaaggcttcagacgatcaaattattctgagctacgggaggacattcaaaccaaaggcaaagaagttgaaaactttgaaaaaaatttagaagaatgtataactagaataaccaatacagagaagtgcttaaaggagctgatggagctgaaaaccaaggctcgagaactacaaagggtatcagcaatggaagatgaaatgaatgaaatgaagcaagaagggaagtttagagaaaaaagaataaaaagaaatgagcaaagcctccaagaaatatgggactatgtgaaaagaccaaatctacgtctgattggtgtacctgaaagtgatggggagaatgcaaccaagttgggaaacactctgcaggatattatccaggagaacttccccaatctagcaaggcaggccaacaacgttcagattcaggaaatacagagaacgccacaaagatactcctcgagaagagcaactccaagacacataattgtcagattcaccaaagttgaaatgaaggaaaaaatgttaagggcagccagagagaaaggtcgagttaccctcaaagggaagcccatcagactaacagtggatctctcggcagaaaccctacaagccagaagagagtgggggccaatattcaacattcttaaaggaaagaattttcagcccagaatttcatatccagccaaactaagcttcataagtgaaggagaaataaaatactttacagacaagcaaatgctgagagattttgtcaccaccaggcctgccctaaaagagctcctgaaggaagcgctaaacatggaaaggaacaaccagtaccagccgctgcaaaatcatgccaaaatgtaa

SEQ ID NO: 135550 - DNA, 2673 bp, Homo sapiens; identical to SEQ ID NO: 117841

SEQ ID NO: 135551 - DNA, 1180 bp, Homo sapiens; identical to SEQ ID NO: 120252

SEQ ID NO: 135552 - DNA, 829 bp, Homo sapiens; identical to SEQ ID NO: 129566

SEQ ID NO: 135553 - DNA, 780 bp, Homo sapiens; identical to SEQ ID NO: 125811

SEQ ID NO: 135554 - DNA, 1058 bp, Homo sapiens
ccgctgaggaattcggacgagggcggcggcgaggatgcgccccagggcgggagcgggacgctccactttaccctggctgcccgcaacgggccaggcctgccgtctctacctctctacctgttgtatccacgagtaccagcagagtgcctgacacatagtagacataaatcaggctgaagaatgaccatgatggagaattgagaaacaagaccatctgcatcaacaggaatttggcagaaatcaagaagttctctgaaaattatgagaacaaagagacaatgtacctcaatctctgggacgtggcgaaagcagtgttacgagggcaatttatagcactgaatgcccgtatcaaaaagctagaaaaatctcaagtttacaacctaatatctcaactaaaagagctagagaaccaagagcaaacaaaccccaaagccagcagaagacaagaaataaccaagatcagggctgaattgaaggaggtagagacatgtaaaacccttaaaaaaattaatgaatccgggagaggtgtggattgcagctccatgccagcaatggaacaaagccggatggagaatgactttgatgagttgacaaaagtaggcttcagaagcaaggcaggccaacattcatattcaggaaatacacggaacaccacaaagataatccttgagaagagcaactccaagacacatattgtcagattcaccaaagttgaaatgaaggaaaaaatgctaagggcagccagaaagaaaggttgggttacccacaaagggaagcccatcagactaacagcagatctgttggcagaaaccctacaagccagaagagagtggggaccaatattcaacattcttaaagaaaagaattttcagctcagaatttcatatccagccaaactaagcttcatacgtgaaggagaaataaaagcctttacagaaaagcaaatactgagagattttgtcaccaccaggcctgccttacaagagctcctgaaggaagcactaaacatggaaaggaacgaccgataccagccgctgcaaaaacatgccaaattgtaa

SEQ ID NO: 135555 - DNA, 1266 bp, Homo sapiens; identical to SEQ ID NO: 127022

SEQ ID NO: 135556 - DNA, 3344 bp, Homo sapiens
  misc_feature (1)...(3344): n = a,t,c or g
atgcgcgtcgagccgcactgggaccacctacagacgctggaccagagcccacgtccctgcggctttggagcgccgcgtctgcagcggccagcgcgcctcacatggcggctccggtcacgtcacacaatgcggctgctccgggcgcccactgcccagcaccgcaggcctcctctggccgcccctcaagcaggccccgccctttgcggcccagcccagacccggaggcaccggagtcctctccccaccctagggcgtaagaccaaaaaaacgccaatgccagaaagaagacactgcacatgcgcagaacgtttccctagccctactccagaactacgcttcccagaaggcccggctgcgactccatcttggatgacgtcgatcagaatggccagcaggaggccatatgcacctaaaccagatggaagaaaatggcccggggtgaccagctggctctctttatcaagctcagactcctcaagtccccgcttggaagaacagtcacagattccatatacaggaattcaagatctccaagcagcagggagggggttcagaatacatattcaagttgttgcagctcaaaacactgatgtagacatggctggcaccaacgtggctctaggacatactccagaaggaaaactaacaaacacaaaggacatccacaccaaaaacccatctgtacatcaccatcatcaaagaccaaaagtagataaaaccacaaagatggggaaaaaacagaacagaaaaactggaaactctacaaagcagagcgcctctcctcctccaaaggaatgcagttcctcaccagcaacggaacaaagctggatggagaatgactttgacgagctgagagaagaaggcttcagacgatcaaattactctgagctatggcaggacattcaaaccaaaggcaaagaagttgaaaactttgaaaaaaatttagaagaatgtataactagaataaccaatacagagaagtgcttaaaggagctaatggagctgaaaaccaaggctcgagaactatgggaagaatgcagaagcctcaggagccgatgcgatcagctggaagaaaaggtatcagcaatggaagatgaaatgaatgaaatgaagcgagaagggaagtttagagaaaaaagaataaaaagaaatgagcaaagcttccaaagaaataggggactatgtgaaaagaccaaatctacgtctgattggtgtacctgaaagtgatgtggagaatggaaccaagttggaaaacactctgcaggatattatccaggagaacttccccaatctagcaaggcaggccaaccgttcagattcaggaaatacagagaacgccacaaagatactcctcgagaagagcaactccaagacacataattgtcagattcaccaaagttgaaatgaaggaaaaaatgttaagggcagccagagagaaaggtcgggttaccctcaaaggaaagcccatcagactaacaacagctgatctctcagcagaaactctacaagccagaagacagagtgggggccaatattcaacattcttttttttttttttttttttttttttgagacggagtctcgctctgtcgcccaggctggagtgcagtggcgggatctcagctcactgcaagctccgcctcccgggttcacgccattctcctgcctcagcctcccaagtagctgggactacaggcgcccgccactacgcccggctaattttttgtatttttagtagagacggggtttcaccgttttagccgggatggtctcgatctcctgacctcgtgatccgcccgcctcggcctcccaaagtgctgggattacaggcgtcacgaccgcgcccggcccagtctgtgtctcctaaaatgggggcatttagcccatttacatttaaggttaatattgttatgtgtgaaattgaacctgtcaattaagaatgttagccggtgattttgccccgttagatgatgcagtttcttcctagtctcgaatggtctttacagtttggcttgttttttgcagcgggctggtacccggttgttccttacccatgtttagcgcttccttcaggagctcttttaagggcaggcctggcgcctcataaaaatctctcagcatttgcttgtctgtaaaggattttatttctccttcacttatggagcttagtttgggctggatatgaaattctggtttgaaaaattcttttctttagagaatgttgaatattggcccccactttcttctggcttgtagagtttctgccgagagatctgcttgttagtctgatgggcttccctttgagggtaacccgacctttctctctggctgcccttaacatttttttccttcatttcaactttggtgaatctgacaattaggtgtgcttggagttgctcttctcgaggagtatctttgtggcgttctctgtatttcctgaatctgaacgttggcctgccttgctagattggggaagttctcctggataatatcctgcagagtgttttccaacttggttccattctccacatcatgcccgctttccagtcgggaaacctgtcgtgccagctgcattaatgaatcggccaacgcgcggggagaggcggtttgcgtattgggcgccagggtggtttttcttttcaccagtgagacgggcaacagctgattgcccttcaccgcctggccctgagagagttgcagcaagcggtccacgctggtttgccccagcaggcgaaaatcctgtttgatggtggttccgaaatcggcaaaatccattaattgcgttgcgctcactgcccgctttccagtcgggaaacctgtcgtgccagctgcattaatgaatcggccaacgcgcggggagaggcggtttgcgtattgggcgccagggtggtttttcttttcaccagtgagacgggcaacagctgattgcccttcaccgcctggccctgagagagttgcagcaagcggtccacgctggtttgccccagcaggcgaaaatcctgtttgatggtggttccgaaatcggcaaaatcccagttcattgccggcgaactcttcctgctggccctggccgacagcaaggccgacatcggcaagaccgccaaggagaagggtaccgagctcgaattcgtaatcatggtcatagctgtttccnnggaagccatcacaaacggcatgatgaacctgaatcgccagcggcatcagcaccttgtcgccttgcgtataatatttgcccatggtgaaaacgggggcgaagaagttgtccatattggccacgtttaaatcaaaactggtgaaactcacccagggattggctgtgacgaaaaacatattctcaataaacc

SEQ ID NO: 135557 - DNA, 484 bp, Homo sapiens
acgatcgtctttggagaatcgacgagatcagttgggccgcctggtcaaggacatgaagatcaagtccctggaggagatctatctcttctccctgcccattaaggaatcagagatcattgatttcttcctgggggcctctctcaaggatgaggttttgaagattatgccagtgcagaagcagacccgtgccggccagcgcaccaggttcaaggcatttgttgctatcggggactacaatggccacgtcggtctgggtgttaagtgctccaaggaggtggccaccgccatccgtggggccatcatcctggccaagctctccatcgtgcccgtgcgcagaggctactgggggaacaagatcggcaagccccacactgtcccttgcaaggtgacaggccgctgcggctctgtgctgggacgcctcatccctgcacccaggggcactggcatcgtctccgcacctgtgcctaagaagctgctcatgatg

SEQ ID NO: 135558 - DNA, 904 bp, Homo sapiens
agcttctttcttctccaagaaaacatccggttttgggggatggggggctggaggccctggggaccctgggatggggaaccacggtggcttccgtggaggcttcagcaggggcatccggggctggggtcatagccgcggacagggcccgggccaaggccgaggagctcacagaggcaagaccaaggacaaggagtggacgtctatccccaagctgggccacctggtcaaggacatgaagatcaagttcctggaggagatctatctcttcttcctggccatcaaagagtttgagatcattgactttttcctgggggcttctctcaaggatgaggttttgaagatcatgccagtacaaaagcagacccacgccagccagcgcaccaggctcaagggatttattgtcatcggtgactataatggtatgtcggtctgggtgttaagtgctccaaggaggtggccacgccatccgcggggccatcatcctgggctagctctccattgtccccatgtgcagaggctactgggggagcaagatcggcaagccccacaccgtcccttgtaaggtgacaggccactgtggctctgtgctggtgcacttcatccctgcacccaggggcactggcatcgtctcagtccccatgcccaaaagctgctgctgatggcgggtatctatgactgctacgccgcagctgcactgccaccctgggaaacttcaccaaggccacctttgatgctatctctaagacctacagctacccgacccccaacctctggaaggagactgtattcaccaagtctccctagaattcaggaattcaggtcaggaattcactgactaccttgtcaagaccccatcagagtctctgtgcagaggactcaggctccagctgtggctacaacgtag

SEQ ID NO: 135559 - DNA, 407 bp, Homo sapiens
gtcgacgatttcgtgtggagggaactttcccattccccgaggcggatccggtgttgcatccttggagcgagctgagagctcgagtacagaacctgctaaggccatcaaacctattgatcggaagtcagtccatcagatttgctctgggccggtggtaccgagtctaagcactgcggtgaaggagttagtagaaaacagtctggatgctggtgccactaatattgatctaaagcttaaggactatggagtggatctcattgaagtttcaggcaatggatgtggggtagaagaagaaaacttcgaaggcttaactctgaaacatcacacatctaagattcaagagtttgccgacctacctcagtgatgtcaccatttctacctgccatgtatcggcgaaggttgggact

SEQ ID NO: 135560 - DNA, 490 bp, Homo sapiens
  misc_feature (1)...(490): n = a,t,c or g
tctctaccccancatcaccagaggaaaggttaggttagaaaacaatgcnnccactctttcccctcagagcccagggctgaagcctgggggaatgcttcattttgctccttttctctttgccttttccaaatggtcacattcttgaggtagggagtggagctggggaggggcccagagtcctgtcagaaatcctgcatgtcacttttggcagctttcgcagcattgaaaagatcattggctggtggctctgactgtttccagctatgacgatgtaccacttgggaccctttctttggatgttttgccaccggcattgttttcagtggtcgttttgttgctttcttcttcacaccgcgattgaagctgtcctcaaatcattttcttgtcttcttgtctggtacatcggggtggcgcgtgccagacaccaacggtcggaaaccgccagacaccaacgctcggaatccacgccaggccacgacggagggcgact

SEQ ID NO: 135561 - DNA, 4205 bp, Homo sapiens; identical to SEQ ID NO: 130036
  misc_feature (1)...(4205): n = a,t,c or g

SEQ ID NO: 135562 - DNA, 712 bp, Homo sapiens
ctagatgatctgcacaaatggttcctctcctctttcctgttgactgccattagcattggaattaagttcctgctgaaaatccacatctcccgtgggtccggtgttctcctccaactcctcccgggaaacccaagccctgccgctcatggaacagaagaactggaaccgaagtttctggaacagggctatctgagagcggttcttcctggccctcgggttcatgcaacggcataactggaaccgacggttacggaccaagggtatgcgagagcgggtcttcccatacaggaagtagaagatgttttgtttggggtcctcgtcgtcctcctccatgtcattggccaggtagctgaggacagaaatcaggttgctgctcaggggcaccaccaggagagcgtccggctcagtgttggggtgactgtactcatttggaaattgcaggatggaggggtattcgaaggtcagatgcaaatccgagaagccagaggaagggttttgggtgatgctcccaggatggtgggctccgatgggatctttggagggggtgtgtctaggtcggctggtgtcaggagggtcttttgtgtgccaggcagagaactgtcccgaagagctgagagtagaggggctaggagcttcagggctgcggccagactgtggcccagagctcagatcccaaaggacccataggagaggcaggggccactcattcact

SEQ ID NO: 135563 - DNA, 1104 bp, Homo sapiens; identical to SEQ ID NO: 114550

SEQ ID NO: 135564 - DNA, 1096 bp, Homo sapiens; identical to SEQ ID NO: 114551

SEQ ID NO: 135565 - DNA, 795 bp, Homo sapiens
atggggctaccctgggggcagcctcacctagggctgcagatgctcctcctggcgttgaactgtctccggcccagcctgagcctggagctggtgccctacacaccacagataacagcttgggacctggaagggaaggtcacagccaccaccttctccctggagcagccgcgctgtgtcttcgatgggcttgccagcgccagcgataccgtctggctcgtggtggccttcagcaatgcctccaggggcttccagaacccggagacactggctgacattccggcctccccacagctgctgaccgatggccactacatgacgctgcccctgtctccggaccagctgccctgtggcgaccccatggcgggcagcggaggcgcccccgtgctgcgggtgggccatgaccacggctgccaccagcagcccttctgcaacgcgcccctccctggccctggaccctatcgggaagacccccggatccatcgacacctggccagggcggcgaagtggcagcatgatcgtcattacctccatcctctcttctctggccggcctcctactcttggccttcttggcagcctctaccatgcgcttctccagcctgtggtggccggagaggccccggagcagctgcggatcggctccttcatgggcaagcgctacatgacccaccacatcccacccagagaggccgccacactgccgaaacgtgcctgcttccccttcgccttctgccgtgattgtcagtttcttgagggctccccagccatgcttcctgtacagcctgcaaaactgtga

SEQ ID NO: 135566 - DNA, 3885 bp, Homo sapiens
  misc_feature (1)...(3885): n = a,t,c or g
aggacgcctgagagcttgaggccacacgaggctgtggagcggcgtgactcaaacgtggcgcgcatcagctcgcacacttccaaacctcgcgatagctactggccctgggcgagccgttgggattgcgcttgcgcacagcgtgtcttctggatcgccatacctaccctgtggtcctcatcttcctggcctcatagctcctcctcgccaagcatgtccaccccgttgcaaagagctgtgggagataccaagagggccttgtctgcatcttctagttcctctgccagtctaccctttgatgacagggactcaaaccatacctcagaggggaatggcgactctttgttagctgatgaagacactgactttgaagacagcttgaatcgcaatgtgaagaagagagcagcaaaacgaccaccgaaaacaacaccggtggcaaaacatccaaagaaagggtcccgagtggtacatcgtcatagccggaaacagtcagagccaccagccaatgatcttttcaatgctgtgaaagccgccaaaagtgacatgcagtctttggtagatgagtggctggatagctacaagcaagaccaggatgcaggatttctggagcttgttaactttttcatccaatcttgcggatgtaaaggcattgtgacccctgagatgttcaagaagatgtccaactcagagatcatccagcacctaacagagcagtttaatgaggactcgggggactaccctctcatagctccaggtccatcctggaagaagttccagggcagcttctgtgaatttgtgaggacattggtctgtcagtgccagtacagcctcctctatgatggcttccctatggacgacctcatctccctgctcactggcctctcagactcacaagtccgcgccttccgtcacactagcaccctggctgctatgaaactgatgacctccctggtaaaagttgccctccaactgagtgtgcaccaagataacaatcagcgtcagtatgaggctgaaagaaacaaggggccagggcagagggcacctgagcggctggagagcctgttggagaaacgcaaagagctccaagagcatcaagaggagattgaggggatgatgaatgccctcttcaggggtgtctttgttcatcggtacagggatgtccttcctgagatccgtgctatctgcattgaggaaattgggtgttggatgcaaagctacagcacgtctttcctcaccgacagctatttaaaatatattggttggactctgcatgataagcaccgagaagtccgcctgaagtgtgtgaaggccctgaaagggctgtacggtaaccgggacctgaccacacgcctggagctcttcaccagccgcttcaaggaccggatggtttccatggtcatggacagagagtacagtgtggcagtggaggccgtcagattactgatacttatacttaagaacatggaagggttgctgacggacgcggattgtgagagcgtctaccccgttgtgtatccttntaatngaggcntggcttctgccgcaggcgaatttctgtactggaaacttttctaccctgagtgcgagataagaacgatgggtggaagagagcaacgccagagcccaggcgcccagaggactttcttccagcttctgctgtccttctttgtggagagcgagctccatgaccacgctgcttacttagtanacagtctgtgggactgtgcaggggctcggctgaaggactgggagggtctgacaagcctgctgctggagaaggaccagaacctgggtgatgtgcaggagagcacactgatagaaatccttgtgtccagtgcccggcaagcttcagaggggcacccgcctgtgggccgggtcactgggaggaagggcttaacctctaaggagcgcaagacccaagccgatgacagggtgaagttgactgagcacctcatccccctgctgccccagctcctggccaagttctcagctgatgcagagaaggtcactcccctgctccagcttctcagctgctttgacctccacatctactgcactgggcgcttggagaagcacctggagctgttcctgcagcaactccaggaggtggtggtgaagcatgcagagccagcggtgcttgaggctggggcgcatgccctctacctgctctgtaatcccgaattcactttcttcagccgggcggactttgcccgcagccagctagtagatttgctgactgaccgcttccagcaggagcttgaagagctgttacagtcgtccttcctagatgaggatgaggtatataatctggcagccactctgaaacgcctctctgccttctacaacactcatgacctgactcgctgggagctctatgagccatgttgccaactcctgcagaaggctgtggacacaggagaggttcctcaccaggttatcctgccagccttgactcttgtctatttttccattctctggacactaacccacatttctaaatcagatgcttcccagaagcagctgtcgagtttgagggacagaatggtggccttctgtgaactctgccagagttgcctctcagatgtggatactgagatccaggagcaggcttttgtcttattaagtgatctacttctcatctttagccctcagatgatagttgggggccgtgatttccttaggccacttgtcttttttcctgaagctactctccagtctgagctagccagcttcctcatggaccacgtcttcatccagccgggagacctgggcagtggtgattcccaggaggatcatttacagatagagcggctacaccagcggcgccgcctcctagccgggttctgcaagctgttgctttatggggtgctggagatggatgcagcctcagatgtttctaaacactacaacaagttctacaatgactatggtgacattatcaaggaaacantaactagagcaaggcagattgaccgaagtcattgttcccgaatcctgctgntgagcctnaagcagctgtacacagaactgctgcaggagcatgggccccagggcctgaatgagcttcctgccttcatcgagatgagggacctggcccggaggtttgccttgagttttggaccccagcagctgcagaaccgtgacctcgtggtcatgctacacaaggaaggcatccagttctccttgtctgagcttcctccagctggctcctccaatcagcctccaaatctggcattcctggagctcctttcagagttttccccccgactcttccatcaggacaagcagcttttgctgtcctatctagaaaagtgcctgcagcatgtctcccaggcacctggccatccctggggcccagtcaccacctactgccactccctcagccctgtggagaacacagcagagaccagccctcaggtcctccccagctccaagaggaagcgcgttgaagggcctgccaagcctaacagagaggacgtctcctcgtcccaggaagaaagtctgcagctgaacagcatcccgcccacgcccaccctcacctccacagctgtgaagagcaggcagcccctgtgggggttgaaagagatggaggaagaagatggctcagagttggattttgcccaggggcagcccgtcgcaggcaccgagaggtcaaggttcttgggtccacaatatttccagactccacacaacccttcaggtcctggcctgggcaaccagctgatgcgactcagccttatggaagaggacgaggaagaagagttagaaatccaggatgagtcaaatgaagaacggcaggatacagacatgcaagcaagtagctactcttccaccagtgagcgcgggctggacctcttagattctacagagctggatattgaggatttc

SEQ ID NO: 135567 - DNA, 2172 bp, Homo sapiens
ctagatgatctgcacaaatggttcctctccttcttcctggtgtctgccattagcattggaataaagttcctgctgaaaatccacatctcccctgggtccggtgttctcctccaactcctccggggaaacccaagccctgcagctcatggaacagaagaactggaaccgaagtttctggaacaggactatctgagagcggttcttcctggccctcgggttcatgcaacggcataactggaaccgacgcttacggagcaagggtatgcgagagcgggtcttcccatacaggaagtagaagatgttttgtttggggtcctcgtcgtcctcctccatgtcattggccaggtagctcagtgttggggtgactgtactcatttggaaattgcgggatggaggggtattcgaaggtcggatgcaaatccgagaagccagaggaagggttttgggtgatgctcccaggatggtgggctccgatgggatcttgtccgacaccctcagacctttgtcccaggccaggaatcttttaatgacaggatcctcaagcagcctgttgaaggcctcgtggtgctcagggagcacgagcgacactcgccgtcgcttcagcttcatcttgaggccacacagcatctccgccacccagatctcctcaggctcaggggcgagcaccttccgtggctcctcctccaacgactcctcagatttgtcccaccactccatcttccttttccagcaaaaggacctatgcggggggctgggatctaccccaggggcaagctgactgttgaagtccttgtggtgctcagggaggatgggtgacactcgctgttgcttcagcttcatcttgagcccacacagcgtctccactacccaggtctcctcaggctcaggggcgagctcccggcccccttccttcgtcttagtcaatcctatcccacctcttcttccaccagtcccctcatctgatggtcccaacacttcatcatccaccacctcctggagggggtaccccgaggtgctccgctggggactctgctcattctgggggtgcggttgacggctggtcgtgatctttcccgtaatctgtcccctcttacggaacctagtctccgttctgtccatggccttcttctggacactggaggccatggagtggaacttccagatgaactcatggtggtcctcatttccgaactgttccagcacacactcggcttgggccagccgctcccgggttccctgggcctgctccagctgcatgtccagggaggccaccaggccacgggtgtgaccccctatcccctccaggcagcgggccttctcctcgtccaccgggtggcgcagctcctggaactcgcggcggatcacccagctgaagacatccgactcattgacgattcgggtccggtttttcaccagtttggcgatgagctcatccaccttcttctgctcctgcttcagctcagagaagagggctgcgagctcctctttgtcatgcagctccaccgattttgagaacgacagcgacttccgtcccagccgtgccaggtgctgcctcagattcaggttatgccgctcaattcgctgcgtatatcgcttgctgattacgtgcagctttcccttcaggcgggattcatacagcggccagccatccgtcatccatatcaccacgtcaaagggtgacagcaggctcataagacgccccagcgtcgccatagtgcgttcaccgaatacgtgcgcaacaaccgtcttccggagactgtcatacgcgtaaaacagccagcgctggcgcgatttagccccgacatagccccactgttcgtccatttccgcgcagacgatgacgtcactgcccggcgggttgagaagcggtgtaagtgaactgcagttgccatgttttacggcagtgagagcagagatagcgctgatgtccggcggtgcttttgccgttacgcaccaccccgtcagtagataataccagtccccagcagccgctcttctctgtatagggccataataggattccgaagaaaccttttctttcttcacgtgatccataattttgcccaaatcttcaacatcaacaatggaatttaggctctgatggtcctcaccaccaaactcttcttcactggagctctcgaagggttcttcctccaaaagacacagcagcat

SEQ ID NO: 135568 - DNA, 580 bp, Homo sapiens
tgtaggtcctatgcacaacagccagagttatctctgtgtatgtcaccttgctctccacaaagaaggacagcagaagctggaagaaagtcctctgggcacctgggctctggcgttgctctcttccacccatcgttcttatctcgcactcagggtagaaaagtctggtggaatggacacaaggaaagggctcagcacaggaggaaacaaggaggtgtaatcatgaccacagacggaggagatggcccaaggagatgataaaggaaaaggaggtgcagagctaaggaaagccccaaggagctgagagaggaaaagagacaccagagagacttccacggagatggggaggccttaagtagggcagcagcacatgtgggagagaaaccgagagggtggtgttaaagaaacgtaaaaggagccccactcacttccagtacagaaattcacccacagcagaggccaggcctcaattagaggcctacacaatggggtagacgctctcacagtccacgtccatcagcaccccttccatgttcctgcccacagaaaagcagaaagagtgtgtgaatagggacattgtctt

SEQ ID NO: 135569 - DNA, 1338 bp, Homo sapiens; identical to SEQ ID NO: 114554

SEQ ID NO: 135570 - DNA, 1488 bp, Homo sapiens
atgtgtccttggcggcctagactaggccgtcgctgtatggtgagccccagggaggcggatctgggcccccagaaggacacccgcctggatttgccccgtagcccggcccgggcccctcgggagcagaacagccttggtgaggtggacaggaggggacctcgcgagcagacgcgcgcgccagcgacagcagccccgccccggcctctcgggagccggggggcagaggctgcggagccccaggagggtctatcagccacagtctctgcatgtttccaagagcaacaggaaatgaacacattgcaggggccagtgtcattcaaagatgtggctgtggatttcacccaggaggagtggcggcaactggaccctgatgagaagatagcatacggggatgtgatgttggagaactacagccatctagtttctgtggggtatgattatcaccaagccaaacatcatcatggagtggaggtgaaggaagtggagcagggagaggagccgtggataatggaaggtgaatttccatgtcaacatagtccagtacagaacctgctaaggccatcaaacctattgatcggaagtcagtccatcagatttgctctgggccagtggtactgagtctaagcactgcagtgaaggagttagtagaaaacagtctggatgctggtgccactaatattgatctaaagcttaaggactatggagtggatctcattgaagtttcagacaatggatgtggggtagaagaagaaaactttgaaggcttaatctctttcagctctgaaacatcacacatgtaagattcaagagtttgccgacctaactgaagttgaaactttcggttttcagggggaagctctgagctcactgtgtgcactgagcgatgtcaccatttctacctgccacgcgtcggtgaaggttgggactcgactggtgtttgatcacgatgggaaaatcatccaggaaaccccctaccccccaccccagagggaccacagtcagcgtgaagcagttattttctacactacctgtgcgccataaggaatttcaaaggaatattaagaagacgtgcctgtttccccttcgccttctgccgtgattgtcagtttcctgaggcctcccccagccatgcttcctgtacagcctgcagaactgatggccgtataagaaaataaacaacttgctaaaactgctgaaactccctctgcttgtgagatttaaaaaaactggctgaaattggttggaaccaacatgtccaatggagtctgaatagaaagagcttgctgacatcacagcccgaatttccaccacatttcatactaactccccctgaatttgcatatgcaaaccacaagcaagcatgatcaaacagacaactgcgcgtgtccgaggactttccagatctcccctttccttccaccaatcacttactaatctgagaatccatcccctaataaaatcactaccttaaagcctgcacaggaagac

SEQ ID NO: 135571 - DNA, 906 bp, Homo sapiens
atgccggggtggggccgcgaatcggttgggacgcactctatccggcctaggggcacccgggccagcacccggccgccgcgcgtgcgcagtgggcggggtgccccgcgctcctacctgcaagtggccagtgccaagtgctgggccgccgctcctgccgtgcatgttggggagccagtacatgcaggtgggctccacacggagaggggcgcagacccggtgatagggctttacctggtacatcggcatggcgcaaccaaagcaagagagggtggcgcgtgccagacaccaacggtcggaaaccgccagacaccaacggtcggaaaccgccaagacaccaacgctcggaaaccgccagacaccaacgctcggaaaccgccagacaccaaggctcggaatacacgccagaccacgacggagggcgaccacctcccttctgaccctgctgcgggcgttcggaaaaaaaacgcagtccgtacagaacctgctaaggccatcaaacctattgatcggaagtcagtccatcagatttgctctgggccggtggtactgagtctaagcactgcggtgaagaagatagtaggaaacagtctggatgctggtgccactaatattgatctaaagcttaaggactatggaatggatctcattgaagtttcaggcaatggatgtggggtagaagaagaaaacttcgaaggcttaagttgggactcaactggtgtttttgatcacgatgggaaaatcatccagaaaaccccctacccccaccccagagggaccacagtcagcgtgaagcagttattttctacgctacctgtgcgccataaggaatttcaaaggaatattaagaagccagttggtgagaagtacatgcggtctgtggacacccaagcttgcagctgcatctga

SEQ ID NO: 135572 - DNA, 1322 bp, Homo sapiens; identical to SEQ ID NO: 114557

SEQ ID NO: 135573 - DNA, 2656 bp, Homo sapiens
cggagcgcctgtgggagccctgcgtggaactttcccagtccccgaggcggatcgggtgttgcatccatggagctgagctgagagctcgagtacagaacctgctaaggccatcaaacctattgatcagaagtcagtccatcagatttgctctgggcaggtggtactgagtctaagcactgcggtaaaggagttagtagaaaacagtctggatgctggtgccactaatattgatctaaagcttaaggactatggagtggatcttattgaagtttcagacaatggatgtggggtagaagaagaaaacttcgaaggcttaactctgaaacatcacacatctaagattcatgagtttgccgacctaactcaggttgaaacttttggctttcggggggaagctctgagctcactttgtgcactgagcgatgtcaccatttttacctgccacgcatcggcgaaggttggaactcgactgatgtttgatcacaatgggaaaattatccagaaaaccccctacccccgccccagagggaccacagtcagcgtgcagcagttattttccacactacctgtgcgccataaggaatttcaaaggaatattaagaaggagtatgccaaaatggtccaggtcttacatgcatactgtatcatttcagcaggcatccgtgtaagttgcaccaatcagcttggacaaggaaaacgacagcctgtggtatgcacaggtggaagccccagcataaaggaaaatatcggctctgtgtttgggcagaagcagttgcaaagcctcattccttttgttcagctgccccctagtgactccgtgtgtgaagagtacggtttgagctgttcggatgctctgcataatcttttttacatctcaggtttcatttcacaatgcacgcatggagttggaaggagttcaacagacagacagtttttctttatcaaccggcggccttgtgacccagcaaaggtctgcagactcgtgaatgaggtctaccacatgtataatcgacaccagtatccatttgttgttcttaacatttctgttgattcagaatgcgttgatatcaatgttactccagataaaaggcaaattttgctacaagaggaaaagcttttgttggcagttttaaagacctctttgataggaatgtttgatagtgatgtcaacaagctaaatgtcagtcagcagccactgctggatgttgaaggtaacttaataaaaatgcatgcagcggatttggaaaagcccatggtagaaaagcaggatcaatccccttcattaaggactggagaagaaaaaaaagacgtgtccatttccagactgcgagaggccttttctcttcgtcacacaacagagaacaagcctcacagcccaaagactccagaaccaagaaggagccctctaggacagaaaaggggtatgctgtcttctagcacttcaggtgccatctctgacaaaggcgtcctgagacctcagaaagaggcagtgagttccagtcacggacccagtgaccctacggacagagcggaggtggagaaggactcggggcacggcagcacttccgtggattctgaggggttcagcatcccagacacgggcagtcactgcagcagcgagtatgcggccagctccccaggggacaggggctcgcaggaacatgtggactctcaggagaaagcgcctgaaactgacgactctttttcagatgtggactgccattcaaaccaggaagataccggatgtaaatttcgagttttgcctcagccaactaatctcgcaaccccaaacacaaagcgttttaaaaaagaagaaattctttccagttctgacatttgtcaaaagttagtaaatactcaggacatgtcagcctctcaggttgatgtagctgtgaaaattaataagaaagttgtgcccctggacttttctatgagttctttagctaaacgaataaagcagttacatcatgaagcacagcaaagtgaaggggaacagaattacaggaagtttagggcaaagatttgtcctggagaaaatcaagcagccgaagatgaactaagaaaagagataagtaaaacgatgtttgcagaaatggaaatcattggtcagtttaacctgggatttataataaccaaactgaatgaggatatcttcatagtggaccagcatgccacggacgagaagtataacttcgagatgctgcagcagcacaccgtgctccaggggcagaggctcatagcacctcagactctcaacttaactgctgttaatgaagctgttctgatagaaaatctggaaatatttagaaagaatggctttgattttgttatcgatgaaaatgctccagtcactgaaagggctaaactgatttccttgccaactagtaaaaactggaccttcggaccccaggacgtcgatgaactgatcttcatgctgagcgacagccctggggtcatgtgccggccttcccgagtcaagcagatgtttgcctccagagcctgccggaagtcggtgatgattgggactgctcttaacacaagcgagatgaagaaactgatcacccacatgggggagatggaccacccctggaactgtccccatggaaggccaaccatgagacacatcgccaacctgggtgtcatttctcagaactga

SEQ ID NO: 135574 - DNA, 461 bp, Homo sapiens
tgagccgagattgtgccactgcactccagcctaggtaacagagcaggactccatctcagtcaatcaatcaatcaatcaatctcagcggttgaactacccttgacatggttcagctctgtatccacaacccaaaatgtcatgtcaaattgtaattcccagtgttgtggcagggaccctggtgggaggtgattggctcatgggggccgacttccccccttgctgttctcgtgacagtgagtgagccctcgtgggatctgcttgttgaaaagtgtgcagcacctcccgcttcactctctctgtctctcctgctccaacatggccagacgtgcctgcttccccttcgccttctgccgtgattgtcagtttcctgaggcctccccagccacgcttcctgtacagcctgcagaactgtgagtcaattaaacctcttttcttcataaattaaaaaaaaaaaaaaaaaa

SEQ ID NO: 135575 - DNA, 498 bp, Homo sapiens; identical to SEQ ID NO: 116928

SEQ ID NO: 135576 - DNA, 3421 bp, Homo sapiens
atggatgttggctgggacctcggtgaggactgctggcaagaacacctacacacggccttttcctttgactgctggccttgctcacagaatggtgaccgggttcccagtgtgaacccagtgggcgggggggccccgcgctcctacctgcaagtggccagtgccgagtgctgggccgccgctcctgccgtgcatgttggggagccagtacatgcaggtgggctccacacggagaggggcgccgaccccgtgatagggctttacctggtacatcggggtggcgcgtgccagacaccaacggtcggaaaccgccagacaccaacgctcggaatccacgccaggccacgacggagggcgactacctcccttctgaccctgctgctggcgttcggaaaaaacgcagtccgtacagaacctgctaaggccatcaaacctattgatcggaagtcagtccatcagatttgctctgggccggtggtaccgagtctaagcactgcggtgaaggagttagtagaaaacagtctggatgctggtgccactaatattgatctaaagcttaaggataaagaaagtggtctcaattaaggttcaagccaatgaatggggggtaaaagaagaaacctcgaaaggtttacttctgaaacatcacacatctaagattcaagagtttgccgacctacctcaggttgaaacttttggctttcggggggaagctctgagctcactttgtgcactgagtgatgtcaccatttctacctgccatgtatcggcgaaggttgggactcgactggtgtttgatcactatgggaaaatcatccagaaaaccccctacccccaccccagagggatgacagtcagtgtgaagcagttattttctacgctacctgtgcaccataaagaatttcaaaggaatattaagaagaaacgtgcctgcttccccttcgccttctgccgtgattgtcagtttcctgaggcctccccagccatgcttcctgtacagcctgcagaactggcccctctcctgcctggacggctctgctggtctccccgtcccctggagaagaacaaggccatgggtcggcccctgctgctgcccctactgcccttgctgctgccgccagcatttctgcagcctagtggctccacaggatctggtccaagctacctttatggggtcactcaaccaaaacacctctcagcctccatgggtggctctgtggaaatccccttctccttctattacccctgggagttagccacagctcccgacgtgagaatatcctggagacggggccacttccacaggcagtccttctacagcacaaggccgccttccattcacaaggattatgtgaaccggctctttctgaactggacagagggtcagaagagcggcttcctcaggatctccaacctgcagaagcaggaccagtctgtgtatttctgccgagttgagctggacacacggagctcagggaggcagcagtggcagtccatcgaggggaccaaactctccatcacccagggctccagcgcggcccaagcctccacgaggagcgccgccccctgctccacggcgcccggtcccatcgaccgcccaagggccgaggagtgcgggagcaaggcgcagaactggcaggcagctctacctgctgcctggtcccttggctgcaaaaggaagagggagtgtttggatgaatctgatgatgagccagagaaggagctcgcccctgagcctgaggagacctgggtggcagagacgctgtgtggcctcaagatgaaggcgaagcgacggcgagtgtcgctcgtgctccctgagtactacgaggccttcaacaggctgcttgcccctggggtagatcccagccccccacgtaggtcccttggctgcaaaaggaagagggagtgtttggatgaatctgatgatgagccagagaaggagctcgcccctgagcctgaggagacctgggtggcagagacgctgtgtggcctcaagatgaaggcgaagcgacggcgagtgtcgctcgtgctccctgagtactacgaggccttcaacaggctgcttgcccctggggtagatcccagccccccacgtaggtcccttggctgcaaaaggaagagggagtgtttggatgaatctgatgatgagccagagaaggagctcgcccctgagcctgaggagacctgggtggcagagacgctgtgtggcctcaagatgaaggcgaagcgacggcgagtgtcgctcgtgctccctgagtactacgaggccttcaacaggctgcttgcccctggggtagatcccagccccccgcgtaggtcccttggctgcaaaaggaagagggagtgtttggatgaatctgatgatgagccagagaaggagctcgcccctgagcctgaggagacctgggtggcggagacgctgtgtggcctcaagatgaaggcgaagcgacggcgagtgtcgctcgtgctccctgagtactacgaggccttcaacaggctgcttgaggatcctgtcattaaaagattcctggcctgggacaaagatctgagggtgtcagacaagatcccatcggagcccaccatcctgggagcatcacctaaaacccttcctccggcttctcggatttgcatccgaccttcgaatacccctccaccccgcaatttccacatgagcacagtcaccccaatgctgagctatctggccaatgacatggaggaggacgacgaggcccccaaacaaaagatcttctacttcctgtacgggaagacccactctcacatacccttgcgccctaagcattggttccagttatgccgtcccatgaacccgagggccaggaagaactgctctcagatagccttgttccagaagcgtcggttccagttcttctgttccatgcgctgcagggcttgggtttccccggaggagttggaggagaacaccggacccaggggagatgtggattttcagcaggaactttattccagtgctaatggcagacatcaggaaggaggagaggagccatttgtgcagatcatctagaagaacctggaccattcttgacagagctgaatacagtgatcacgttgtcctccaaggagcaggggtggggtggggtacttctaggagtcagttctgcaggcttttaaagggtataaaattttatagcatgaaagatgatattttagtcatacattaatggcccaaaaataatgtcccatctttttactcatcatccctactgtggactaagaattaagtacaagtgggtattatatccaggaaaaatgtcaaaaagcaacctcatcataatcttctaattcacacacaaaggcaacagccagaacaagaattacgctaagtatctgaaacttggtggagccaaagcctctgaagcacaaaacagtcccgtgcttttctgag

SEQ ID NO: 135577 - DNA, 1066 bp, Homo sapiens
gccttcaaatcctcctggactgcaagtccgtaagaaacaggacctccaggttccgccccagggaggttggaattcaccaatataaaaagggtggtggtgccgcaagaaagggtggaactggaaacgctcctggtttcttacttttctccaaggactcctagaaggaccccaccccccttcccccacccctgctcctaggaggacaacgtgatcactgtattcagctccatcaagaatggtccaggttcttctagatgatctgcacaaatggttcctctactcctgcctggtgtctgccattagcattggaataaagttcccgctgaaaatccacatctcccctgggtccggtgttctggaagcgagagagacaatgtcacacttcaaggaggcagctctctagacaggaaagttattcacgtcccatgtcaagtctagagttcagagcaattgagaaatgcaattttatctgctgcctttcattctataccctgcttctgaaccatcgtgttcaactgtgaaactcacactttggtgaccatgactccaaaactcacttaatacacccaaggtcagcccccagtgatctgcttcatagcagggactttgggtgggtctgcccagggagtagggcaccctcagagaatgtggctttggactttatcacagctggggccttttgtgtcacttaagatctaaacttgtaaccatgctagatgtgttttctaatgtgacaacatcacgaaccacgagtccagaagcctaatccttaatcctacctcctcatgatgaagtctcatgctctgtgctcaacgtggttagctgcacaagatgtaaaccaaagcttcactgaaccctcgacccaaatcagtaactcaagtgcgtcaatcataatgaacctccccaaactcagtatttatgattatttttgaggcagggtctcactctgtcgcccagactggagtgcagtggcaggatcagggctccgtgcagccccaaccttccaggctccagcaatcctcccgcctcagcctcctgagtagttgggattacaggtgcccgccac

SEQ ID NO: 135578 - DNA, 3321 bp, Homo sapiens
tcagtccagggggacttccacgggaaaccagcactgggtgtccagggccagtggcagaaccatgggcccttccttcatcgaaccaatacgtttgggtgggggcgagctcctctcgcctgatttttcaattgctccctgcacaatggcagaaattcctggagattctcctaggaggtggaaggtccctggccctggctccatgtggcacgtgctctggtccttctccagcagcaggcttgtcagaccctcccagtccttcagctgagtccctgcacagtcccacaggttgtctactaagtaagcagcgtggtcgtggagcttgctctccacaaagaaggacagcagaagctggaagaaagtcctctgggcacctgggctctggcgttgctctcttccacccatcgttcttatctcgcactcagggtagaaaagtacaatggggtagacgctctcacagtccacgtccatcagcaccccttccatgttcttaaggataagtatcagtaatctgacggcctccactgccacactgtactctctgtccatgatcatggaaaccatccagtccttgaagcagccagtgaagagctccaggcgtgcggtcaggtcccggttaccgtacagccctttcagagccttcacgcacttcacgcggacttctcggtgctgcatgtcacttttggcagctttcgcagcattgaaaagatcattggctggtggctctgacatgtttccggctatgacgatgtaccgcttgggaccctttctttggatatttggccaccggcgttgttttcagtggtcagttttgctgctttcttcttcacaccgccgattgaagctgtcctcaaatcattttcttgtcttcttgtctggtacatcggcatggcgcaaccaaagcaagagagggtggcgcgtgccagacaccaacggtcggaaaccgccagacaccaacggtcggaaaccgccagacaccaacgctcggaaaccgccagacaccaacgctcggaaaccgccagacaccaaggctcggaatacacgccagaccacgacggagggcgaccacctcccttctgaccctgctgcgggcgttcggaaaaaaaacgcagtccgtacagaacctgctaaggccatcaaacctattgatcggaagtcagtccatcagatttgctctgggcaggtggtactgagtctaagcactgcggtgaagaagatagtagaaaacagtctggatgctggtgccactaatattgatctaaagcttaaggactatggaatggatctcattgaagtttcaggcaatggatgtggggtagaagaagaaaactttaaaggcttaactctgaaacatcacacatctaagattcaagagtttgccgacctaactcgggttgaaacttttggctttcggggggaagctctgagctcactttgtgcactgagtgatgtcaccatttctacctgccacgtatcggcgaaggttgggactcgactggtgtttgatcacgatgggaaaatcatccagaaaaccccctacccccaccccagagggaccacagtcagcgtgaagcagttattttctacgctacctgtgcgccataaggaatttcaaaggaatattaagaaggctcagaggctcaggcaagagctacagatgctcatgaccgaatgtctcacctgggcccggaatggcagcagcaagcaccctctcagcctagcccagaagccagagttcctatttcatcagttgcaaagcagagacaatgccatctgcccgatagcagagcaaaaggcagaggggaagttctcttcaaggtacagaaaccacgactccgcagagaaccgcagagatggcagcatgaccagaccacggacagactggactctgaaacgggcatgtacagagaagaggagaccccaacacgcttcaagctttgagtggagaggacacagcctctgctgggacagggaacagagggatgcggagaccctgaagatgcttttggacagtggtctgagtgtccagaagaagaccaaggacagaacagagactaggtttggtgagatgggacagattttgggaaagatcatgatgagccatcaaccgcagccccaggaagagcagagcccccagcggagcacctcagggtaccccctccaggaggtggtggatgatgaagtgtcgggaccatcagcccctggggtagatcccagccccccacgtaggtcccttggctggaaaaggaagagggaatgtttggatgaatctgatgatgagccagagaaggagctcgcccctgagcctgaggagacctgggtggcggagacgctgtgtggcctcaagatgaaggcgaagcgacggcgagtgtcgctcgtgctccctgagtactacgaggccttcaacaggctgcttgaggatcctgtcattaaaagactcctggcctgggacaaagatctgagggtgtcggacaagatcccatcggagcccaccatcctgggagcatcaccgaaaacccttcctccggcttctcggatttgcatccgaccttcgaatacccctccaccccgcaatttccacatgagcacagtcaccccaatgctgagctatctggccaatgacatggaggaggacgatgaggcccccaaacaaaacatcttctacttcctgtacgaggagacccgctctcatatacccttgctccgtgagctttggttccagttatgccgttacatgaacccgagggccaggaagaactgctctcagatagccttgttccggaagtatcggttccacttcttttgttccatgcgctgcagggcttgggtttccctggaggagttggaagagaacaccggacccaggggagatgtggattttcagcaggaactttattccagtgctaatggcagacatcaggaaggaggagaggagccatttgtgcagatcatctagaagaacctggaccattcttgacagagctgaatacagtgatcacgttgtcctccaaggagcaggggtggggtgggggtacttctaggagtcagttttgcaggctgtacaggaagcatggctggggagccctcaagaagctgacaatcacggcagaaggcgaaggggaagcaggcacgtttctggccatggtggagcaggagagacagagagagtgaagcaggaggtgctgcatgcttctaaacaaccagatcccatgagcgctcactcacttcttaatattcctttgaaattccttatggcgcacaagtaggcgttaaaaaatacctggtttacgctgactggtggtcctctggtggtatagtggggct

SEQ ID NO: 135579 - DNA, 3045 bp, Homo sapiens
aagagcgggatgcttttaaaaaaagaaaaaagaagagaacaaaaaagtcctccagtaaatttaaaatatggtagtcaaggccgggcacgggggcccacacctgtaatcccagcactttgggaggccgaggcgggcggatcacccgaggtcaggagctcgagaccagcccggccaacacgggaaaaccccgtttttacgaaaaaaatacataaatcagccaggtgtgggggggtgcacccgcaatcccagctactcgggaggctgagacatgaaaattgcctgagcccgggaggcaaaggtttcggtgagccgagaactgcccactgcctccaccctgggtgacaaaatgagacttgctctccacaaagaaggacagcaaaagctggaagaaagtcctctgggcacctgggctttggcgttgctctcttccacccatcgttcttatctcgcactcagggtagaaaagtttccagtacagaaattcacccacagcagaggccaggcctcaattagaggcctacacaaatggggtagacgctctcacagtccacgtccatcagcaccccttccatgttctttaaggataagtatcagtaatcttgacggcctccactgccacactgtactctctgtccacgatcatggaaacccatccagtccttgaagcggccagtgaagagctccaggcgtgcggtcaggtcccggttaccgtacagccctttcagagccttcacgcacttcacgcggacttctcggtgcttatcatgcagagtccaaccaatatattttaaatagctgtcggtgaggaaagacgtgctgtagctttgcatccaacacccaatttcctcaatgcagatagcacggatctcaggaaggacatccctgcatgtcacttttggcagctttcgcagcattgaaaagatcattggctgggtggctctaactgtttccagctatgacgatgtaccacttgggaccctttctttggatgttttgccaccggcattgttttcagtggtcgttttgttgctttcttcttcacaccgcgattgaagctgtcctcaaatcattttcttgtcttcttgtctgcaagtggccagtgccgagtgctgggccgccgctcctgccgtgcatgttggggagccagtacatgcaggtgggctccacacggagaggggcgccgaccccgtgatagggctttacctggtacatcggggtggcgcgtgccagacaccaacgagtcggaagccgccagacaccaacgctcggaatccacgccaggccacgacggagggcgactacctcccttctgaccctgctgctggcgttcggaaaaaacgcagtccggtgtgctctgattggtccaggctctttgacgtcacggactcgacctttgacagagccactaggcgaaaaggagagacgggaagtattttttccgccccgcccggaaagggtggagcacaacgtcgaaagcagccgttgggagcccaggaggcggggcgcctgtgggagccgtggagggaactttcccaggtccccgaggcgggatccggtgttgcatccttggagcgagctgagagctcgagtacagaacctgctaaggccatcaaacctattgatcggaagtcagtccatcagatttgctctgggccggtggtaccgagtctaaggccgaatgcggtgaaggagttagtagaaaacagtctggatgctggtgcccactaatgttgatctaaagcttaaggactatggagtggatctcattgaagtttcaggcaaatggatgtggggtagaagaagaaaacttcgaaggccttaatctctttcagctctgaaacatcacacatctaagattcgagagtttgccgacctaactcgggttgaaacttttggctttcggggggaagcctctgagcctcactttgtgcactgagtgatgttaccatttctacctgccacgtatcggcgaagggttgggactctgactggtgtttttgatcacgatgggaaaatcatcccagaaaacccccctaacccccaccccagagggaccacagtcagcgtgaagcagttattttctacgctacctgtggcgccataaggaatttcaaaggaatattaagaagaaacgtgccttgcttccccttcgccttctgccgtgattgtcagtttcctgaggcctccccagccatgcttcctgtacagcctgcagaactgactcctagaaagtaccccaaccccacccctgctccttggaggacaacgtgatcactgtattcagctcttgtcaagaatggtccaggttcttctaagatgatctgcacaaatggttcctctccttcttcctgatgtctgccattagcattggaataaagttcctgctgaaaatccacatctcccctgggtccggtgttctggaagtgagagagacaatgtcacacctcaaggagacagctctctagacaggaaggttattcacgtcccatgtcaagtctagctagagttcagagcaattgagaagtgcgattttatctcctgcctttcattctataccctgcttctgaaccatcgtgttcaactgtgaaactcacgctttggtgaccctgactccaaaacttaatacacccaaggtcagccccagtgatctgcttcatagcaaggactttgggtgggtcttcccagggagtagggcacccttcagagaatgtggctttggacttcatcacagctggggccttttgtgtcacttcagatctaaacttgtaaccgtgctagatctgtttctaacgtgacaacatcacgaaccacgagtccagaagcctaatccataatcctccctcctcatgacaaagtctcatgctctgtgctcaacatggttagctgcacaagatgtaaaccaaagcttcactgaaccctcgacccagatcggtaactcaagtgcatcaatcataatgaacctccccgaactcagtatttatgattatttttgaggcagggtctcaatctgtcggccgggctgggagtgcagtggcaggatcaggg

SEQ ID NO: 135580 - DNA, 393 bp, Homo sapiens; identical to SEQ ID NO: 134480

SEQ ID NO: 135581 - DNA, 326 bp, Homo sapiens; identical to SEQ ID NO: 127127
  misc_feature (1)...(326): n = a,t,c or g

SEQ ID NO: 135582 - DNA, 197 bp, Homo sapiens
gtttcctaactctcctaagtatccttggaaagaataatgatctcctttgggaagactacgaggagaaactggctgaccaggctgtaaggaccatggaaatctatgttgcccagttcagtgaaattaaggtactcaatgtacagaatcaaggctgggttgtggatgacccatccaggttagagaacatattgggttaa

SEQ ID NO: 135583 - DNA, 513 bp, Homo sapiens
atgccgggagcccgcacttcctcctcgggggcctcagaaaaccacagggcgcggggccagggcggcggcccccagggagttggcaggatggcagagggcaaggcaggcggcgcggccggcctcttcgccaagcaggtgcagaagaagtttagcagggcccaggagaaggtgctgcagaaattggggaaagctgtagaaaccaaagatgaacgatttgaacaaagcgctagcaacttctaccaacaacaggcagaaggccacaagctgtacaaggacctgaagaacttccttagtgcagtcaaagtgatgcatgaaagttcaaaaagagtgtcagaaaccctgcaggagatctacagcagcgagtgggacggtcatgaggagctgaaggccatcgtatgggtaagagtggcttgagttttacaacttattggcacttactcctgtttgcatctcaacctcagcttagcttctctatccaagaaaataggaaaacaaaggagccagttcacactg

SEQ ID NO: 135584 - DNA, 2193 bp, Homo sapiens
ggcccccagggagttggcaggatggcagagggcaaggcaggcggcgcggccggcctcttcgccaagcaggtgcagaagaagtttagcagggcccaggagaaggtgctgcagaaattggggaaagctgtagaaaccaaagatgaacgatttgaacaaagcgctagcaacttctaccaacaacaggcagaaggccacaagctgtacaaggacctgaagaacttccttagtgcagtcaaagtgatgcatgaaagttcaaaaagagtgtcagaaaccctgcagtttatctactattagcgagtggtacggccatgaggagctgaaggccatcgtatggaataatgatctcctttgggaagactacgaggagaaacttgtctgaccaggctgtaaggaccatggaaatctatgttgcccagttcagtgaaattaaggagaagaattgccaagcggggtcggaaactcgtggactatgacagtgcccgacaccacctggaggcagtgcagaatgccaagaagaaagatgaggccaagactgccaaggcagaggaagagttcaacaaagcccagactgtgtttgaagatctgaaccaagaactactagaggagctgcctattctttataatagtcgtattggctgctatgtgaccatcttccaaaacatttccaacttgagggatgtcttctacagggaaatgagcaagctgaaccacaatctctacgaggtgatgagcaaactggagaagcaacattccaataaagtctttgtggtgaagggactgtcaagcagcagcaggcgctctttagtcatttctccgggagttcgaacagctacagtctccagtcctcttacctcacctactagtccctctacactttccttgaagagtgagagtgaatctgtctcagcaactgaagatctggcacctgatgcagcccaaggggaagacaattctgagatcaaggagctcttagaagaggaggaaatagagaaagaaggatctgaagcaggctcctctgaggaagatgaccctttaccagcctgcaatggccccgcccaggcccagccctctcctaccactgagagggccaagttcccaggaggaagttctccccagctccacaactccatcaccaggcggagccctgagcccttcagggcagctttcatcatctgccacagaagtagtcctccgaacccgcaccgcaagtgaaggatctgaggcgaccaaaaaagacagcctctatccagaggacctcagcaccccctaggaggcctcctccacccagagccactgcaagccccaggccctgctcagggaacataccttccagccctacagcctctggaggggggtcagcgcaccagccctagggcctccttggggactgggactgcaagtcctaggacctccctagagatctatacctaatccagaacgcaccagagaagccagtaagaactcctgaggccaaagaaaatgaaaacatccacaatcagaaccctgaagaactttgtacttcccccaccttaatgacatctcaggttgcttcagagcctggagaggcaaagaagatggaagacaaggaaaaggataataagcttatctcagctgactcctcggagggccaagaccagcttcaagtctccatggtaccagaaaacaacaacctcacagcacctgaacctcaagaagaggtatccacaagtgaaaatccacaactctgaagagaaactaccaagactcctcctgccccaaacctcgccagagaagctcttcaaccagaggggtataggtcagagggatataagagccagcatccatccctgggttctcagtaggaatgctggtgctgtctaaagacctggcattaatggaggccggaggagcagccttacgggagggatggagggaggcaggctggggagaagagaacattagacctcagggaaatatttaattctggttttagcattattagaataagactttatacattaactaaagtggagctttaatcactataaaaagcaaaagtatctatagacacagacacttgcctatacagagacataacccacacacactcagaggatagtgaacaaatctgtctttgacttacgaccccattttgcaagacttaaagccggaagaacacattttcagattgttaaataaagtctgattctgact

SEQ ID NO: 135585 - DNA, 1533 bp, Homo sapiens
atggcttgggcaagtaggctgggcctgctgctggcactgctgctgcccgtggtcggtgcctccacgccaggcaccgtggtccgactcaacaaggcagcattgagctacgtgtctgaaattgggaaagcccctctccagcgggccctgcaggtcactgtccctcatttcctggactggagtggagaggcgcttcagcccaccaggatccggattctgaatgtccatgtgccccgcctccacctgaaattcattgctggtttcggagtgcgcctgctggcagcagctaattttactttcaaggtctttcgcgccccagagcccctggagctgacgctgcctgtggaactgctggctgacacccgcgtgacccagagctccatcaggacccctgtggtcagcatctctgcctgctctttattctcgggccacgccaacgagtttgatggcagtaacagcacctcccacgcgctgctggtcctggtgcagaagcacattaaagctgtcttgagtaacaagctgtgcctgagcatctccaacctggtgcagggtgtcaatgtccacctgggcaccttaattggcctcaaccccgtgggtcctgagtcccagatccgctattccatggtcagtgtgcccactgtcaccagtgactacatttccctggaagtcaatgctgttctcttcctgctgggcaagcccatcatcctgcccacggatgccaccccttttgtgttgccaaggcatgtgggtaccgagggctccatggccaccgtgggcctctcccagcagctgtttgactctgcgctcctgctgctgcagaaggccggtgccctcaacctggacatcacagggcagctggtggcccgccagtttcccgagcccatgcctgtggtgctcaaggtgcggctgggtgccacacctgtggccatgctccacacaaacaacgccaccctgcggctgcagcccttcgtggaggtcctggccacagcctccaactcggctttccagtccctcttctccctggatgtggtagtgaacttgagactccagctctctgtgtccaaggtgaagcttcaggggaccacgtctgtgctgggggatgtccagctcacggtggcctcctccaacgtgggcttcattgatccctcaccccaaaagtccattggtcagttggacaaagaatgtcagctgtcccttcagccaggtgatgtgattgggtcatcggccaccatacatccacttgtcagccggcatgccatcaacatgccccccttctacccagccgtcagtctgtctgtctgtcggtcatctgcgtcaggcagtctgctggccagtccacctgttggtcacacaacagatcaggtgcgcacactgatgggcaccgtttttgagaagcccctgctggaccatctcaatgctctcttggccatgggaattgccctccctggtgtggtcaacctccactatgtcgcccctgagatctttgtctatgagggctacgtggtgatatccagtggactcttctaccagagctga

SEQ ID NO: 135586 - DNA, 1898 bp, Homo sapiens
gtagatcacgcgatccgactaaagagcctctgcatctgcctgcctggggcatttgagggctaccctggggctgagagttcaccggtctcaggaaccacctgagcccacagagggctgtggggagcggccagggcggccatggcttgagcaagtaagctgggcctgctgctgacactgctgctgcccgtggtcggtgcctccacgccaggcaccgtggtccgactcaacaaggcagcattgagctacgtgtctgaaattgggaaagcccctctccagcgggccctgcagggcactgtccctcatttcctggactggagtggagaggctgcttcagcccaccaggatccggattctgaatgtgcatgtgccccgcctccacctgaaattcctttgtgggtttcggaagggcgcctgctggcagcagctaattttactttcaaggtctttcgcgccccagagcccctggagctgacgctgcctgtggaactgctggcgtgacacccgcgtgacccagaggctccatcaggacccctgtggtcagcatctctgcctgctctttattctcagggccacgccaacgagtttgatggcagtaacagcacctcccacgcggtgctggtcctggtgcagaagcacattaaagctgtcttgagtaacaagctgtgcctgagcacctccagcctggtgcagggtgtcaatgcccacctgggcaccttaatctggcctcaaccccgtgggtacctgagtcccagatccgctattccatggttcagtgtgcccactgtcaccagtggactacattttccctgggaagttcaatgactgtttcttctttcctgctggggcaaagcccatcaatccctgccccaacggatgccaccccttttgtgttgccaaggcatgtgggtaccggagggctccatggccaccgtgggcctctcccagcagctgtttgactctgcgctcctgctgctgcagaaggccggtgccctcaacctggacatcacagggcagctgaggtcggatgacaacctgctgaacacctctgctctgggccggctcatcccggaggtggcccgccagtttcccgagcccatgcctgtggtgctcaaggtgcggctgggtgccacacctgtggcccatggctccacacaaacaacggccaccctgcggcctgccagccccttcgtgggagggtcctgggccacaggccctccaaactcggcttttcccagtccctcttctcccttcttgtggtagtgaacttgaggactccagcctctctgtgtccaaaggtgaagctttaagggaacacgtctgtgcttggtggatgtcccaactcacggtggcctcctccaacgtgggcttcattgatacagatcaggtgcgcacactgatgggcaccgtttttgagaagcccctgctggaccatctcaatggctctcttggccatggggaattgccctccctggtgtgggtcaacctccactatgtcgcccctgagatctttgtctatgagggctacgtggtgatatccagtggaactcttctaccagagcctgaggcaaagaccactgggaggccctgagagtggggccaagcttcgctgtcttcaggcgaaattttctcatttcaagccactggggaaactgaggcaaaaccatacttagtcatcaccaacaagctggactgcttagctgggctgttttatcttccctgagtgcctgggtctcccctccctcacttttgccctttcccttcctcctcctcttctcctccctcttccctcatctcccccctccttcctctgccccaccccagcggggagcagactgctcctccaggctgtatagacctgccctcttgcattaaacaacttctcttgagctgcaactttc

SEQ ID NO: 135587 - DNA, 5184 bp, Homo sapiens
ttaaaattgccttgcaatgatggcctgttttgtcagacttgatgacttggtgtcagatcctctcctttcatggtttatttcaatctggataatagccagaagtcctctctcatttgtcacttggctttggaaccccttgccggccttccactttaaagaaatcaaacagatggacaagtcaaggccccgccactcccttcctctctctgtgaggtggctgatctccagaactctatgctcagccttgcaggatatgtttttaaatgttttctgcatcctccactggcatctccggtgggtgtttccataaccagagagtcctttgtgctgcaggagtgatggtttgggcacacaggcagaaacaggagcttctgggaaggaggggttgctcaggaccaggcagctgttggaggcatcaagtgcctggccttgggcccttctctctgaattatcctcatgggaccttctggccagcgtgcccttgtgttcctggaacccacatcctcttagctttgcctctaagtgaatcaatgttgagtaatttctgctgctgagttcttcctcctccatgtttccctgctcatccagttctgccccactggtttcccaagacaagcctgcttcttcttctccttgcctgagccatctcttacctggtataaatactcctcctctttttctctccgacatgggtcttggactactactgcttttgactgccaaggcactatataaatcagagccttggagggtttcattaaataaacatttattaggaagcttgtctgagcagggtactacattcagacattcagttttctttctggccccagagtagataaggtagtggaattttccagccaaaactgggcttttaacctgtctagcaaaatgatcatcaacctgggctttaggacttcctggtggtccccctacattcccactttctgtccagcttagaatttcaggcaataggtacatatcgtacacctctgttagttcttccagagactggcgcaggggttggagatgggatgggaatagatgggggaaggaatgtggagcagggggcctggactccactccaagctctgctgaaggagggccttttccaaagtggatcctcctgaaggcagaggctcttcagcagcaacgagggcagtattgatgctgctgatttctcaggaccgctgataacagctttcatgtggaacttgggattaatatcaagcaagccatggattttgtctccactgaacttgggcatcatggacagtttccattccagcagttaagggcttcctgactttcaacagtggtgctgatcccagttctgaagagtggaacatcagagagcctcccctcctcagccacttgactctaaattgccccctctgaggtcaaggaacacaagatggttttggaaatgctgaacccgatacattataacatcaccagcatcgtgcctgaagccatgcctgctgccaccatgccagtcctgctcctcactggcctttttctcttggtgtggaattatgagggcacatcctcaataccaggtcctggctactgcatgggaattggacccctcatctcccacggcagattcctgtgggatggggatcgggcagtgcctgcaactactacaaccgggtgtatggagaattcatgcgagtctggatctctggagaggaaacactcattatcagcaagtcctcaagtatgttccacataatgaagcacaatcattacagctctcgattcggcagcaaacttgggctgcagtgcatcggtatgcatgagaaaggcatcatatttacacaacaatccagagctctggaaaacaactcgacccttcttatatgaaagdctctgtcacgccccggcctctgttcgtatggtcacagtctgtgctgaatccctcaaaacacatctggacaggttgggaggaggtgaccactgtaatcggggctatgtgggacgtgtttgacccttctgcgtcgtgttcatggctgggacacctctaacacggtcttccttgaggatccctttgggaggaaagtgctatcgtggttaaaatccaagggttattttgatgcatggcaagctctcctcatcaaaccagacatcttctttaagatttcttggctatacaaaaagtatgaggaagtctgtcaaggatttggaaagatgcccatagaagttctgatagcagaaaaaagacgcaggatttccacagaagagaaactggaagaatgtatggactttgccactgagttgattttagcagagaaacgtggtgacctgacaagagagaatgtgaaccagtgcatattggaaatgctgatcgcagctcctgacaccatgtctgtctctttgttcttcatgctatttctcattgcaaagcacccctaatgttgaagaggcaataataaaggaaatcccagactgttattggtgagagagacataaagattgatgatatacaaaaattaaaagtgatggaaaacttcatttatgagagcatgcggtaccagcctgtcgtggacttggtcatggcgcaaagcctttaggaaggatgatgttaatcgatgggctacccagtggaaaaaggggacaaacatttattcctggaatattgggaagggtgcacagactctagtttttccccaaacccaatgaatttactcttgaaaattttgcaaagaatgttccttataggtactttcagccatttggctttgggccccgtggctgtgcaggaaagtaccatcggccatggtgatgatgaaagccatcctcggttacacttctgaggacggattccacgtgaaggacattgccagggaccagtgtgtttgagagcatacaggaaggatacacgacttgtccttggcacccagatggagactaaaaacatgctgggaaatggatctttaccccaaggaaacttcagacaggtgtctgggaacacttaggaggaaggctggtcagtaccttactctgggagcattttctccatcagtttgttcacctacaaatcatcccatcctttgcccattagtgttcatccttcacagtggaacactcagtgggcccatggcatttttatagggcatacctcctatggggttgtcaaccaagcttaggtgctattgggtcatctgctcctggttcacaccagaggaaccaggggtacaagaggaaaaaggcaggagggccaaggagtttgaggggaggaaatagttcgggtggaaggaaaccgtattccattaaaggaccccgatttcccacccaaatgttgctttttgaggaagggatagggcctttcatttaacaaaatggtatgttctgggtttccccagtaggaggctctaactggccttcaacccaagggggatttttatggtcttgggggcaggaaacattcaagtttgatttagggaaaggaccaggggccaatgttcaggggtacccggggggccaaaccccacctgcctagtggtgaattaaaggtactttttaattttgttttctgtgggaggtgggaaaagcaacattcccatagtccttgggagaaaatgccctagaaaattccagcatttggaccccttgcctgtgaattaaagcccccaattaattccctgtttggccctacatatggatctgtctgtgggcaaaagtttaattcagagggaaatttcttttcccagtctgttcgatttatggcctcagcccacttggcctgtgcctacaattcattgtgttaccctgtaggattcagggtaatacaaactattatatgattcattcaaggtaatacaaacctaatttaggtaatagcctggggttaaggtattattaggggccctgtgtctgcatgtagaaaaaaaaaattcacatggatgcactttcaaatcacaataaaaatccttttgggcatgttccccattttttgcttagctccaattagtgtgggcctaacccaaggggataactgtaaaatgtgacattgatttgccccttactaccagcttccagtgaattgggggggagggaaaagtcccccaaccccaatggggcctcaaacctccctaagggggacccccctcctcatccccccttattccttcttcccttcggacatttttcttcccctcttttctttccccatggacccccaaaagccaaggggcaacaggatcagtaaaagaacgtgggtcaggagtagggaccccctgaaagtattttttaaacccccaccctcaaaatttaaccagttacccctgagagatttaaacattatcctagttccattgaatccattgtatgtgggtcatggggttaaatttgcacaccttgggaattcgcttttctaaaagggaaattcaaatggatgggagggaacttttccaaacaccactttacttgtgttatatagtccaatataactatctctactgaatgtcattgaaaaactaaaaaattaaacttatttacaaataggtaaatatttgtcattgaatccattgccatcccatttgactgttcttttcatccctactgtctaggtaattaaggctggagtataaggtgacagtgtaatctccctggaaagccgggagctactttctttcttttgtaatctatttccatccccatttccctgtcctgtctccctgtattcactcccaagctcagttctgaatagacattcctgctcagaggatactcccaactgatgcaggaaaccaaataaagaggtaggtatttccaaggaattccaaggaatgggacattagttaaaggattaaaacatttatttgagccttggaattatttggatcatctatatggccctaaaaatatatggactatgccctgtgtacctgaatacgtatgtagtcaggtcaagacaatcatcccaaataacttagacccctaaaagcaaggcccaggatttgcaatttaatgtgtcccaattaattcacttgaaaattagtaacactctgtttacgttgcctctggctggagctgcatggtggaagaagcccaactttggatccatgtacttcacccatccaatactcttgggacatttatgtgtatttaatctgtatatatgaagccaatgtctatgtctacacagtcaaagtgaaatgcatgtttgatatagctgtacat

SEQ ID NO: 135588 - DNA, 378 bp, Homo sapiens
cctcggagacgggtggcatggggagcagctagaacaatgcagattcatccataatccctttctgctgttcaccaccacccatgatccatctgtgtagtttctgaacagtcagcgattccaggttttaaatagtttgtaaattttcagtttctacacacaaaaatataagagctaagaaaccagacgagagattacctgaatgtggcacacagataagaaaagacacattgaaaagggtaagaaggacagttttacattacttgtgtcacacctccctcagtccctgagatcccagcatggagagagagactgttcacctgggggaaggaggggaagtgtacaccagacttaaaccctaacattgagcttcgcccagta

SEQ ID NO: 135589 - DNA, 477 bp, Homo sapiens
atgcagaagcaaataatttcagtcactgaggtagaatggtatccaaaatacaatagtaacatgaaggagtactggagtacccagaaccatcaatttgaacaactgtctacacacaaaaatataagagctaagaaaccagacgagagattacctgaatgtggcacacagataagaaaagacacattgaaaaggccctgccctctagatcggcccctgtggcctcacatcactgcagaacaagggtccaaacccagtacttggccagccccttgtgatccaaattctaggccaacatccacctacccagccttcacactggtccttgcagatccaaggttcaggctcactctagtagaccaggatgccaggccagcagcacctgtgtaccaaggctccaggacctaccctgctgacccagactccaggccagccccggtagactcaggctgcataatctctggacaggctgactggtga

SEQ ID NO: 135590 - DNA, 555 bp, Homo sapiens
  misc_feature (1)...(555): n = a,t,c or g
agaagactgcgccatggggctcagcgacggggaatggcagttggtgctgaacgtctgggggaaggtggaggctgacatcncaggccatgggcaggaagtcctcatcaggctctttaagggtcacccagagactctggagaagtttgacaagttcaagcacctgaagtcagaggacgagatgaaggcgcctccctgtgggatgtcatcaccctgggaaccgggagtggcccttggctcactgtgttctgcatggtttggatctgaattaattgtcctttcttctaaatcccaaccgaacttcttccaacctccaaactggctgtaaccccaaatccaagccattaactacacctgacagtagcaattgtctgattaatcactggccccttgaagacagcagaatgtccctttgcaatgaggaggagatctgggctgggcgggccagctggggaagcatttgactatctggaacttgtgtgtgcctcctcaggtatggcagtgactcacctggttttaataaaacaacctgcaacaaaaaaaaaaaaaaaaaacact

SEQ ID NO: 135591 - DNA, 1689 bp, Homo sapiens
  misc_feature (1)...(1689): n = a,t,c or g
gtgggctttttccataacagaaagaagagaatttcaagtctattacaattcatgtccttctagttcctggattggagatgcaagagcattttccccaccagatccaactgggctttaccccatctactcccaggatactcagaccttcagactctggctgaattataacactgactttcctgggtctccagcttgcaaatggcaggctatggaacttctcagcccacaatcacccttcagggtagaccgaggagagcacctccccttcctggtgaagggagcccgatacacgctggtgccggctggccaagaaggagccctggccgcttggctggaggctctgcgaggacagctggggagaaggggagctgtggtcagtatgatggatgctgaggggctggagaggagcagccctgactgcgccatggggctcagcgacggggaatggcagttggtgctgaacagtctgggggaaggtggaggctgacatcccaggccatgggcatggaagtcctcatcaggctctttaagggtcacccagagactctgggagaagtttgacaagttacaaggcacctgaagtcagaggacagagatgaaggcgtctgaggactttaaagaagcatatgtgccacactgtgctcacacccccttggtgtgcatatcttaagagagagaggggcatcattgaaggcagagatttaagccccttggcacaagttcgcattgccacccaagcaccaagattcccccgttgaaagttaccttggagtttcatcttccgggaattgcattcatccaggttcttgcagagcaagcaatcccgggggactttgggtgctgaatgcccaggggcgcaattgaaacaaaggccctgggagctgtttccggaagaacaatggccttccaacttacaaggaagctggggctttccaaggggctagggccctggccggcttccccacccccacccatcttgggcccccgggtttcaagaagagagcgggggtctgatctccgtgtagcccatataggagttttgctttctgaagtgtcctgcttttgtttagttagaggttgggcaggaaggaggctgaaggggctgggggctgagggtgttgaagtttggcttttgcatgcccccagcgatggcgccctcccctgtggggatgtcattcacccctgggaaaccgggaagtggcccttgggctcacttgtgttcttgcatgggtttggattttgaattaatatgtcctttcttcctaaatccccaaccgactttctttccaacctccaaacatggcatgtaaccccaaaatccaagccaattaactacacctgacaagtagcacattgtctgaattaatcacatggccccattgaagacagcagaattgtccctttgccaatgagggagggagatctgggcttgggcggggccagctgggggaaggcatttggactatcttggaacttgtgttgtgcctcctcgaggtatgggcagtgactcacctggttttaataaaacaacctgcaacataaaaaacaaaaacaaaaaaaaataannnnnnnnnnnnnnncctttaaaaaagatccctgggggggccaaactttccgggggggtggaagagtannnnnnnnnnnnnnagggggggcgaattcaaaccctggggggatttttttggaaaa

SEQ ID NO: 135592 - DNA, 484 bp, Homo sapiens
  misc_feature (1)...(484): n = a,t,c or g
cgccccccccgcccaccnatcgagaccctnatcgagatctctagncagngncgnggaattcccggnggtcctgtgtctcaatctgtctaacacaactatcaccaacaggacgatgcgactcctgccgaggcacttccacaacttacagaatcttagtttggcttattgcagacggttcacagacaaagccttacagtacctgaacttggggaatggatgccacaagctcatctatctggacctctctggctgcacccagatttcagtccaaggcttcaggtacattgcaaacagctgcactggaattatgcatcttaccattaatgacatgccaactctgacggacaactgtgtaaaagctttagttgaaaaatgctctcgtattacatcgctggttttcactggtgcaccgcatatctccgattgtactttcagagctctttctgcttgtaaactcagaaagatccgatttgaaggaaataaa

SEQ ID NO: 135593 - DNA, 975 bp, Homo sapiens
atgtcaccacctggcagagaacagggacttctccttaacctgctgcgccccagtggcctggacaatgctggaaagacaaccatcctgaagaagttcaatggggaggacatcgacaccatctccccaacgctgggcttcaacatcaagaccctggagcaccgaggattcaagctgaacatctgggatgtgggtggccagaagtccctgcggtcctactggcggaactactttgagagcaccgatggcctcatctgggtagtggacagcgcagaccgccagcgcatgcaggactgccagcgggagctccagagcctgctggtggaggaggtgggcagctcctaccctttgtgtacatggcggtttttctcctatctcagaattgaacaaatgtacaatctggttttataccgagacattcagttcccagatttttgcttcaattctaacactgactggagcaaaggtctcaaaacccatgccaggtttgggaacaccagtctccacgtggcccacactgacagtaccaataccaccaattttgtggacgtctggaggggcagaaccaagagcttggcctgcttgctccagctctcaagtctgacttgcatctacactgcgggcaagatgcggctgcaagaccgcatcgccacgttcttcttcccaaaaggcatgatgctcaccacggctgcgctgatgctcttcttcttacacctgggcatcttcatcagagacgtgcacaacttctgcatcacctaccactatgaccacatgagctttcactacacggtcgtcctgatgttctcccaggtgatcagcatctgctgggctgccatggggtcactctatgctgagatgacagaaaacaagtacgtctgcttctccgccctgaccatcctgatgctcaacggagccatgttcttcaaccgcctgtccttggagtttctggccatcgagtaccgggaggagcaccactga

SEQ ID NO: 135594 - DNA, 2124 bp, Homo sapiens
taaacatgaaccaagttttttttctttattttctaaaagcagtaaaaacatttatacaggacattatgaaagtctaatgccatcattaggacccaactgctgcaggttaccagtgtggaattgcatatcaccagatgctgttccacaaatggacaggcaagcaggatgatagcattctcttgattactataatagtcacaataatacttataattaaagaaagcttcctttagctggattaccctgcataaataggcaacacagttaatcaaatgtaaacatatgttttctaacaccagtatagaaaatacaaaactaattacaatcagaacaatttctaccttatcctactatagtaattattacgctttgcttctttgcggtgtgatctctatgttttttttcccattcatcatcttctgtgtcttggtcaaatgactcaggatatgctggtaacttgtctttggggcattcttcatagtaacttctaatatattttcccacagaccatcctttgtattcttcaggcgttttgcattccaggccattaaaatggacattgtagtggtgctttaaccagtagtagaggtagtgaatgttgtagtcacatctccaagggttatctctgagccacaagagtttcaaaaaatacaagtcttctaatacgccatagtcaaagttttgcagactgttgtttgataaatctaattcttctaaatgtgtgagccctaaaaaagcggcacagcaaaaatcattcacgtaagtctacttgcagggtttcatctcaaagacccaggatcgatgaattcaatgccattgctgctgaggtttaatttcttcagctcatgaacatcttcaaattccttgggtcgaagttggttgattttattgtatgacaagtcaagtttaacaatatctggagggatgttgtttggcacttttttcaactctttccttttgcagtccagtgtttgtatgggaaacacataattgtggcaaaaagttgagtccacctcaggcttgatgactgggggtctccctgacacttggggtttcgggtccaattgttccttttcttcttcattacacaactgttcagattttatctgccgcagttttttatttttttgttcttgtggactttcacacttggcgtagttcgccaaattccggttcctgggaatctgcaacattgaaataagcgtttctatctcacaagtacagtgccaggggttgtcataaagacgcaggtagctcaagagaggtgtgtaaatgaacacttcctccgtcaagactttgatctggttgtgctgcagtaagagggtggtgagtttgtttaaaccaaagaacgcctcactctcaattttagagatctcattctgctgcagatccaggcttttcagctttttaaacttggaaaacatgttgttcttcaatgtgcggatcttgtttcttgctagcagcatgtgcagcaaatcctgaggccaaccaggcagcacataaactaattttctttcttgacaatctaagtatttctcatggagatatgtgtacacgtcacacgggaagccctggtgcgtagcgtttgaaccgggttggagcctctccggcctccacccgcccggccatgattcactcggcttctcacactgccctgggcttgctttgcgcagctcagccgctttgcaaaagcagagcaagattacaatggtaaccacacgcatcctgacatccagctggccccaattacttcgtgttacagacggaacaatgaaaagtattcctttgaaatccaagtctgggtaatcttaactaatgcagttctggaacaatgagacccagctggggtacgtggagtccctaggctgaacttggggaatggatgccacaagctcatctatctggacctctctggctgcacccaggtttgtctttcagtcttctctttgctgcggtgtgtgaggaagttctccagagaatgggctgcattcagccctcacgttatactaatgctgtgcacggaccgcagcacacttttcagaggttttaaattacatggccccagctgctgaaattttccccaggatcgctattataggctcttggcttccttccactggagtg

SEQ ID NO: 135595 - DNA, 933 bp, Homo sapiens
  misc_feature (1)...(933): n = a,t,c or g
gagctttccttctgtcccccagcctttggactgtcaccaaacaagccattcgttcaccaaatacttattaagcgcctaccatgtgcctgacaagggagatgtaacgatagagtctctctctctgccacccaggccagagtgcagttgacgcagggcaggggagccccgaagtggagcatagnnnnnnnnnnnnnnnnnnnnnnnnnnnnnnnnnnnnnnnnnnnnnnnnnnnnnnnnnnnnnnggaaactcctggagggcagaggcatgcctgctatcttcatcattgcattaccaccacccaacactatcgggggacctgccctgataatcagtctacaggtgtatccagcagctccagagagacagcgaccagcgagaaggggccatgatgatggaggtggttttgtcaaaacgaaaatggggatatgtagggaaaagaaagagagatcagactcttacagactcttactgtgtctacataggaaagggaagacataagagactccatttgggaaaaagacctgtactttaaacaattgctttgctgagatgttgttaaatctgtagctttgccccagccactttgccccaaccactttgacccagtctgggagctcacaaaaacatgtgttgtatgaaatcaaggtttaaggcatgtagggctgtgcaggaccgtgccttgttaaccaaatgtttggcaagcagtattacttgggtaaaagtcatcaccctttctcttgtctcattaaaccggggggcacattgcactgtgggaaagccgcagggaccttctggcccttgaaagctggggtattatttcaaagttttccccccatgtggatagttctggaaatatgggccttcgtgggggatggaggaaagggcctggacgggttcccccttaggccccggaccaccccttaaaaaggtt

SEQ ID NO: 135596 - DNA, 2541 bp, Homo sapiens
  misc_feature (1)...(2541): n = a,t,c or g
cctggcgagactgagcttattggactgcttcactaaggtgtgtttttgtttgataacttattcccagtgcctgtgttgaccaggaggctttgggaataaaggtacataaaggtcttggagcctggatgagcctgtggtcaagagatggcaggcagtgtccttgaatttggaatgtgactcacactctgcctgtaggggaagaaaagnnnnnnnnnnnnnnnnnnnnnnnnnnnnnnnnnnggaagacagaatagactgcgttttgaaaaagacctgcactttaaacaattgctttgctgagatgttgttaatttgtagctttgccccagccactttgccccagccactttgacccaacctggagctcacaaaaacatgtgttgtatgaaatcaaggtttaaggaatctagggctgtgcaggacgtgccttgttaacaaaatgtttacaagtagtatacttggtaaaagtcatcgccattctctagtctcaataaaccaggggaacaatgcactgtggaaagccgcagggacctctgcccttgaaagcgggatattgtccaaggtttctccccatgtcatagcctgaaatatgggctcctgggatgagaaagacctgaccgtcccccagcctgacacccttaaagggtctgtgctgaggtggattagtaaaagaggaaagcctcttgcagttgagatagaggaagggcactgtctcctgtctgcccctgggaactgaatgtctcggtataaaaccccgattgtacatttgttcaattctgagataggagaaaaaccggccctatggtgggaggtgagacatgttttgcagcaatggctgccttggttaattcctttaactcccactgagatgtttggggtggagagaaacataaatctgggcttacgtgcacatcccagtcatagtacctccccttgaacttaattatgacatagattcttttgctcacatgtttttttgttgacctttccccttattatcaccctgctctcctgctacattcctttttgctgaaataatgaaaataataatcaataaaaactgagggaactcagaggccggtgccagtgcaggtccttggtgtgctgtgtgtcggtgcccctgggcccaactatcgtttctctatactttgtctctgtgtcttatttcttttctcagtctctcgtcccacctgaattccatcatcagtgattctataacattcagatacagaaagttccttcaattttttatgtctggaaagcacattcaaaccctgaaagtagaccaacttgccttgagactgtttgcctcctacttgatggaggtagagaggagagtcatgctgccaaagatccatcttgagggaagtgacaggctcaagttggtcgcttctgtttgcagtgtttttagtaggcactttgctagaaacaggagacaatggaccataacctctgtgagaaggaaccactatcactagcttgatgggaccaacatagtcatgtaaggccactggctggagagaagggccatgttgatcttgctttataaatggctggatgtctgtttggcccatcagttccctgtcttccattgggatcttcatttctaattccaattgagaaccaccagatccttctaagaagcatttcagcaaataaagcaggacaggagtttccaccattgcaatcctaagaggcagtttcacaacagctcttacacaatttgccaaattcaacacagtcagttgcttcaaaggtgaaagggatctgaggctgctgtctgttattcccttgcagtcagccatataaatgtgactgagatttggataattcttgtctataaatttgaaggatgcatcagtaacccttttatttccttcaaatcggatctttctgagtttacaagcagaaagagctctgaaagtacaatcggagatatgcggtgcaccagtgaaaaccagcgatgtaatacgagagcatttttcaactaaagcttttacacagttgtccgtcagagttggcatgtcattaatggtaagatgcataattccagtgcagctgtttgcaatgtacctgaagccttggactgaaattaattcttctgtttgatcagttctgctattaaaggactctgatgcattcttcaatataccaattgcatttttcagctccagaatttgtttctttttaattatttcaatctctttgttaaatttatctgatagaattctgaatttcttctctgtgttatcttgaattaatttgaatttcctcaacatagctattttgaattctctgtctgaaagattacatatctctgtttctccaggattgccccttggtgccttatttagttcatttggtaaggtcatgttttcctggatggtattgatgccagtattcttcggtgtctgggtgcagccagagaggtccagatagatgagcttgtggcatccattccccaagttcaggtactgtaagcctttgtctgtgaaccgtctgcaataagccaaactaagattctgtaagttgtggaagtgc

SEQ ID NO: 135597 - DNA, 385 bp, Homo sapiens
ccacaaaagccagggagggttggaacaggctctggaacaaacgaggtccctgtcccacatctccaccgggcttcaacatgacagtccccagccccattcccgtcaaatccattcgtgacgatctctgcccagggctggccatgctggaggaggccttggcggtgagctgtgttcaaattagccgggtaaggggcacagaatttcactgtaattggacgtgtttgttccaaggatgacgactacagcacatttctcatgttaatgtcatccaactacccatgtactgcaattactctgcatcgattttaaagccgacctagcacaatagcggcttctaatttgtaagcaaaaccgcagtggcataaatcaaactgatagaggcaac

SEQ ID NO: 135598 - DNA, 589 bp, Homo sapiens
atgacagtccccagccccattcccgtcaaatccattcgtgacgatctctgcccagggctggccatgctggaggaggccttggcgccaatggcccgggtgcagcagaatcgacgaagcttcacctctgcctgctccaaagaagcatctcggccaatatttgtgagctatgctgtgccgcagactatgcaggcaccgctggagagtcaggaaggtgacggtcctacttttatcttttactccatctctgccaaggccctcaggaaggcagccaggcccgctcctaccgccatcacccctggcccacccaggcttgcctgagaaggccaggtgagaagtcctggccatcatagccccaaccagatccctagctagtgtggccactgcaggccccaaaggtctcctcctggcggtccttttgagagctcagtaagaggtttcaaatctagcttaaacatgcagtctcaagggagcatcctaaaagcagagaacacgcctcctcctctttcctccctgacctcagctgcgatctcaaagcactcagagctgtgagctcactccccatctgtcctttgctccccccacgcgtccg

SEQ ID NO: 135599 - DNA, 1381 bp, Homo sapiens
cggacgtctgtaatctcagaggcttgtttgctgagggtgcctgcgcagctgcgacggctgctggttttgaaacatgaatctttcgctcgtcctggctgccttttgcttgggaatagcctccgctgttccaaaatttgaccaaaatttggatacaaagtggtaccagtggaaggcaacacacagaagattatatggcgcgaatgaagaaggatggaggagagcagtgtgggaaaagaatatgaaaatgattgaactgcacaatgggggaaatacagccaagggaaacattggcttcacaatggccatgaatgcttttggtgacatgaccaatgaagaattcaggcagatgatgggttgctttcgaaaccagaaattcaggaaggggaaagtgttccgtgagcctctgtttcttgatcttcccaaatctgtggattggagaaagaaaggctacgtgacgccagtgaagaatcagaaacagtgtggttcttgttgggcttttagtgcgactggtgctcttgaaggacagatgttccggaaaactgggaaacttgtctcactgagcgagcagaatctggtggactgttcgcgtcctcaaggcaatcagggctgcaatggtggcttcatggctagggccttccagtatgtcaaggagaacggaggcctggactctgaggaatcctatccatatgtagcagtggatgaaatctgtaagtacagacctgagaattctgttgctaatgacactggcttcacagtggtcgcacctggaaaggagaaggccctgatgaaagcagtcgcaactgtggggcccatctccgttgctatggatgcaggccattcgtccttccagttctacaaatcaggcattttatttttaaccagactgcatcagcaaaaacctggatcagggtgttctggtggttggctacgtctttgaaggagcaaattcgaataacagcaagtattggctcgtcaaaaacagctggggtccaggaatggggctcgaaatggctatgtaaaaatagccaaagaccaagaacaaccactgtggaatcgccacagcagccagctaccccaatgtgtgagctgatggatggtgaggaggaaggacttaaggacagcatgtctggggaaatttttatcttgaaactgaccaaacgcttattgtgtaagataaaccagttgaatcattgaggatccaagttgagattttaattctgtgacatttttacaagggtagaaatgttaccactactttaattattgttatacgcagctttatgatatcaaagactcattggttaattctaagacttttgaattttcattttttaaaaagatgtacaaaacagtttgaaataaattttaattcgtatataaa

SEQ ID NO: 135600 - DNA, 412 bp, Homo sapiens
cagcatcaacgacaacatacttatttggagtagtacacaaaactttgaactttaaggcaaactcatagggattgtacagtgtcaacacttgcttatgtgttgactgatcatctgcataaaatatgagctccgtggggaacacgaaaacaggaagatttccttccactaactctggttgtcttttttgttgatgcattggcactgaatcccccttgctgcagtttctgtttttacagtctcaaatctattttggacttttcttagattcagttaaaaactccaaagcattttggcaatctcggcaacaccggcttcctcggaaagcagctgcgactgctcctccgctccttagtcagcgtctctaggctgcactgcctgctgggataccggaggactcaaatgccaccactcg

SEQ ID NO: 135601 - DNA, 756 bp, Homo sapiens; identical to SEQ ID NO: 117156

SEQ ID NO: 135602 - DNA, 464 bp, Homo sapiens
atggccccaactaactgcaagggctctaggaaatgtggcagaccacatgaacagatgccccacccttatctccctttgctgactctcttttcggactcagcccgcctgcacccaggtgaaataaacagccgtgttcctcacacaaagcctgtttggtggtctcttcacacggacgcgtatgaaatttggtaccatgactcggattggggggacctcccttgggagatcaatcccctgtcctcctgctctttgctccatgagaaagatccacctacgacctcaggtcctcagaccaaccagcccaagaaacatctcaccaatttcaaatccagaaaagtagaacggactaaaggtcttttaaaaacacacctcaccaagctcagccaccaacttaaaaaggcctggacaatacttttaccactttcccttctcagaattcaggcctgtcctcggaatgctacaag

SEQ ID NO: 135603 - DNA, 756 bp, Homo sapiens; identical to SEQ ID NO: 117157

SEQ ID NO: 135604 - DNA, 1332 bp, Homo sapiens
ttaattgataggtcgattccgcacaatcccctgcccttgagacgtttcgcgatcggtttcgggggtatcttcgatccgcagatccttggcggcatgaaaacgcaacgctttcatcagggctctccttcgtgtgagttgatcacgagggttggcaagctcgcgtgccaatcgctgcgattttggatctcgcatgcgcacaagcatgttgctgctgagcgaggctatagcaagacagcttcgtcgtccccggtacaagactgaagtgcggtcataacccgaatacaggatgagtagtatgccccaacggcactcattccggatcgcgccccgttccggccgggacgcatcgatcgtctgacctgatgctgatatactcgcataactatggccagttgcttcatggtcaatatcattgctccggcattggccgatcggcaccgccacgggtgccgtatcgacaatggcgttacccgcggcgtcgtcacggtgccgacgagttgggtgatgggatggctttcggccaagggcatctatgcagtcggtctggataccgactgggaatttccgatcgtgggctgcatctatttcttcctcgccttcttttcgttcgccggcgagaactgggtcgtcgccgggcatgccgccgcagcgccaattcttcctcctgctgaccctcatcgccttcctgaccgtgtcaggcctatctaaaagttgtaccataactatagactccatgggctttctttgctcttctatgagagagacatcagggatgccttcgcacagagaaaaagccatgtggagacgcagcaagaagacagccacctgctcgaggtcatagaacgtatatagaactttcatttcttccttcatttctgtgcttttctctgaagtaattttcctcctgctttcatgggtgttaatcgtctgaaaattgtatgatactaatttatagcattttgatcctgtagatttatcaggatctatcaaggggcatgttgtaatctgcacccaggtgaaataaacagccatgttgctcacacaaagcctgtttggtggtctcttcacacggacacgcatgaaaattgccatctcaatacagctgttttcttctaccactggctcgctcttgaattctttcttaacccactgaggaggtgtcctgctgacactccctcccaggtcagtttcctgtgtctctctgtctgagggtgttgtctgtggactgtgctcatccatggggcaaaccagaagcacccgggagttaacaccctggaccatggcaattttcctcacttcccagtcccctctggccactgtaccagcatccat

SEQ ID NO: 135605 - DNA, 635 bp, Homo sapiens
gtgaaataaacagctttattgctcacacaaagcctgtttggtggtctcttcacacggacgcgcatgaaatttggtgccatgactcggatcgggggacctcccttgggagatcaatcccctgtcctcctgctctttgctctgtgagaaacatccgcctacgacctcaggtcctcagaccgaccagcccaagaaacatctcaccaatttcaaatccgagacaaaagagacatgttttatccatgaacccaaaactctggcgccggtcacggactgggaaggcagccttcccttggtgtttaatcattgcagggacggcctctctgatcattcagccacatttcaagggtgtcagaccatgcagggatgcctgccttggtccttcacccttagcggcaagtcccgctttcctggggcaggggcaagtacccctcaaccccttctccttcacccttagcggcaagtcccgctttcctggggcaggggcaacggcaagtcccgctttcctggggcaggggcaagtacccctcaaccctttctccttcaccctcagcggcaagtcccgctttcctggggcaggggcatgtacccctcaaccccttctccttcaccctcagcggcaagtcccgctttcctag

SEQ ID NO: 135606 - DNA, 1392 bp, Homo sapiens
atgggttgggttgctcgctggggcaaccggctaggctggaggaagggcgaggacggtgtcaccccaaacggggagtcaacttccctcccccagccgtcctcggtgcatccaccgaagagttgtcccgcgagccgcatccccggggcaaccgaactccgtcgggcaggcaccgagaggctcccgagcctgcctttgcccgggcaggagcgagctacacaccagctggccagaccctggggccgggcgccgcgggcggcggagccaccgccagtcacacacgggacaggaaaggatcccctccgtctcctccccgccgcccacccgcatcccggcgccgcggagccccgctgtcaatcacagagccaagctccggctgtgcggatgggtcattctttggcggggggctctcagccacgtaacttccacattttcccgaagtcagaggaagtgggtgacgggacggtgggggactctcacctcggcaacaccggcttcctcggaaagcagctgcgactgctcctccgctcctttgtcagcgtctctaggctgcactgcctgctgggataccggaggactcaaatgccacctctctccgccctagaggatgagccgcggctcgggggtgggaggcgagaggaagaagagctctctgtccatttctgtgactggctgctggatttgatccagcagcacagaaaccagcaacccagtgaagcccgcctgcacccaggtgaaataaacagccatgttgctcaaacaaagcctgtttggttgtctgttcacacggacgcgcatgaaatttggtgctgtgactcggatcgggggacctcccttaggagaccaatcccctgtcctcctgctctttgctccgtgacaaagatccacctacgacctcaagtcctcagacccaccagcccaagaaacatctcaccaatttcaaatccggctgctcctcaccaggccgagctaggtcccaatccttcctcagcctctgctcctccaccctataatctttttatcacctcccctcctcacacctggtctggcttaccgtttcgttccgtgactagccctccccctcctgcccagcaatttactcttaaaaaggtggctggagctaaaggcacagtcaagaccatcacggacatcgagcttcaggtaactctcacagtggaagcccgcctgcgcccaggtgaaataaacagccatgttgctcacacaaagcctgtttggtggtctcttcacacggacgcgcatgaaaatactgttactttccagaacaatcttaaggacaacacaggagcccttacatttccactgggatcctgcttatattgtaacaaggaggtgctggatatagctacgctcccatctccctacggcaaccactga

SEQ ID NO: 135607 - DNA, 1619 bp, Homo sapiens
gaccattcccgccagcatcaggttggtgtccctttgggacagagcttccagaagaaggagcaggcagccatctttgatattctgctgcctccactggtgacatcgtcagcccgcctacacccaggtgaaataaacagccatgttgctcacacaaagcctgtttggtggtctcttcacacggacacgcatgaaatttggtgctgtgattcggatcgggggacctcctttgggagatcaatcccctgtcctcctgttctttgctccatgagaaagatccacctacgacctcaggtcctcagaccgaccagcccaagaaacatctcaccaatttcaaatccagctgctcctcgccaggctgagctaggtcccaattcttcctcagcctctgctcctccaccctataatccttttatcacctcccctccctcacacctggtccggcttacagtttcgttccgtgacttagccctcccccacctgcccagcaatttactcttaaaaaggtggctggagctaaaggcatagtcaagaccgtcacggacgccgagcttcgggtaactctcacagtggaagcacgctttaaaaagattaaagcctgttatcacttgcctgctacagcatggctttttaaagcctataaactctccttacaattccctcattttacctgtcctaaaaccagacaagccttacaagttagttcaggatctgcgccttatcaaccaaattgttttgcctatccaccccatggtgagccaggcgtgaagcagcaaagagtgtgtgagcaagtggacgtggggaccagccatagcacacagccaggagcaccagcacaggcgcgagcaatgtgggaggctgtggctggaccaggtgtgcctcaagtggcttccgccttgggcgccagcatctggatgaggggcagactgacacctcacacggccagatactcctctgagacaaaacttccagaggaacgatcaggcagcaacattggctgttcagcaatactcgctgttctgcagcctctgcagctgatacccaggcaaacagggtctggagtggacctccggcaaactccaacaaacctgcagctgagggtcatgactgttagaaggaaaactaacaaacagaaaggacatccacaccaaaaccccatctgtacgtcaccatcatcaaagaccaaagaaatacaaactaccatcagagaatactataaacacctctatgcaaataaactagaaaatctaggagaaatggataaattcctcgacacatacaccctcccaagactaaaccaggaagaagttgaatctctgaatagaccaataacaggctctgaaattgaggcaataattaatagcttaccaaccaaaaaaagtccaggaccagacagattcacagccgaattctaccagaggtacaaggaggagctggtaccattccttctgaaactattccaatcaatacaaaaagagggaatcctctctaactcattttatgaggccagcatcaacctgataccaaagcctggcagagacacagcaaaaaaagagaattgtagaccaatatccccgatgaacatcaatgcaaaaatcctcaataaaatactggcaaactga

SEQ ID NO: 135608 - DNA, 2075 bp, Homo sapiens
actgaagatccaacacaagaagtaaaaatagccttaactgatgacattccaccattgtgatttgttttgccccaccctaactcttcaatgtacttttgtaatctcccccacccttaagaaggtactttgtaatctccccaacccttaagaaggttctttgtaattctccccacccttgagaatgtactttgtgagatccacccgctgccagcaaaacattgctcctaacttcaatgcctatcccaaaacctaaaagaactaatgataatcccaccaccctttgctgactccttttttggactcagcccgcctgcacccaggtgaaataaacggccttgttgctcacacaaagcctgtttggtggtctcttcacacggacgcgtatgcatgaaatttggtgccgcgcatgaaatttggtgccgtgactcggatcgggggagacctcccttgggagaatcaatcccctgtactcctgtgttctttgctccgtgagaaagatccacctacgacctcaggtcctcagaccgaccagcccaaggaacatctcaccaattttaaatcagacaaaggagacatgttttatccgtggacccaaaactccagtgccggtcacggactgggaaggcagccttcccttggtgtttaataactgcagggacacctctctgattatacacccacgtttcaagggtgtcagaccacgcagggatgcctgccttggtccttcacccttagcggcaagtcccgcttttctggggaaggggcaagctgctcctcgccaggccgagctaggtcccaattcttcctcagcctctgctcctccaccctataatctttttatcacctcccctcctcacacctggtccggcttacagtttcgttctgtgactagccctcccccacctgcccagcaatttactcttaaaaaggtggctggagccaaaggcatagtcaagcggctgaagactgacactgcccgatcgccttggaagacccctagaccatcacggacgccgagcttcagaaaagcagaacggactaaaggtcttttaaaaatacacctcaccaagctcagccaccaacttaaaaaggactggacaatacttttaccactttcccttctcagaattcaggcctgtcctcggaatgctacaagactggctactggccaattgggatatccttttatcagtcaaagctatgtcctggtcaatggatttcaaactgttgaggatctatgtgaagctgcagaccttcgagtgagtgttgcagaccttcgagtgagtgttacagctcttaaggtggcgcgtctggagttgttcgttcctcccggtgggctcgtggtctcgctggcttcagcagtgaagctgcagaccttcgcggtgttacagctcataaaagcaaaaagatgggactggggcaccttggagcagggggcggcgctcatcggggaggctcgggacgcacaggagcccacggagggggtgggaggctcaggcatggcgggctgcaggtccagagacctgccccgcgggaaggcagctaaggcccggcgagaaatcgagcgcagcgccgggctgacgatcaagaaggaaagatgcatacgaaatggatacagcaaagaaaaaatgaaactcatagttgtttctcatggcctccatgtaaatgacttgcagcataaactgacgcttttcaccaaggaaacatacacatacctagccagggattcagagaagcagaagcaggggtatctagcaggacttgaaggagcccatgccaacagggtgaaccagcagatcagtgacaacttagccatagtctttggacaaaagattcaaggccatctctccactactggacagctgcttatggcaggtcaagaaggaaagctgggccagcttcttttcctgggaatttcgggttggacaattcaactgaatgatgtttattgtctacagacacaatcaacaattgtccacataagatcagaagcagggaattccaatccacgagaatggctgccgcttttacaaggaatcagcagtaaagatgaaacacagccctttatgccttag

SEQ ID NO: 135609 - DNA, 1901 bp, Homo sapiens
atgcaaaatgctctggaaagtctcagcaatagaattgaacaagtagaagaaagaaattcagagcttgaagacaagttcttcgaattaacccaatccaacaaagacaaagaaaaaagaataagaaaatataaacaaagcctcaaagaagtatgggattatgttaaaggaccaaacctaagaataatcagtgttcctgaggaagaagagaattctaaaagcttggaaaacatatttggggaaataatcgaggaaaacttgcccagccttgctagacacctagacaaccaaatacaagaagcacaaagaacactttggaaattaattgcaaaaagatcattgcctaggcacattgtcatcaggttatccaaagttaagacgaaggaaagaatcttaagagctgtgagacagaagcaccaggtgactcacctaacatgtaaggagtcatataaacttaaagtaaaagggtggaaaaggcattttatgcaaatggacaccaaaaatgagcagggaattaaaaatgaaaatcacttgatcatctcaatagatgtagaaaaagcatctgacaaaatccagcaacgctttatgattaaaactctgagcaaaattggcatacaagggaaataccttaatgtaataaaagccatctatgacaaacccacagcaaacataacactgaatagggaaaagttgaaagcattccctctgagaagctgaaagcattccctctgagaactggaacaagacaaggatgcccactctcaccactcttcttcaacacagtactggaagtcctagccagagcaatcagacaagagaaagagataaaaggaatccaaattggtaaagaggaagtcaaactgtcactgtttgctgatgatatgattatgtaccttgaaaaccctaaagactcctccagaaagctcctagaatggataaaagaatccaacaaagtttctggatacaagactcatgtacacaaatcagtagccctgctgtataccaaacagtgaccaagctgagaatcaaatcaagaaccgaaacccttttgcaatagctgcaaaaaaaaaaaagaagaagaagaagaagaagaaaagaaactcaagaatatacctaaccaaggagtcaaaagacctctacaaagaaaactacaaaacactgctgaaagaaatcatagacaacatgaacaaatggaaacacatcccatgctcatggatgggtagaatcagcatcgtgaaaaaattgtagactgcaaaaagcgatctacaaattaaatgcaattctcatcaaaataccaccattattgttcacagaactagagaaaacaatcctaaaattcatatggaaatcaaacaagagcctgcatagccaaagtaatactaagcaaaaagaacaaatctggaggcatcacactacctgatttcaaactatactatactataagaaaaatcaactcaaaatggattaaggacttaaacctaagacctgaaactatacaaattctggaagataacattggaaaaacccttctggaaattggcttagggaaggatttcatgaccaagaacccaaaagcaaatgcaaaaaaaaaaacaaagataaatcgctgggacctaattaaactaaaaagcttttgcacagcaaaaggaacagtcagcagagtaaagagaacccacagagtaggagaaaatcttccccactatacatctatacatccaacaatctatacaatctatacatccgacaaaggactaatatccagaatctataatgaattcaaacaaatcgtaacacgaacaacctgcgttttcctacatccgccccaccctaaggcaaagacaacctcctacggggaccagcttcttggtgggaataggatgtttccacctcccattgtatattga

SEQ ID NO: 135610 - DNA, 484 bp, Homo sapiens
  misc_feature (1)...(484): n = a,t,c or g
aggcaagatatgcacaaacgcgcctcgggcccagcttggggctggcgggggaaggctntgtcttcaaaacctttgcccccagttgggtcagtagaaccaccagtgtcctccccttctacctcccaagctccactttggaaggctgangaagcgagaaggttttctanggcagatttggagccctggagattgagttcacagtgtatgttctgggggcgctggtgcagtcagcggtccagtctccagnctgcaggcgtgcacactggggtggacnatgggtggccccgcangtgtacacatttgggtgccccggcccctataccccagtgttctctttgatccagtcccgaaacagagggagccttgtgtacacgcctggcttgttcctctgagngcagccgtctcccgcagtcacgcacatcatgcgcggcgtanttctgctgcggcaggaggttcntcgccgccgctgaggaagcccnacnac

SEQ ID NO: 135611 - DNA, 1458 bp, Homo sapiens
atggaccgttttggtcaagtgttcaggaaacgcttgtgggactttaggtgtctgccagcctctccaagacacaacaacttctcttttaaaagagacatgagccaccagccttggcagaaccacagaccagagaaggagcagacatcagggaacttgagggccacagtgttccgagggacagaagccactggccacagcagtaggcagtctggtagtctggttcccagggagcagagtgagggtcagaaccatttcccaactgggggcagccattgtgaggcttcccaccaggtgcctcggcctgtgtctccaaaaacacggatgctgtcccacactgagaaatggcggcattgctttgtgctgcgagctgacctggagaaaccggcagagtacagctccatggtgcggcccatctgctgccggacgcctcccatgtcttccctgccgcaaggccatctgggtcacgggctgggacacacccagtatggaggcactggcgcgctgatcctgcaaaagggtgagatccgcgtcatcaaccagaccacctgcgagaacctcctgccgcagcagatcacgccgcgcatgatgtgcgtgggcttcctcagcggcggcgtggactcctgccaggtgcccccggggcaggagggcggcagacagttccctctcaaagaaaccaacaacagaaaagggaggttgcctaagcgtttaaggccacacacttggtgttgctacagcttagaatgcagcagctattctctacggtgcacagaggacacctggactgaagatcagaaagtgaatggcttggaggaaggcgtggagttcctgccagtcaacaacgtcaagaaggtggaaaagcatggcccggggcgctgggtggtgctggcagccgtgctgatcggcctcctcttggtcttgctggggatcggcttcctggtgtggcatttgcagtaccgggacgtgcgtgtccagaaggtcttcaatggctacatgaggatcacaaatgagaattttgtggatgcctacgagaactccaactccactgagtttgtaagcctggccagcaaggtgaaggacgcgctgaagctgctgtacagcggagtcccattcctgggcccctaccacaaggagtcggctgtgacggccttcagcgagggcagcgtcatcgcctactactggtctgagttcagcatcccgcagcacctggtggaggaggccgagcgcgtcatggccgaggagcgcgtagtcatgctgccccgcggcgcgcccctgaagtcctttgtggtcacctcagtggtggctttccccacggactccaaaacagtacagaggacccaggacacccctaccccgctcatgcccgctgccagtgctgcgggggacgccgactcagtgctgagcctcaccttccgcagctttgaccttgcgtcctgcgacgagccggcagcgacctggtga

SEQ ID NO: 135612 - DNA, 387 bp, Homo sapiens
  misc_feature (1)...(387): n = a,t,c or g
ccggcagagtacagctccatggtgcggcccatctgcctgccggacgcctcccatgtcttccctgccggcaaggccatctgggtcacgggctggggacacacccagtatggaggcactggcgcgctgatcctgcaaaagggtgagatccgcgtcatcaaccagaccacctgcgagaacctcctgccgcagcagatcacgccgcgcatgatgtgcgtgggcttcctcagcggcggcgtggacnnnnnnnnnnnnnnnnnnnnnnnnnnnnngtccagcgtggaggcggatgggcggatcttccangccggtgtggtgagctggggagacggctgcgctcagaggaacaagccaggcgtgtacacaaggctccctctgtttcaggactgg

SEQ ID NO: 135613 - DNA, 604 bp, Homo sapiens
agggcagcgtcatcgcctactactggtctgagttcagcatcccgcagcacctggtggaggaggccgagcgcgtcatggccgaggagcgcgtattcatgctgcccccgcgggcgcgctccctgaagtcctttgtggtcacctcagtggtggctttccgtgagtccgagggccaggggtgggcgtgggactggccacccttccatggagtggggctgggccctggaccattgcaggggaccggcactcccagggcccagtgccccagagagaagactacgtgctggccgggcacctccctttagataataaggaagcaggaataaggaaatggattgtatcaggaaatgctttattctccttcttattcttcagccacggactccaaaacagtacagaggacccaggacaacagctgcagctttggcctgcacgcccgcggtgtggagctgatgcgcttcaccacgcccggcttccctgacagcccctaccccgctcatgcccgctgccagtgggccctgcggggggacgccgactcagtgctgagcctcaccttccgcagctttgaccttgcgtcctgcgacgaagcgcggagcgacctggtgac

SEQ ID NO: 135614 - DNA, 2086 bp, Homo sapiens
gctcagtagatgaaggcgtttctgagggcttgcctacacttcaaagcacgtctagcactaatgctcctccggatgatgatgatcgattggaaaatgttcagtatccctaccaactctacattgctccttccaccagcagtacagagcgaccaagtccaaatggtcccgacagaccttttcagtgtccaacctgcggggtgcgattcacccgtattcagaacctaaagcagcacatgctcatccactcaggaattaaaccatttcagtgtgaccgctgtgggaaaaagttcaccagggcttactcgctaaagatgcatcgcctaaagcatgaaggtaaacgctgtttccggtgccagatatgtagtgccactttcacttccttcggggaatataaacaccacatgagggtttcccggcacattatccgcaagcctcggatttacgagtgcaaaacatgtggcgccatgttcaccaactctggaaatttaatcgtgcacctgaggagtctgaaccatgaagcatcagagctagcaaactacttccagagcaggtactcagaccccacgcagtggacggccttcctgggcttgcacgaccagagccagcgcagcgcccctggggtgcaggagcgcaggctcaagcgcatcatctcccaccccttcttcaatgacttcaccttcgactatgacatcgcgctgctggagctggagaaaccggcagagtacagctccatggtgcggcccatctgcctgccaggacgcctcccatgtcttccctgccggcaaggccatctgggtcacgggctggggacacacccagtatggaggcactggcgcgctgatcctgcaaaagggtgagatccgcgtcatcaaccagaccacctgcgagaacctcctgccgcagcagattcaccgccgcgcattgatgtgcgtgggcttcctcagcggcggcgtggactcctgccaggtggcccccggggcaaggagggcggcagggtgattccgggggacccctgtccagcgtggaggcggatgggcggatcttccaggccggtgtggtgagctggggagacggctgcgctcagaggaacaagccaggcgtgtacacaaggctccctctgtttcgggactggatcaaagagaacactgggaaagtgaatggcttggaggaaggcgtggagttcctgccagtcaacaacgtcaagaaggtggaaaagcatggcccggggcgctgggtggtgctggcagccgtgctgatcggcctcctcttggtcttgctggggatcggcttcctggtgtggcatttgcagtaccgggacgtgcgtgtccagaaggtcttcaatggctacatgaggatcacaaatgagaattttgtggatgcctacgagaactccaactccactgagtttgtaagcctggccagcaaggtgaaggacgcgctgctgtacagcggagtcccattcctgggcccctaccacaaggagtcggctgtgacagccttcatgtgggtgtggagagaaggctcagtgggatgcaccccagactggctgggagtaggatcggggtacagtgtgtggggcacgaaacgagagatggtgctggaggtcctggactggagagccaaggagggtcctcgctgtgtcctcctcgagggcagcgtcatcgcctactactggtctgagttcagcatcccgcagcacctggtggaggaggccgagcgcgtcatggccgaggagcgcgtagtcatgctgcccccgcgggcgcgctccctgaagtcctttgtggtcacctcagtggtggctttccccacggactccaaaacagtacagaggacccaggacaacagctgcagctttggcctgcacgcccgcggtgtggagctgatgcgcttcaccacgcccggcttccctgacagcccctaccccgctcatgcccgctgccagtgggccctgcggggggacgccgactcagtgctgagcctcaccttccgcagctttgaccttgcgtcctgcgacgagcgcggcagcgacctggtgacggtgtacaacaccctgagccccatggagccccacgccctggtgcagtga

SEQ ID NO: 135615 - DNA, 3413 bp, Homo sapiens
  misc_feature (1)...(3413): n = a,t,c or g
gcactggcgcgctgatcctgcaaaagggtgagatccgcgtcatcaaccagaccacctgcgagaacctcctgccgcagcagatcacgccgcgcatgatgtgcgtgggcttcctcagcggcggcgtggactcctgccaggtgcccccggggcaggagggcggcagacagttccctctcaaagaaaccaacaacagaaaagggaggttgcctaagcgtttaaggccacacacttggtgttgctacagcttagaatgcagcagctattctctacggtgcacagaggacacctggactgaagatcagaaagtgaatggcttggaggaaggcgtggagttcctgccagtcaacaacgtcaagaaggtggaaaagcatggcccggggcgctgggtggtgctggcagccgtgctgatcggcctcctcttggtcttgctggggatcggcttcctggtgtggcatttgcagtaccgggacgtgcgtgtccagaaggtcttcaatggctacatgaggatcacaaatgagaattttgtggatgcctacgagaactccaactccactgagtttgtaagcctggccagcaaggtgaaggacgcgctgaagctgctgtacagcggagtcccattcctgggcccctaccacaaggagtcggctgtgacggccttcagcgagggcagcgtcatcgcctactactggtctgagttcagcatcccgcagcacctggtggaggaggccgagcgcgtcatggccgaggagcgcgtagtcatgctgcccccgcgggcgcgctccctgaagtcctttgtggtcacctcagtggtggctttccccacggactccaaaacagtacagaggacccaggacaacagttgcagctttggcctgcacgcccgcggtgtggagctgatgcgcttcaccacgcccgggttccctgacaggccctaccccgctcatgcccgctgccagagggccctgcggggggacgccgactcagtgctgagcctcaccttccgcagctttgaccttgcgtcctgcgacgagcgcggcagacacctggttgacggtgtacaacacccatgagccccatggagccccacgcccctggtgcagttgtgtggcacctaccctccctcctacaacctgaccttccactccctcccacgaacgtcctgctcatcacactgataaccaacactgagcggcggcatcccgggctttgaggccaccttcttccagctgcctaggatgagcagctgtggaggccgcttacgtaaagcccaggggacattcaacagcccctactacccaggccactacccaccccaacattgaacttncacatggaacattgaggtgcccaacaaccagcatgtgaaggtgcgcttcaaattcttctacctgctggagcccggcgtgcctgcgggcacgtgccccaaggactacgtggagatcaatggggagaaatactgcggagagaggtcccagttcgtcgtcaccagcaacagcaacaagatcacagttcgcttccactcagatcagtcctacaccgacaccggcttcttagctgaatacctctcctacgactccagtgacccatgcccggggcagttcacgtgcccgcacggggcggttgtaatccggaaggagctgcgctgtgaatggctgggccgactgcaccgaccacagcgatgagctcaactgcagttgcgacgccggccaccagttcacgtgcaagaacaagttctgcaagcccctcttctgggtctgcgacagtgtgaacgagtgcggagacaacagcgacgagcagggttgcatttgtccggacccagaccttcaggtgttccaatgggaagtgcctctcgaaaagccagcagtgcaatgggaaggacgactgtggggacgggtccgacgaggcctcctgccccaaggtgaacgtcgtcacttgtaccaaacacacctaccgctgcctcaatgggctctgcttgagcaagggcaaccctgagtgtgacgggaaggaggactgtagcgacggctcagatgagaaggactgcgactgtgggctgcggtcattcacgagacaggctcgtgttgttgggggcacggatgcggatgagggcgagtggccctgggcaggtaaagcctgcatgctctggggccagggccacatctggcggtgcttccctcatctctcccaactggctggtctctgccgcacactgcttcatcgatgacagaagattcatgtacctccaaccccacgcagtgaaccgggccttcctgggctttgcacgaccagaagccagcgcaggcccccttggggttgcaggaagcgcaggctcaaagcgcatcatcttcccaccccttcttcaatgacttcaccttcgactatgacatcgcgctgctggagctggagaaaccggcagagtacagctccatggtgcggcccatctgcctgccggacgcctcccatgtcttccctgccggcaaggccattctgggtcacgggctggggacacacccagtatggaggcactggcgcgctgatcctgcaaaagggtgagatccgcgtcatcaaccagaccacctgcgagaacctcctggccgcagcagatcacgccgcgcatgatgtgcgtgggcttcctcagcggcggcgtggactcctgccagggtgattccgggggacccctgtccagcgtggaggcggatgggcggatcttccaggccgggtgtggtgagctgggaagccggctgcgttcagaggaacaagccagggcgtgtacacaaggctccctctgtttcgggactggatcaaagagaacactggggtataggggccggggccacccaagatgtgtacacctgcggggccacccagtcgtccaccccagtgtgcacgccgtgcaggctggagactcgcgcaccgctgacctgcaccagcgcccccagaacatacactgtgaactcaatctcccaggggctccaaatctgcccttagaaaaaccctcttcgcttcctcaagcctcccaaaagtggaagctggggaggttagaaggggaggacaactggtgggttctacttgacccaactgggggcaaaggtttgaagacaccagcctccccgcgccagcccccaagcttgggcccgaggcggcgttttgtgcatatctgccttcccctgtcttttaaggagcagcgggaacggagttttgggagcttcttcagtgaaggtggtggggctgcccggatctgggctgtggggcccttgggccacgcttcttgaggaagcccaggctcggaggaccctggaaaacagacgggtctgagactgaaattgttttaccagctcccagggtggacttcagtgtgtgtatttgtgtaaatgagtaaaacattttatttctttttaaaaaaaaaaaaaaaaaaa

SEQ ID NO: 135616 - DNA, 465 bp, Homo sapiens
ttcccgggtcgacgatttcgtgtcgggcagcagcggggctgtctatcccggctgaggacccgcggccagtgcgggtggctggctttgccattagcgggggcctttcctgaggacggcgtacggagtgtgggttactcctggatggagcacctctgatagcaatccacaaagccaggtattacaagaggaaagatggcttagccctggggcctggaccatttgtgactgctttagagtatgccacagataccaaagccacagtcgtggggaaaccagagaagacgttctttttggaagcattgcggggcactggctgtgaacctgaggaggctgtcatgataggagatgattgcagggatgatgttggtggggctcaagatgtcggcatgctgggcatcttagtaaagactgggaaatatcgagcatcagatgaagaaaaaattaatccacctccttacttaactt

SEQ ID NO: 135617 - DNA, 197 bp, Homo sapiens
gttactcctggatggagcacctctgatagcaatccacaaagccaggtattacaagaggaaagatggcttagccctggggcctggaccatttgtgactgctttagagtatgccacagataccaaagccacagtcgattgcagggatgatgttggtggggctcaagatgtcggcatgctgggcatcttagtaaagactg

SEQ ID NO: 135618 - DNA, 408 bp, Homo sapiens
  misc_feature (1)...(408): n = a,t,c or g
cccacgcgtccggtatcctgtgatttttgtagcccttgatatatccataatgttccctccttgcttctctctcccagccctccacatacataacccaacctttctctgagcgggacacaattcacaattctttataggtattactttctttaatcctcttatcaaccattagagttgtgttattatttctacattagcannnnnnnnnnnnnnnnnnnnnnnnnnnnnnnnnnnnnnnnnnnnnnnnnnnnnnnnnnnnnagatgtatacccaggctataaatttatacaactcctttgttcttgtccttaaccactgcactgttgcattgtaaggaataatttagggctggtaataggagatgcaaagtagagaggacaattaagaagttgtttaaatagtctagag

SEQ ID NO: 135619 - DNA, 370 bp, Homo sapiens
  misc_feature (1)...(370): n = a,t,c or g
ctaagtatgcaagttntgaataatatgccataatatatatttagatgtgttttctcaaatcctcaagttatactaatgctttagaactttgcatcatgtgtatcctgtgatttttgtagcccttgatatatccataatgttccctccttgcttctctctcccagccctccacatacataacccaacctttctctgagcgggacacaattcacaattctttataggtattactttctttaatcctcttatcaaccattagagttgtgttattatttctacattagcannnnnnnnnnnnnnnnnnnnnnnnnnnnnnnnnnnnnnnnnnnnnnnnnnnnnnnnnnnnnagatgtatacccaggcatgtatt

SEQ ID NO: 135620 - DNA, 443 bp, Homo sapiens
  misc_feature (1)...(443): n = a,t,c or g
cgcccacgcgtccgcccacgcgtccggcagcagcggggctgtctatcccggctgaggacccgcggccagggcgggtggctggctttgccattagcgggggcctttcctgaggacggcgtacggagtgtggggaatgaaggatggcagcatgccgtgcattaaaagctgttttggtagatctcagtggcacacttcacattgaagatgcagctgtgccaggcgcacaggaagctcttaaaaggcaagctatcctccaggttcagctgacaaatatgtttgttacgtggtgcttctgtaatcattaggtttgtgaccaatacaaccaaagagagcaagcaagacctgttagaaaggttgagaaaattggaatttgatatctctgaagatgaaatattcacatctctgactgcagccagaagtttactagagcgganacaagtcag

SEQ ID NO: 135621 - DNA, 2311 bp, Homo sapiens
  misc_feature (1)...(2311): n = a,t,c or g
agcagcggggctgtctatcccggctgaggacccgcgtccagtgcgggtggctggctttgccattagcgggggcctttcctgaggacggcgtacggagtgtggccctccacatacataacgcaacctttctctgagcgggacacaattcacaattctttatagggaatgaaggatggcagcatgccgtgcattaaaagctgttttggtagatctcagtggcacacttcacattgaagatgcagctgtgccagggcgcacaggaagctcttaaaaggttacgtggtgcttctgtaatcattaggtttgtgaccaatacaaccaaagagagcaagcaagacctgtttagaaaggttgagaaaattgggaatttgatatctctgaagatgaaatattcacatctcttgactgcagccagaagtttactataagcggaaacaagttacacccatgctgctagttgattgatcggggcactacctgattttcaaaggaatacaaacaagtgatcctaattgctgtggtcatggggattggcaccagaacattttcattatccaaattctggaatcaagcattccggttacttctggggtggagcacctctgatagcaattcacaaagccagggttttcaagagtttaagatgggcttagccctggggccttggaccattttgtgactgctttagaagtatgccacagataccaaagccacagtcgtggggaaaccagagaagacgttctttttgggaagcattgcagggcactggctgttgaaccttgaggaggctgtcatgatagggagatgattgcaggggttgatgttggtggggctcaagatgtcggcatgctgggcatcttagtaaagactgggaaatatcgagcatcagatgaagaaaaaattaatccacctccttacttaacttgtgagagtttccctcatgctgtggaccacattctgcagcacctattgtgaagcaatgtgtgcatctgaagcaacttgaaatgcagcttcttattgtctggaatgaatcccttaccaactcagtgccagcatcggtagacaccagtcagtgctgatcgctttttaaccctcttttgttgtgcattaattagaaagaaaggtattgaattgcgggctagcccagtaagccttgcttaatctcttttattttgtaactgaaagatgagacccaaaagaaagggaaagctgagattttgtgccattccttttaaaatattcatcaggttaggtggggctgtggggcgaaaagctactacagggaagagtgttctctgctgtctcttcactggaaaacagggaggggggatttcagactgtgaagaaagttgaatggtggtttttaaattataaagtaatgtattaaaaggtgcattaggctgtagttctaatattgagttcaactgtgaaatccatcagatgtgcccaaatggagaagacacgaaagcaacaaagtgaattgttctttagcccaagtggtacacgtgaatttgctttaacagatgttgaaaactaaattttctactgtattcccagcacgggtgacttctttttctcttcattagaccagagatgactaatttaaatttagaaccagattttaatttaaattaatatttccattaataacctattcattgcagatacctattatactgtgtaacagttgttttggaaattttatgtaaaattaaaactatcagtattttacagatgttttaattagacattgttattaacaggaacagtgcagaaactaagattcaagccttataatatcttatagaccatgcatttttgaagttagtgtcccactagggtcctattaactgtacatttgcaagatttcattatttttgcctctgacactatgggaaaaattttttagaagctattgggacagattcaagcttttatgcacttggttactacagctgtaaaatgaaatctcgtcttgtagcatggattattcttctcatggttaaaccccccaaaataaagggggactaaataggtaatgattttcccttnaagggttggcatttgcatactgtgataatcctgggccttgcaatagttctacagggctcttgggcattgaattattaggatgtaattgtacatcattgtagtgttcaccttattgaagctcactctgatgttaatgagcttcgggttttgatgcttgtttagagatcagcagtcttggatgggagggaacaaagctaaacccaatgttagtttggtgaaaaaaaaaaaaaaaaaaaccgaggggggcccggacccaggg

SEQ ID NO: 135622 - DNA, 296 bp, Homo sapiens
  misc_feature (1)...(296): n = a,t,c or g
nnnnnnnnnnnnnnnnnnnnnnnnnnnnnnnnnnnnnnngaattttgaaggaggggctgcgttctgaggctggcatcgaactcatcatcgaggaccacatcaggccccaaaagcaaaaaaggaagcctggttccctccccaaggccacagggagctccgtcagtttttcccaagcccacgtcaggcctggcctcatttcaaaccctgcttaggatgggggatggggccaggggggctcctgggctcaccctcttttggggcatttttttggaagaataaaattgcctctctcttaa

SEQ ID NO: 135623 - DNA, 452 bp, Homo sapiens
tttttaagagagaggcaattgggttcttccaaaaaaatgcaccaagagagggtgagcacaggagcacccctggccacatcccccatcctaagcagggtctgagatgaggccaggcctgacgtgggcttgctcgcttgctcgcttgctcctcagtcctagcttcatcaaacactggttcctggaatcctgtctgctgtcttgctctcgaagtgggtctggatatgctcagtggtgtcccccccaccaatccgccagtgcagcaggccactgtcaaactcctgcacacgcccaagcttatctgagcagtccaccacaaatggatcattcttctgtacgatctttactggaagcttgtcaaacttactgatcagcttccttcaccaaatcgcactggctcctggactcttttcctatcttcaccacgaactgctgcttgctccttcctggaatcc

SEQ ID NO: 135624 - DNA, 837 bp, Homo sapiens
gacgagcagctgagggccctggtgaggcagtttggacagcaggactggaagttcctggccagccacttccctaaccgcactgaccagcaatgccagtacaggtggctgagagttttgaatccagaccttgtcaaggggccatggaccaaagaggaagaccaaaaagtaactgctgggacagtgccttgcacacagtgggtcttcacccaccagtgtacctggggactggcacagatgccttcttttgatcgccacagcagtcctgtgagtgccccacttcccgctttgtctctgactcacccctgtcctggagcagagcccagcacgttgaagggcaaaaggacagacaatgctgtgaagaatcactggaactctaccatcaaaaggaaggtggacacaggaggcttcttgagcgagtccaaagactgcaagcccccagtgtacttgctgctggagctcgaggacaaggacggcctccagagtgcccagcccacggaaggccagaaccaaggtgggaagctggcagtgcttggttcatgtcacatgttcagtgatcaatatttggacaaagaagaaaacagcaaaatcatggatgttgttttccagtggctcacgacaggagacatccacctaaaccagattgatgctgaggacccagagatttctgactacatgatgctgccctacacagccaccctatcaaagcggaatcgagagtgtctccaggagagtgatgagatcccaagggactttaccaccctcttcgacctgtccatcttccagctggataccacctccttccacagcgtcatcgagtcagtacctgtgggcctctga

SEQ ID NO: 135625 - DNA, 836 bp, Homo sapiens
gtactgaagaagacctggaattttatgtcaggaagtgtggtgatattcttggagtaaccagtaaactaccaaaggaccaacaggatgccaaacatatccttgagcacgtcttcttccaagtggtggagttcaagaaattgaaccagagcccggagcgggagccgggccggggtcaggacccgggctgctccggccgctccgggccccgggccgcgctcgaaggcgtcagcgtgtcagcagcccctgacttggacctgcagggtggggagagggatgggacgagaacctgtgctggggccaaaggtcgcactgggggaaggtggagccagggcagcagagtgcctggcgtcggcccctatcctgtcactagttcccccgttctggcccctggcaggtttgtaaccccagatcagaagtactccatggacaacactccccacacgccaaccccgttcaagaacgccctggagaagtacggacccctgaagcccctgccacagaccccgcacctggaggaggacttgaaggaggtgctgcgttctgaggctggcatcgaactcatcatcgaggacgacatcaggcccgagaagcagaagaggaagcctgggctgcggcggagccccatcaagaaagtccggaagtctctggctcttgacattgtggatgaggatgtgaagctgatgatgtccacactgcccaagtctctatccttggtacacctggagccgggctgcgacggctctggggctctaaccagccccgcgccccagaggcttcttctcggtggcgtggtctcgttcgtgtggaggacgggtgaaagaaagtcgcagggatga

SEQ ID NO: 135626 - DNA, 1651 bp, Homo sapiens
atgcccattgtacttgttgactggtctgatattcgtgagcaaaaacgacttatggtattgcgagcttcagtcgcactacacggtcgttctgttactctttatgagaaagcgttcccgctttcagagcaatgttcaaagaaagctcatgaccaatttctagccgaccttgcgagcattctaccgagtaacaccacaccgctcattgtcagtgatgctggctttaaagtgccatggtataaatccgttgagaagctgggttggtactggttaagtcgagtaagaggaaaagtacaatatgcagacctaggagcggaaaactggaaacctatcagcaacttacatgatatgtcatctagtcactcaaagactttaggctataagaggctgactaaaagcaatccaatctcatgccaaattctattgtataaatctcgctctaaaggccgaaaaaatcagcgctcgacacggactcattgtcaccacccgtcacctaaaatctactcagcgtcggcaaaggagccatgggttctagcaactaacttacctgttgaaattcgaacacccaaacaacttgttaatatctattcgaagcgaatgcagattgaagaaaccttccgagacttgaaaagtcctgcctacggactaggcctacgccatagccgaacgagcagctcagagcgttttgatatcatgctgctaatcgccctgatgcttcaactaacatgttggcttgcgggcgttcatgctcagaaacaaggttgggacaagcacttccaggctaacacagtcagaaatcgaaacggaagtcttctgaccaactggccctccgtccctcctaccataaaggaggaggaaaacagtgaggaggaacttgcagcagccaccacatcgaaggaacaggagcccatcggtacagatctggacgcagtgcgaacaccagagcccttggaggaattcccgaagcgtgaggaccaggaaggctccccaccagaaacgagcctgccttacaagtgggtggtggaggcagctaacctcctcatccctgctgtgggttctagcctctctgaagccctggacttgatcgagtcggaccctgatgcttggtgtgacctgagtaaatttgacctccctgaggaaccatctgcagaggacagtatcaacaacagcctagtgcagctgcaagcgtcacatcagcagcaagtcctgccaccccgccagccttccgcccgtggtgcccagtgtgaccgagtaccgcctggatggccacaccatctcagacctgagccggagcagccggggcgatgctgatccccatctcccccagcactgaagtcgggggctctggcattggcacaccgccctctgtgctcaagcggcagaggaagaggcgtgtggctctgtcccctgtcactgagaatagcaccagtctgtccttcctggattcctgtaacagcctcacgcccaagagcacacctgttaagaccctgcgcttctcggccctcccaggtttctgaacttctggaacaaacaggacacattggagctggagagcccctcgctgacatccaccccagtgtgcagccagaaggtggtggtcaccacaccactgcaccgggacaagacacccctgcaccagaaacatgctgcgtga

SEQ ID NO: 135627 - DNA, 2735 bp, Homo sapiens
gctgacgccttcgagcgcggcccggggcccggagcggccggagcagcccgggtcctgaccccggcccggctcccgctccgggctctgccggcgggcgggcgagcgcggcgcggtccgggccggggggatgtctcggcggacgcgctgcgaggatctggatgagctgcactaccaggacacagattcagatgtgccggagcagagggatagcaagtgcaaggtcaaatggacccatgaggaggacgagcagctgagggccctggtgaggcagtttggacagcaggactggaagttcctggccagccacttccctaaccgcactgaccagcaatgccagtacaggtggctgagagttttgaatccagaccttgtcaaggggccatggaccaaagaggaagaccaaaaagtcatcgagctggttaagaagtatggcacaaagcagtggacactgattgccaagcacctgaagggccggctggggaagcagtgccgtgaacgctggcacaaccacctcaaccctgaggtgaataagtcttgctggaccgaggaggaggaccgcatcatctgcgaggcccacaaggtgctgggcaaccgctgggccgagatcgccaagatgttgccagggaggacagacaatgctgggaaaaatcactggaactttaccattcaaaagggaagggggacacaggaggcttcttgagggagtacaaagactgaaagcccccagtgtacttgccgctgggagctcgaggacaaggacggcctccagagtgcccagcccacggaaggccagagaagtcttctgaccaactggccctccgtccctcctaccataaaggaggaggaaaacaagtgaggaggaacttgcagcagccaccacatcgaaggaacaggagcccatcggtacagatctggacgcagtgcgagacaccaagagcccttggaggaattccccgaagcgtgaggaccaggaaggctccccaccagaaacagatgcctgccttacaagtgggtggtggaggcagttaacctcctcatccccgctgtggtttcttagcctctatgaagccctggacttgatcggttccggaccctgatgcttggtgtgacctgagtagatttgacctccctgaggaaccgtctatagaggacagtatcaacaacagccgtagtgcagctgcaagcgtcacagtcagcaacaaatcctgccaccccgccagccttccgcccgtggtgcccagtgtgaccgagtaccgcctggatggccacaccatctcagacctgagccggagcagccggggcgagctgatccccatctcccccagcactgaagtcggggggctctggcattggcacaccgccctctgtgctcaagcggcagaggaagaggcgtgtggctctgtcccctgtcactgagaatagcaccagtctgtccttcctggattcctgtaacagcctcacgcccaagagcacacctgttaagaccctgcccttctcgccctcccagtttctgaacttctggaacaaacatggacacattggagctggagagccccctcgctgactatccaccccaagtgtgcagccagaaggtggtggtcaccacaccactgcaccggggacaagacacccctgcaccagaaacatgctggcgtttgtaaccccagatcagaagtactccatggacaacactccccacacggccaaccccgttcaagaacgccctggagaagtacggacccctgaagcccctgccacagaccccgcaccttggaggaggacttgaaggaggtgctgcgttctgaggctggcatcgaactcatcatcgaggacgacatcaggcccgagaagcagaagaggaagcctgggctgcggcggagccccatcaagaaagtccggaagtctctggctcttgacattgtggatgaggatgtgaagctgatgatgtccacactgcccaagtctctatcctgccggacgactgccccttccaacttcttccacccctcaccctgtcaggtatcaaagaagacaacagcttggctcaaccaggggcttcttgcagggccaagcccgaggaaggcagcatgtgtcccagaaggccccgaaagccactttcacggacaacttgccccttatgttccagtgccggggaagaccggtgggcctgcgggggggaccaggggaccaggcttttcatggcaggagaaagcccggcaggttcctggggccgccctgaagcccaagccacacattctcgggaccctcatcttggtcctggagagtgttggagggggtgtcaacgagcccatttctcatggttttacagggggtttgtggggggcagaggggggtcttgtgaatctgaggagtcattcaaggtgaccctcctgcagggagccttctgcccaccagcccctcccccagactctacaggtggaaggcaaccagggccatgtgctgccctgttgccgaagcccagctgtgggcggctccctggtgctaacaacaaagtttccacttcccaggtctgccctggttccctccccaagggccacagggagctccgtcagcttctcccaagcccacgtcaggccatggcctcatttaacaccctgcttaggatgggggatgtggccaggggtgctcctgtgctcaccctctcttggggcattttttttggaagaataaaagttgcctctctctttgaaaaaaaaaaaaaaagggcggccgct

SEQ ID NO: 135628 - DNA, 925 bp, Homo sapiens
caagaacgtcccagtgcccttggctcctttcggagtgtgaccccgtgcttgcacgggacacgttacccagctcgggtgagaagggtatcttccgggaacctcgcctttaatagcacaacgagcgcagagtccactggatctgcgagaagaaaccgcgctaactagtttgtccctacggccgcctcgtagtcactgccgcggcgccttgagtctccgggccgccttgccatggctgcccgtggtgtcatcgctccagttggcgagagttttgtcgctacgctgaggtaccttgcagcccctcggccaaacggccagacgccgacgtcgaccagcagagactggtaagaagtttgatagctgtaggtcagggtgttgcagctcttgcatttgcagggtcgctacgcattaacggatctggaaacctctagaaacaagttatcacagaaactgccaaaggaagatttcaaactcctaggttttcatcctactgataaggaggatccttaacataatatgacttaggcgagaagctgcgtcttattttaggtgtaagcccagtctgctggcaaggctaagattagaacaagctcataggagcagtcatgattttggaatcaccccagataaagggtggatctccttacgtagcagccaaaataaatgaagcaaaagactttgctagaaacaaccaccaaacgattgatgcttaaggaccacactgaaggaaaaaaaaacgaggggacttcaaaaaaaaaaaaaagccctgcaaaatattctaaaacatggtccttcttaattttctatatgggatttgaccacagtcttatcttccgaccattaagctgtataacgaataaaatgttaatagtcttgctttttattatcttttaaagatctccttaaattctaaaaaaaaaaaaaaaaa

SEQ ID NO: 135629 - DNA, 652 bp, Homo sapiens
  misc_feature (1)...(652): n = a,t,c or g
cgagggttatatatgcagcattttacagggtcttctgctntgctgaccagaaccnatattanctatggagtcatagngaatgtggcagttgttcgaattaactctcccaattcanagcatgttagccgcttgcaagacccttcaagaagtaacacagctatcacaagaagcacagagaatagttgagaaacttgaaaagtccacaaagcctattgtggctgccatcaatggatcctgcctgggaggaggacttgaggttgccatttcatgccaatacagaatagcaacaaaagacagaaaaacagtattaggtacccctgaagttttgctgggggccttaccaggagcaggaggcacacaaaggctgcccaaaatggtgggtgtgcctgctgctttggacatgatgctgactggtagaagcattcgtgcagacagggcaaagaaaatgggactggttgaccaactggtggaacccctgggaccaggactaaaacctccagaggaacggacaatagaatacctagaagaagttgcaattacttttgccaaaggactagctgataagaagatctctccaaagagagacaagggattggtggaaaaattgacagcgtatgccatgactattccatttgtcaggcaacaggtttac

SEQ ID NO: 135630 - DNA, 449 bp, Homo sapiens
  misc_feature (1)...(449): n = a,t,c or g
cagaagttatgaatgaaatntgggctagtgatcaaatcagaagtccggncttatctcatcaaagccaggctgctttattgcaggtnctgatatcaacatgttagccgcttgcaagacccttcaagaagtaacacagctatcacaagaagcacagagaatagttgagaaacttgaaaagtccacaaagcctattgtggctgccatcaatggatcctgcctgggaggaggacttgaggttgccatttcatgccaatacagaatagcaacaaaagacagaaggatgttaagcatctggctattcttggtgcagggctgatggggagcaggcatcgcccaagtctccgtgggatnaaggggcttaaagactattactttaaagntgccaccctcactngcgctaggaccgagggacagccaacaagtgtttcaaagggtttgattgacaagtt

SEQ ID NO: 135631 - DNA, 501 bp, Homo sapiens
tagttgtgcctgcattagttggtttattgaataacttaggcaatcttccactttgactgaaatgattaagatcagtttaccgaaagtcatttcatccttgccttgcaggcatctggctattcttggtgcagggctgatgggagcaggcatcgccaacgtctccgtggataaggggctaaagactatacttaaagatgccaccctcactgcgctagaccgaggacagcaacaagtgttcaaagggtaagcctgctctctctctttgcaagagttagaatgtcctttgtttcttggttagttgttttttgtggtggcttggtgggtttttttgtttgtttgttcttgccatcacggattcctttttcctgaacataatgagttctagatactccgtagtgaagccaagtttcttttgatttttagaaatgccaattccttctttgacttcgttttgttatagatatcatagacaattaacatccttggagtctgtagtctttg

SEQ ID NO: 135632 - DNA, 3130 bp, Homo sapiens
  misc_feature (1)...(3130): n = a,t,c or g
cttcagctcaagatggtggcctgccgggcgattggcatcctcagccgcttttctgccttcaggatcctccgctcccgaggttatatatgccgcaattttacagggtcttctgctttgctgaccagaacccatattaactatggagtcaaaggggatgtggcagctgatcgaattaactctcccaattcaaaaggtaaatacactgagtaaagagctacattcagagttctcagaagttatgaatgaaatctgggctagtgatcaaatcagaagtgccgtccttatctcatcaaagccagggctgctttattgcagggtgctgatatcacgatgttagccgcttgcaaagacccttcaatgaagtaacacagctatcacaagaaagcacagagaaatagttgagaaaccttgaaaaagtccacaaagccttattgtgggctgcccatccaatggatcctgcctgggacggaggactttgaggttgcccatttcatcccccnaatacagaatagctactaaacgacagcaaaacagtaatttaggtaccccctgaaagtttttcttggggggcctttaccagggaggcagggagggcacacaaagggctgccccaaaatgggtggggtgtgcctgcctgcctttggacatgaatgcttgactggtagaagcattcgtgtcagacagggcaaaggaaaatgggactggttgacccaactggtgggaacccctgggacccagggactaaaacctccagaggaacggacaatagaatacctagaagaagttgcaatttacttttgccaaaggactagctgataagaagatctctccaaagagagacaaggggattggtggaaaaattgacagcgttatgccatgactattccatttgtcaggcaacaggtttacaaaaaagtggaagaaaaagtgcgaaagcagactaaaggcctttatcctgcacctctgaaaataattgatgtggtaaagactggaattgagcaagggagtgatgccggttatctctgtgaatctcagaaatttggagagcttgtaatgaccaaagaatcaaaggccttgatgggactctaccatggtcaggtcctgtgcaagaagaataaatttggagctccacagaaggatgttaagcatctggctattcttggtgcagggctgatgggagcaggcatcgcccaagtctccgtggataaggggctaaagactatacttaaagatgccaccctcactgcgctagaccgaggacagcaacaagtgttcaaaggattgaatgacaaagtgaagaagaaagctctaacatcatttgacaagggattccatcttcagcaacttgactgggcagcttgattaccaagggttttgaaaaaggcccgacatgggtgaattgaaagctgtgttttgaggacccttagtccttaagccacagagtcttaaaagggaaggtaggaagccggtgattcccagatcactggtattctttgcccagtaacacatctgctctcccaatcagtgaaatcgctgctgttcagcaaaagacctgagaagggtgattgggcatgcactactttctctcccgtggacaagatgcagctgctgggagattatcacgaccgagaaaacttccaaagacactcagtgcttcagctgtagcaggttggtctcaagcaggggaagggtcatcattgtgggttaaggatgggacctgggcttcttatnacttaccagggtgtctttgcgcccatgatgtcttgaagtcatccgaatcctccaggaaggaagtttgacccgaagaagctgggatttccctggaccacaagctttgggttttcctgttgggtgccgccacactggtgggatgaagttgggtgtgggatgttagcgaaacatgttggcggaagatctgggcaaagtctttgggggagcggtttggaggtggaaacccagaacttgctgacacagatggtgtccaagggcttcctaggtccgtaaatctggggaagggcttttaacttcatcagggagggtggtaaaaagaaagattttgaattctaccatggataggtatttaagcgagtctaaagcggccctcttaagtttgaagtctcatcaagaggaaggcattcaagttcggccctggtggcaagaatttgggaatgaggcaagtcatgtgcctgcaagaggggatcttgcccacactgccagagggaagacatcggagcccgtctttggggcttggcttcccgccttgtctggggagggccttttccgctttgtgggatctgtatgggcgcccagaaggatagtgggaccgggctcaagaaaatatgaagctgccctatgggaaaacagtttcaccccccatgccgagctgctaagctgacccatggctnaacagcccttaaccaagaagttcctacccagtggagccaggccctccatggccttcgcctccagtcaagtgcaacttaacccccaggttggccggccagtgcctggttcctcccaaccagagtggttgtcctagatttattcagagtcaacgagaaagacaaactccgggcactggggtttgctccctgatttaaagtggcctttcagccaagaccatctctcccgtccgtggtgaaggtgtgactttcgaattaagtttgccacttcctattgggaaggtaggagcccacttgcttcattgttattaagccccgaggccttaggagtgggccagccaaggagccatcttggaaggccaccttttcttgcctgtttccttccccaagaggccagggtgcgccagcggctgggtgaagggcagttctgcaccccagccaaacacataacaacaataaaaaccgaaactctgttgtcagcatctttgcccttctggtttaaacgcctccttcaaaaaagcaatctggaagaaagccctgtgctttgggggagtaagaatgtgtgtgcagaattctaggcagcaccttagggagggactgggatgagagaaagtgggacctggtgggctcaaccacacacacctgtctgtgcagatgctttgcccaggcttctcaccacggtgtaccgggatattaaacctctttccccagcctggaaaaaaaaaaaa

SEQ ID NO: 135633 - DNA, 920 bp, Homo sapiens
attagggatttgtaagaaaactttaattaaaaattaaagactatatataattaaactactctgccctggacactctctgagaaacagatctactgggccctttttcatgagccattaggtggaagacagcaaagagatcttctcaagtgcttaggattacctctcaacacacagcaagcatgtccctgcctcccatgaatcttaccatgtaaatccaaatctctgcaatcctgtggcaccaaccagtggtgctcattctattgtttaaaaatggccttcttggctgggcacggtggctcactcctgtaatcccagcaacttcgggaggccgaggcgggcggactgcctgagctccaggagttcgagaccagcctggccaacaaggtgaaaccctgtctctactaaaaatacaaaaaattagccaggtgtggccaggcgcggtggctcacacctgtaatcccagcactttgggaggctgaggtgggcggatcacttgaggtcaggagtttgagaccagcctggccaacatggtgaaaccccaactctactaaaaatgcaaaaaactagccaggcgtggtggtgcacacctgttaatcccagctacttcagaaggctgaggcaggagaatcgctggagcctggggaggcggaggttgcagtgagctgagatcacaggccactgcactccagcctgggcaacagagtgagacttgtctcaaaaaaaaaaaagctaactgagcagaaagtgatgttaccaattatctggtcatgttgactgcctcagtcaccagttacatttacagatgaagggcctgaggagtcatttgactaggaagagaacactagggtgatttgaagctgacttgaaacagtcagcttttctagctgtgtgctcttaggtgagttacttaagttttctgg

SEQ ID NO: 135634 - DNA, 3287 bp, Homo sapiens
  misc_feature (1)...(3287): n = a,t,c or g
atggcctcagaatcaggcctggtgtggccaggggctgatctcacagtagacaggaagtgtggcccgagggccatggctgccccctcagaaggccctgtggagtggctggccgagcctcagcagcctcctgtgaagcgaggaagggtcttcctgccggcctctggagatcagtatgggaatgcacaagatggtggttttggttcctccatctttgatgtgtacaagtgtgatgttttccccccacagacaacagccctggagcctgctgggggctttgagcagctgctgccaagccaggcctcacccgacactctgatgggcacggccatggtggcaggggcttggacgctgccaggaaggtcccctgcccccaactcttccccacatgtggcggggccccgcttgtccttagaagcccagctgaactgcttcctgaaggaacccctccagaacctctcagaccaggagtcaggactcagcaaggcccaccccagccacacacagatacagttccaggactcagaactcagcgaggcccaccccagccacatgcaggtccagttccaggattcaggacacagtgaggcccacccgagccacatccaggtccagttccaggactcaggattcagtgaggcccaccccagccacacacaggtccagttccaggactcaggactcagcgaggcccaccccagccacatgcaggtccagttccaggattcaggacacagtgaggcccaccccagccatatccaggttcagttccagaccatccaggaggtggctggttatgtcctcattgccctcaacacagtggagcgaattcctttggaaaacctgcagatcatcagaggaaatatgtactacgaaaattcctatgccttagcagtcttatctaactatgatgcaaataaaaccggactgaaggagctgcccatgagaaatttacagggtctttggtctgttgtccgagctgccacagcagcctggacatccctgttggtgtttccagccctgtcctctcctgagttccatccacctgtgcatggctttttcatgagtgttttcacggatggttctgctgtcatctccaacctgataaacaaagcaccacgattcagcccttatgaccccaagcttccttcctcagttccttgcttctgtgcatccactgaagaagcctgttccactgtttccctgcactggttccattctcccgcagaaatcctgcatggcgccgtgcggttcagcaacaaccctgccctgtgcaacgtggagagcatccagtggcgggacatagtcagcagtgactttctcagcaacatgtcgatggacttccagaaccacctgggcagctgccaaaagtgtgatccaagctgtcccaatgggagctgctggggtgcaggagaggagaactgccagaaactgaccaaaatcatctgtgcccagcagtgctccgggcgctgccgtggcaagtcccccagtgactgctgccacaaccagtgtgctgcaggctgcacaggcccccgggagagcgactgcctggtctgccgcaaattccgagacgaagccacgtgcaaggacacctgccccccactcatgctctacaaccccaccacgtaccagatggatgtgaaccccgagggcaaatacagctttggtgccacctgcgtgaagaagtgtccccgtaattatgtggtgacagatcacggctcgtgcgtccgagcctgtggggccgacagctatgagatggaggaagacggcgtccgcaagtgtaagaagtgcgaagggccttgccgcaaagtgtgtaacggaataggtattggtgaatttaaagactcactctccataaatgctacgaatattaaacacttcaaaaactgcacctccatcagtggcgatctccacatcctgccggtggcatttaggggtgactccttcacacatactcctcctctggatccacaggaactggatattctgaaaaccgtaaaggaaatcacagggtttttgctgattcaggcttggcctgaaaacaggacggacctccatgcctttgagaacctagaaatcatacgcggcaggaccaagcaacatggtcagttttctcttgcagtcgtcagcctgaacataacatccttgggattacgctccctcaaggagataagtgatggagatgtgataatttcaggaaacaaaaatttgtgctatgcaaatacaataaactggaaaaaactgtttgggacctccggtcagaaaaccaaaattataagcaacagaggtgaaaacagctgcaaggccacaggccaggtctgccatgccttgtgctcccccgagggctgctggggcccggagcccagggactgcgtctcttgccggaatgtcagccgaggcagggaatgcgtggacaagtgcaaccttctggagggtgagccaagggagtttgtggagaactctgagtgcatacagtgccacccagagtgcctgcctcaggccatgaacatcacctgcacaggacggggaccagacaactgtatccagtgtgcccactacattgacggcccccactgcgtcaagacctgcccggcaggagtcatgggagaaaacaacaccctggtctggaagtacgcagacgccggccatgtgtgccacctgtgccatccaaactgcacctacgggcctaagatcccgtccatcgccactgggatggtgggggccctcctcttgctgctggtggtggccctggggatcggcctcttcatgcgaaggcgccacatcgttcggaagcgcacgctgcggaggctgctgcaggagagggagcttgtggagcctcttacacccagtggagaagctcccaaccaagctctcttgaggatcttgaaggaaactgaattcaaaaagatcaaagtgctgggctccggtgcgttcggcacggtgtataagggactctggatcccagaaggtgagaaagttaaaattcccgtcgctatcaaggaattaagagaagcaacatctccgaaagccaacaaggaaatcctcgatgaagcctacgtgatggccagcgtggacaacccccacgtgtgccgcctgctgggcatctgccttcacctccaccgtgcagctcatcacggcagcttcatgccctttcggctgcctcctgggacttatgtccgggtaacacaaaggacaatattggcttcccagttaccttgcttcaactggtgtgttgcagattcgtaaaggggcttgaatnatttgggaggnaccgtcgnttggtgncaccg

SEQ ID NO: 135635 - DNA, 5429 bp, Homo sapiens
  misc_feature (1)...(5429): n = a,t,c or g
tggtgttggctctcaacgtgacccgcagtctgatcccctgtgaagagccggacatcccaggcacacgtgtcgccaccttcagcaggcattcgggtgctgggctggtggctcatcaggcctgggcccacactgacaagcgccagatacgccacaaataccactgtgtcaaatgctttcaagatatatttttggggaaactattttttaaacactgtggaatacactggaaatcttcagggaaaaacacatttaaacacttttttttttaaaggaaaagaattggtatatttattatgttctggtttttctaaataaccctgtggacaagggaagccccactgatttactccctctcttccccactccctgtgaggctgggctgaggcacggatccctgggccacagagcaagtctccaaatcagacagctgcctcagcccctgggatgtgtgatttcagctcctgtcacctcatgcaagggcgtggagaccagtagaggtgtggaggccaggcagagagaggagcctgctctgccggggggcccaactcattgggcactgccccttcagctagcctgcctccgtcccctgagtccaacagtgggagccctagctgggaagttctgatccccaaagccacagcaggggactgatggctatagcagaatgaggtcgggtcaggaccctcaaacaccatctggggaacaccaagcaccctgaattcggaggctgcaggagccctgcggggatgagactgtgtcagagatacactgctggccacaagtgtccccttctcagtccccacctttttcgggctgtcccatgtctatctcagggggcccgttaccttttctgcaagcaagtccccccatcccagcccacaccagggtctgtccggccaaccctcttcccccagggaaaggagaaaagagaaaacaggcttgggcccggtggctcactcctgtaatcccagcactttgggaggttgaggtgggcggatcacctgaggtcaggagtttgagaccagccggcgggagtggccttgggtccccgctgctggttctcctccctcctcctcgcattctcctcctcctctgctcctcccgatccctcctccgccgcctggtccctcctcctcccgccctgcctccccgcgcctcggcccgcgcgagctagacgtccgggcagcccccggcgcaccgcggccgcagcagcctcctccccccgcacggtgtgagcgcccgccgcggccgaggcggccggagtcccgagctagccccggcggccgccgccgcccagaccggacgacaggccacctcgtcggcgtccgcccgagtccccgcctcgccgccaacgccacaaccaccgcgcacgggccccttgactccgtccagtattgatcgggagagccggagcgagctcttcggggagcagcgatgcgaccctccgggacggccggggcagcgctcctggcgctgctggctgcgctctgcccggcgagtcgggctctggaggaaaagaaagtttgccaaggcacgagtaacaagctcacgccagttgggcacttttgaaagatcattttcctcagccctcccagaggatgttccaataactgtgaggtggtcccttgggaatttggaaattaccctatgtgagaggaattatgatctttccttcttaaagaccatcccaggaggtggctggttatgtcctcattgccctcaacacagtggagcgaattcctttggaaaacctgcagatcatcagaggaaatatgtactacgaaaattcctatgccttagctgtctgtatttaattatgatgcaaataaaaccggactgaaggagctgcccatgagaaatttacaggaaatcctgcatggcgccgtgcggttcagcaacaaccctgccctgtgcaatgtggagagcatccagtggcgggacatagtcagcagtgactttctcagcaacatgtcgatggacttccagaaccacctgggcagctgccaaaagtgtgatccaagctgtcccaatgggagctggctggggtgcaggagaggagaactgccagaaactgaccaaaatcatctgtgcccagcagtgctccgggcgctgccgtggcaagtcccccagtgactgctgccacaaccagtgtgctgcaggctgcacaggcccccgggagagcgactgcctggtctgccgcaaattccgagacgaagccacgtgcaaggacacctgccccccactcatgctctacaaccccaccacgtaccagatggatgtgaaccccgagggcaaatacagctttggtgccacctgcgtgaagaagtgtccccgtaattatgtggtgacagatcacgggctcgtgcgtccgagcctgtggggccgacagctatgagatggaggaagacggcgtccgcaagtgtaagaagtgcgaagggccttgccgcaaagtgtgtaacggaataggtattggtgaatttaaagactcactctccataaatgctacgaatattaaacacttcaaaaactgcacctccatcagtggcgatctccacatcctgccggtggcatttaggggtgactccttcacacatactcctcctctggatccacaggaactggatattctgaaaaccgtaaaggaaatcacagggtttttgctgattcaggcttggcctgaaaacaggacggacctccatgcctttgagaacctagaaatcatacgcggcaggaccaagcaacatggtcagttttctcttgcagtcgtcagcctgaacataacatccttgggattacgctccctcaaggagataagtgatggagatgtgataatttcaggaaacaaaaatttgtgctatgcaaatacaataaactggaaaaaactgtttgggacctccggtcagaaaaccaaaattataagcaacagaggtgaaaacagctgcaaggccacaggccaggtctgccatgccttgtgctcccccgagggctgctggggcccggagcccagggactgcgtctcttgccggaatgtcagccgaggcagggaatgcgtggacaagtgcaaccttctggagggtgagccaagggagtttgtggagaactctgagtgcatacagtgccacccagagtgcctgcctcaggccatgaacatcacctgcacaggacggggaccagacaactgtatccagtgtgcccactacattgacggcccccactgcgtcaagacctgcccggcaggagtcatgggagaaaacaacaccctggtctggaagtacgcagacgccggccatgtgtgccacctgtgccatccaaactgcacctacggatgcactgggccaggtcttgaaggctgtccaacgaatgggcctaagatcccgtccatcgccactgggatggtgggggccctcctcttgctgctggtggtggccctggggatcggcctcttcatgcgaaggcgccacatcgttcggaagcgcacgctgcggaggctgctgcaggagagggagcttgtggagcctcttacacccagtggagaagctcccaaccaagctctcttgaggatcttgaaggaaactgaattcaaaaagatcaaagtgctgggctccggtgcgttcggcacggtgtataagggactctggatcccagaaggtgagaaagttaaaattcccgtcgctatcaaggaattaagagaagcaacatctccgaaagccaacaaggaaatcctcgatgaagcctacgtgatggccagcgtggacaacccccacgtgtgccgcctgctgggcatctgcctcacctccaccgtgcaactcatcacgcagctcatgcccttcggctgcctcctggactatgtccgggaacacaaagacaatattggctcccagtacctgctcaactggtgtgtgcagatcgcaaagggcatgaactacttggaggaccgtcgcttggtgcaccgcgacctggcagccaggaacgtactggtgaaaacaccgcagcatgtcaagatcacagattttgggctggccaaactgctgggtgcggaagagaaagaataccatgcagaaggaggcaaagtgcctatcaagtggatggcattggaatcaattttacacagaatctatacccaccagagtgatgtctggagctacggggtgaccgtttgggagttgatgacctttggatccaagccatatgacggaatccctgccagcgagatctcctccatcctggagaaaggagaacgcctccctcagccacccatatgtaccatcgatgactacatgatcatggtcaagtgctggatgatagacgcagatagtcgcccaaagttccgtgaggtgatcatcgaattctccaaaatggcccgagacccccagcgctaccttgtcattcagggggatgaaagaatgcatttgccaagtcctacagactccaacttctaccgtgccctgatggatgaagaagacatggacgacgtggtggatgccgacgagatacctcatcccacagcagggcttcttcagcagcccctccacgtcacgggactcccctcctgagctctctgagtggcaaccagcaacaattccaccgtggcttgtcattgatagaaatggggctgcaaatgctgtcccattcaaggaagacagcttctttgcagcgattacagctcagaccccacaggcgccttgactgaggacagcatagacgacaccttcctcccagtgcctgaatacataaaccagtccgttcccaaaaggcccgctggcttctgtgcagaatcctgttctattcacaattcagccttttgaaccccggcggcccagcaggaggacccacacttaccaggggacccccacaggcattgcagtgggggcaaccccgagtttttttcaacattgttccagcccacctgtgttcaacaggcacatttcggacagcccctgcccactggggcccaggaaagggcaggccaccaatttagctggacaaccctgactacccagcgggacttctttcccccanggaaggcccaagcccaaatgggcatcttttaagggctccccanagcttgaaaatgcaggaataccctaagggtcgcggcccacaaagccagtgaatttattgggagcatgacccacgggnggatagtatgagcccttaaaaatcccagactctttcgataccccgggacccaagccacagcagggtcctcccatccccaacagccatgcccgcattagctcttagacccacagactggttttgcaacgtttacaccgactagcccaggaagtacttccacctcgggcacattttgggaagttgcattcctttgtcttcaaactgtgaagcatttacagaaacgcatccagcaagaatattgtccctttgagcagaaatttatctttaaaaaggggtatatttgaaaaaaa

SEQ ID NO: 135636 - DNA, 414 bp, Homo sapiens
  misc_feature (1)...(414): n = a,t,c or g
aattcggaacgagngtcctgcctctgattccgggctgtcatggcgacccccaacaatctgaccccccccgacgctcccgaggcggccagcccgcccattggcccagggagagcctggttctgtaccactggacccagtccttcagctcgcagaaggtgcggctggtgatcgccgagaagggcctggtgtgcgaggagcgggacgtgagcctgccacagagcgagcacaaggagccctggttcatgcggctcaacctgggcgaggaggtgcccgtgcatcatccaccgcgacaacatcatcagtgactatgaccagatcattgactatgtggagcgcaccttcacaggagagcacgtngtggccctgatgcccgaggttggcagccttgcagcangcacgggtgctgcagttact

SEQ ID NO: 135637 - DNA, 554 bp, Homo sapiens
ttttacagtggaatgctatcctattgttcaaggaaacaacgcacatgggggtgtgacagggaagaacctctcggttaaattaagtgaaaacggtacagctgaagaactgtgtagttgctgatatgcgaaacggatatatgatgtatattatgtacacaccgcgtatacgtgtacattccacgcatagaaaattcgtggaatgacacaataaaattggtgacaggtttgtttctgaggagggaaattcaagagaatgttttatcttttggggacacattttggattttttaaaagttgggtgccttttataaacctgttcaaatcacacacccgcacagaacttggtctctggaatccagcagacctcggggtctagttgtgactctgtcacaccggctaaacatcaacgtgcctcttgctttctttctgaagtggagacaggactaggatgtgtcttaagatcatggtggatgccgtggggaacaaggatgtaaagcccttgataccacgtgcattgcaaagacacaatcaacatttatgtcatcaattgctga

SEQ ID NO: 135638 - DNA, 1228 bp, Homo sapiens
atgcgcggtgactcggcagcgcggcagccgacgactgcgcagacgcagggcggcggccgcgcctctccaacgccccgcacccgcccccctcagaagcacgtgcgccttacaatttggaagcaaaatcttctgggtactccttacgggctgaaagatgttccccaccccgaccctacccatatctgtggccatttcagcatccgctacatggaggcagagatgagtgggcatcagccggtcaagcactctactcttgtcccacctctgggcctgtgtctctacctggagcatgcatcctttccaccttcttctccccagctggctatgtccccctcatcccacaagcctctgcttcaagtccctgagcagatgctgatgatgactgcctggagcctgacactgagggctggcggcttttctggcgcgggccagggggaggaggagaaaggagctcccgggatcccctcgccccctcccccaactgcccgctggtggcccatctccgcgctggagagcgatgcggccaagccagcggaggcccccgacgctcccgatggcggccagccccgcccattggcccagggagagcctggttctgtaccactggacccagtccttcagctcgcaaaaggtgcggctggtgatcgccgagaagggcctggtgtgcgaggagcgggacgtgagcctgccacagagcgagcacaatggatgccctggttcatgcggctcaacctgggcgaggaggtgcccgtcaatcatccaccgcgacaacatcattcagtgactatggaccagattcatttgactatgtgggagcgcacctttcacagggagaggcacgtgggggccctgatgcccgaggtgggcagccgtgcagcacgcacgggtgctgcagtacccgggagctgctggacgcactgcccatggatgcctacacgcatggctgcatcctgcatcccgagctcaccaccgactccatgatccccaagtacgccacggccgagatccgcagacatttagccaatgccaccacggacctcatgaaactggaccatgaagaggagccccagctctccgagccctacctttctaaacaaaagaagctcatggccaagatcttgggagcatgatgatgtgagctacctgaagaagattctcggggaactggccatggtgctggaccagattgaaggcggagctggaagaaagaggaagctggagaacgagg

SEQ ID NO: 135639 - DNA, 1543 bp, Homo sapiens
ggaagaacctctcagttaaattaagtgaaaacggtacactgaagaactgtgtagttgctgatagcgaaacggatatagatgtatatatgtacacacgcgtatacgtgtacattccacgcatagaaaattcgtggaatgacacaataaaattggtgacaggagccaccatctcagctgtgggtggagacattgatgctcaaggggaatgggcctttcctcttttggggataccctccctctcccctggaccagagtggaaggtgcgggtggtgatccccgataagggcctggtgtgcgaggagcgggacgtgagcctgccacagagcgagcccaaggagccctggttcatgcggatcaacctgggcgaggaggtgcccgtcatcatccaccgcgacaacatcatcagtgactatgaccagatcattgactatgtggagcgcaccttcacaggagagcacgtggtggccctgatgcccgaggtgggcagcctgcagcacgcacgggtgctgcagtaccgggagctgctggacgcactgcccatggatgcctacacgcatggctgcatcctgcatcccgagctcaccaccgactccatgatccccaagtacgccacggccgagatccgcaggacatttagcccaatgccaccacggacctcatgaaactggaccatgaagaggagccccagctctccgagccctacctttctaaacaaaagaagctcatggccaagatcttggagcatgatgatgtgagctacctgaagaagatcctcggggaactggccatggtgctggaccagattgaggcggagctggagaagaggaagctggagaacgaggggcagaaatgcgagctgtggctctgtggctgtgccttcaccctcgctgatgtcctccctgggagccaccctgcaccgcctcaagttcctgggactgtccaagaaatactgggaagatggcagccggcccaaacctgcagtccttctttgagagggtccagagacgctttgccttccggaaagtcctgggtgacatccacaccaccctgctgtcggccgtcatccccaatggctttccggctggtcaagaggaaacccccatccttctttcgggcgtcctttctcatgggctcccttgggtgggatgggctactttgccctacatggtacctcaagaaaaaaatacatctagggccaggcctggggcttggtgtctgactgtcggtgtctctgtgctgtgtgattccccgtgagctctcagtaactcactgtctcatgaacacttggacagccctccccgcccttcgttctgagtaataataccgtcagtgtgaaaacattccgtagtttagaagtagacgttgcaaatgctgtgactcaaggccacgggctcttgctaaaagagagagaggaagcgagagagagagagaaaaaacaaaaaaccagaaaaccacgaattgcctttttctatccgatttcaaagggtcctccaagatgggaacttgtggaagacttggtttaaggaatcttgaaggggaactc

SEQ ID NO: 135640 - DNA, 1155 bp, Homo sapiens
atggatccatccatttacttcttgccttccaagagggaaggtcacctgcaagcctacattcgtgacagcgttcccgaggaccccctgatcctcatcttcttttctgcttcatcagaccagagaccgtggctaaaagccccccatctgccggctctcaggggcttccgaggcggcggggcgggaggcggcgcccagtcaaggacaacagaagactacgtcgcgtgggccaaaggaaacagtcccacctcaccttctccccggagccgcggaggctgttctgctaaactgtctggaccacgacgaccccctaggaggccgggtcgcttattcaatatggcggcctcggctaactctgtcagccgggcctggagaacggaaagcccggagggactagaatccttgcattcgacaagtttgtcggcaatttccgtcagccgaccagagggcggagctgagctctcggatacagccgacaccatgggtttcggagacctgaaaagccctgccggcctccaggtgctcaacgattacctggcggacaagagctacatcgaggggtatgtgccatcacaagcagatgtggcagtatttgaagccgtgtccagcccaccgcctgccgacttgtgtcatgccctacgttggtataatcacatcaagtcttacgaaaaggaaaaggccagcctgccaggagtgaagaaagctttgggcaaatatggtcctgccgatgtggaagacactacaggaagtggagctacagatagtaaagatgatgatgacattgacctctttggatctgatgatgaggaggaaagtgaagaagcaaagaggctaagggaagaacgtcttgcacaatatgaatcaaagaaagccaaaaaacctgcacttgttgccaagtcttccatcttactagatgtgaaaccttgggatgatgagacagatatggcgaaattagaggagtgcgtcagaagcattcaagcagacggcttagtctggggctcatctaaactagttccagtgggatacggaattaagaaacttcaaatacagtgtgtagttgaagatgataaagttggaacagatatgctggaggagcagatcactgcttttgaggactatgtgcagtccatggatgtggctgctttcaacaagatctaa

SEQ ID NO: 135641 - DNA, 2529 bp, Homo sapiens
atggcgctgcgagtggtgcggagcgtgcgggccgtgctctgcagcctgcacgtggcttgtgagaaggttggcatgcagatccctcgattctgttatcatgaaaggttgtctgttgctggaaactgcaggatgtgccttgttgaaattgagaaagcccctaaggaccagtccatgatgtttggaaatgataggagccgatttttagaggggaagcgtgctgtggaagacaagaacattgggccattggtaaagaccatcatgacaagatgtatacagtgtactcgctgcatcaggtttgcaagtgagattgcaggagtagatgatttgggaacaacaggcagaggaaatgatatgcaagttggcacatacattgaaaagatgttcatgtctgaactgtctgggaatatcattgatatctgccctgtaggtgccctaacctctaagccctatgcctttactgcccggccttgggaaacaagaaagacagaatccattgatgtaatggatgcggttggaagtaatattgtggttagcacaagaactggagaagtgatgaggattttgccacgtatgcatgaggacatcaatgaagagtggatctctgataaaaccagatttgcctatgatgggctaaaacgtcaaagacttaccgagccaatggtcagaaatgaaaaagggcttttaacctatacttcttgggaggatgcgctctctcgcgtagctggaatgccgcctgccttggccctgcaaagtgcggagattgcagcctctgcccggccgccaccccgtctgggaagtgaggagcctctctgcctggctgcccatcgtctgggatgtgaggagcccctctgcctggctgccagtctggaaagtgaggagcgtctctgcccggccgccatcccacctgggaatctcaggtatgtctttatcagcagcgcgaaaacagacaaatacagcaaattggcaccagtagagtgggtcactgttgaaaaggtacctgaaaatgtggaagtgacattggaactgggtaacaggcagagtagagacagggtttcacgaattccaggaaatgccatcgtcatttggttcacggggttcaagtggaagaagacagtcaccactctgtggttcctcaatctagccattgcggatttcatttttcttctctttctgcccctgtacatctcctatgtggccatgaatttccactggccctttggcatctggctgtgcaaagccaattccttcactgcccagttgaacatgtttgccagtgtttttttcctgacagtgatcagcctggaccactatatccacttgatccatcctgtcttatctcatcggcatcgaaccctcaagaactctctgattgtcattatattcatctggcttttggcttctctaattggcggtcctgccctgtacttccgggacactgtggagttcaataatcatactctttgctataacaattttcagaagcatgatcctgacctcactttgatcaggcaccatgttctgacttgggtgaaatttatcattggctatctcttccctttgctaacaatgagtatttgctacttgtgtctcatcttcaaggtgaagaagcgaagcatcctgatctccagtaggcatttctggacaattctggttgtggttgtggcctttgtggtttgctggactccttatcacctgtttagcatttgggagctcaccattcaccacaatagctattcccaccatgtgatgcaggctggaatccccctctccactggtttggcattcctcaatagttgcttgaaccccatcctttatgtcctaattagtaagaagttccaagctcgcttccggtcctcagttgctgagatactcaagtacacactgtgggaagtcagctgttctggcacagtcctaaaggaagctaaaaaaccaatggtggttttaggcagttctgcactccaaagaaatgatggagcagcaattcttgcagctgtttctagcattgcacaaaagattcggatgactagtggtgttactggtgattggaaagttatgaatatccttcataggattgcaagtcaagtagctgctttggaccttggctataagcctggggtggaagcaattcggaagaaccctcccaaggtgctgtttctcctgggagcagatggaggttgtatcacacgacaggatttgccaaaggattgtttcattatttatcaagaccttgtttcgggagctgccctgcccacttcctctccctcctcccaatcccggaggcttccaagccatctgacaaccacgtctcccccttgggatctgttccggtgttggttttaccggacagtgaccaaaaaggaggggaaactcctacatctggggactgctccagaaaccctgcctgatcctgcccctctcactgacagtctcctcgctgctccctacatcttcctctccgccggagctgtccagaagggggattttggacccaaaggaatcgggatgaaagggggtgggtactcaagctga

SEQ ID NO: 135642 - DNA, 2066 bp, Homo sapiens
atgttaaggatacctgtaagaaaggccttagtaggcctttctaagtctcctaaaggatgtgttcgaacaactgccacagcagcaagcaacttgcattcgagtattcgttgatggtcagtctctcatggctggaaccgggcacgaccgttctccaagcttgtgagacggattggcatgcagatccctcgattctgttatcatgaaaggttgtctgttgctggaaactgcaggatgtgccttgttgaaattgagaaagcccctaaggaccagtccatgatgtttggaaatgataggagccgatttttagaggggaagcgtgctgtggaagacaagaacattgggccattggtaaagaccatcatgacaagatgtatacagtgtactcgctgcatcaggtttgcaagtgagattgcaggagtagatgatttgggaacaacaggcagaggaaatgatatgcaagttggcacatacattgaaaagatgttcatgtctgaactgtctgggaatatcattgatatctgccctgtaggtgccctaacctctaagccctatgcctttactgcccggccttgggaaacaagaaagacagaatccattgatgtaatggatgcggttggaagtaatattgtggttagcacaagaactggagaagtgatgaggattttgccacgtatgcatgaggacatcaatgaagagtggatctctgataaaaccagatttgcctatgatgggctaaaacgtcaaagacttaccgagccaatggtcagaaatgaaaaagggcttttaacctatacttcttgggaggatgcgctctctcgcgtagctggaatgttgcagagttttcaaggcaaagatgtggcagcaattgcaggtggcttggtggatgctgaagccctggtagctctcaaagatttgcttaatagagtggactctgacaccttatgcactgaagaggtcttcccccactgcaggagctggcacagatttgcgttccaattatcttcttaatactacaattgctggtgtgggaagaggcagatgttgttcttctggttggtacaaacccacgtttttgaggcaccactgttttaatgctaggaatttcgaaagagctgggctgcataatgactttaaaagtggcccttattagggcagttccagtggaccttcacttacacatatgaccacctggggagactcccccaaaattcttcaaggacattgcttccgggaagcccatccatttagccaggtcctaaaggaagctaaaaaaccaatggtggtttttaggcagttctgcactccaaagaaatgatggagcagcaattcttgcagctgtttctagcattgcacaaaagattccggatgactagtggtgttactggtgattggaaagttatgaatatccttcataggattgcaagtcaagtagctgttttgggaccttggctataagcctggggtggaagcaattcggaagaaccctcccaaggtgctgtttctcctgggagcagatggaggttgtatcacacgacaggatttgccaaaggattgtttcattatttatctaaggacatcatggtgatgttggggctcccatagctgatgttattctcccaggagctgcttacacagagaagtctgctacatatgtcaacactgagggtagagctcagcagactaaggtagcagtgacacctcctggcttggcaagagaagactggaaaattataagagcactctctgagattgctggaatgactcttccatatgatactctggatcaagtaaggaacagattggaagaagtctctcctaatcttgttcgatatgatgatattgaaggggctaattacttccagcaagcaaatgagctctcaaagctagtgaaccagcagcttcttgctgacccacttgttccacctcagctaactataaaagacttctacatgacaggagaagtaaccgaaattaatgaagctcttgcagaaaatccaggacttgtaaacaaatctcgttatgaagatggttggctgatcaagatgacactgagtaacccttcataa

SEQ ID NO: 135643 - DNA, 2842 bp, Homo sapiens
  misc_feature (1)...(2842): n = a,t,c or g
tttccgttctcttggcccggctgacagagttagccgaggccgccatattgaataagcgacccggcctcctagggggtcgtcgtggtgcagacagtttagcagaacagcctccgcggctccggggagaagcaatatgttaaggatacctgtaagaagggccttagtaggcctttctaagtctcctaaaggatgtgttcgaacaactgccacagcagcaagcaacttgattgaagtatttgttgatggtcagtctgtcatggtggaaccgggaacgaccgtcctccaagcttgtgagaaggttggcatgcagatccctcgattctgttatcatgaaaggttgtctgttgctggaaactgcaggatgtgccttgttgaaattgagaaagcccctaaggttgtagctgcttgtgccatgccagtaatgaagggttggaatatcctaacaaactcagaaaaatccaaaaaggccagggaaggtgtgatggagttcttattagcaaatcacccattggactgtcctatttgtgaccagggaggtgaatgtgatctgcaggaccagtccatgatgtttggaaatgataggagccgatttttagaggggaagcgtgctgtggaagacaagaacattgggccattggtaaagaccatcatgacaagatgtatacagtgtactcgctgcatcaggtttgcaagtgagattgcaggagtagatgatttgggaacaacaggcagaggaaatgatatgcaagttggcacatacattgaaaagatgttcatgtctgaactgtctgggaatatcattgatatctgccctgtaggtgccctaaacctctaagccctatgcctttactgcccggccttgggaaacaagaaagacagaatccattgatgtaatggatgcggttggaagtaatattgtggttagcacaagaactggagaagtgatgaggattttgccacgtatgcatgaggacatcaatgaagagtggatctctgataaaaccagatttgcctatgatgggctaaaacgtcaaagacttaccgagccaatggtcagaaatgaaaaagggcttttaacctatacttcttgggaggatgctctctctcgcgtagctggaatgttgcagagttttcaaggcaaagatgtggcagcaattgcaggtggcttggtggatgctgaagccctggtagctctcaaagatttgcttaatagagtggactctgacaccttatgcactgaagaggtcttccccactgcaggagctggcacagatttgcgttccaattatcttcttaatactacaattgctggtgtggaagaggcagatgttgttcttctggttggtacaaacccacgttttgaggcaccactgtttaatgcatggattcgaaagagctggctgcataatgacttaaaagtggcccttataggcagtccagtggacctcacttacacatatgaccacctgggagactcccccaaaattcttcaagacattgcttcgggaagccatccatttagccaggtcctaaaggaagctaaaaaaccaatggtggttttaggcagttctgcactccaaagaaatgatggagcagcaattcttgcagctgtttctagcattgcacaaaagattcggatgactagtggtgttactggtgattggaaagttatgaatatccttcataggattgcaagtcaagtagctgctttggaccttggctataagcctggggtggaagcaattcggaagaaccctcccaaggtgctgtttctcctgggagcagatggaggttgtatcacacgacagngatttgccaaaggattgtttcattatttatcaaggacatcatggtgatgttggggctccccatagctgatgttattctcccaggagctgcttacacagancaagtctgctacatatgtcaacactgagggttaagcttcagccagcattatgttagcggtgaccactctctggcttgtcaagagaggactggtaaaattataagagcactctctgagattgctggaatgactccttcccatatgatactctggaatccaagtaaggaaccagattggaaagaagtcttctcctaatcttgttccgatatgatgatattgaagggggctaattacttccgacaagcaaatgaggctctcaaagctagtgaaccaggcagcttcttgctgacccacttgttcccacctcagctaactataaaagactttctacatgacagattcaattagcagagccctcacaggacaatgggcccaaatgtggtccaaagcctgtccacacagggtgcccccggcagtaggaggaacccatcccatatgctgaagccttcctacctagggatccccagttttgcccgcagataattaatgggccaactgtagtgcagtgatccctttacaaggtttatttcctttgtaaaaaaaaaataataataatttgaatcatgtaatatttaaggtcatactatgcctattctgaaaatgatatctagttatcaactttgcagtttgaaaaacatgtattgtgtgtaaaggttaaataacaaaactatgcagatgctcttaaaagcattgataacctttgtgaccgaacataaagagatccttaaattatgagttgttggcttatcttcataaataatttgtctgtaaaatggatgaaatgaaaagaggttcaattaaaacctacttttttctagtgctaaaggaaaagatttaagcaccttgtcaagctgggtaaataggaaaaatacataatcatgctcagatatgtatctaggataattataattaaaaataatcatagtaacaatg

SEQ ID NO: 135644 - DNA, 835 bp, Homo sapiens
atcagcttaggtagaacagttctcggtgagggccagctacatacctggctaagcgctgcccactgcagaaaagctcatcacccgggacctgatctccaggactcagaagcacttggaggaaggcctattcacttagaagcagttaccagtgctgggcagtgtcctccaagtgccagaggagtgctgtggagaaaagaagtccatggaagccaggagatgggcaagattttgcctcttcaaggtgaatgcggcttcaaggggctatctttgtgctcctgccccacctggggcccatcctggtctggctgttcactcgtgatcacatgtctggttggtgtgagggcccgaggatgctgtcctgggtgcccatttttacaaagtcttatttgcttgttacagacagccatctaattctgtcgtggggtgagtacttgtttctcacacatggccctggtacccaatggggtgggaacaagtcctctatatctgaattacctatgctgttcagctcaccatcagctggactgtcctggttctctttttcacagtccacaaccctggtctggtaaggcacacagtgctcagtagcagaagtaatgtgggagagggtgaaaccacctggctccagaagcacatactggctgccctgttactgctgccctacctagcctggctcaccgtgacttcagccctcacctaccacctgtggagggacagcctttgtccagtgcaccagcctcagcccacggagaagagtgactgaggccctagggcatgggagaggagggacgcccagggtggggaggaagagtctgcaagcagggctgtggagtta

SEQ ID NO: 135645 - DNA, 1497 bp, Homo sapiens
atgagcccctgcagcggcagcactctggcccttctgtccctgccagcctctgacctgggagacgtaggtggtgtaagcgtaaccgaagacatagcaggatctcttgtggaagcaggcacttggtggacacccaagcaagaagatgaacaactgttgagcaagggtgatatgctcttcactgagaaggtatacaggttgatgttggttaatttccacactggtacaaacattgctgtctccatgcaagaaaaaggtgaaggagcaggacaaattattccttgtcagtacctgttgcaacctgtgaagcatgaagatagagaaatctatccccagcatttaaaatccctggctttttcggcctttacccagtgtcggaggccacttccaacatcaaccaatgtgaaaacattgactggctttggtccaggtttagccatggaaactgcccttagaagtcctgatagaccagagtgtattcgactttatgcacctccttttattctggctccagtgaaggacaaacagacagagctaggagaaacatttggagaagctggacagaaatataatgttctttttgtgggatactgtttatcacatgatcaaaggtggattcttgcatcttgcacagatctatatggagaacttttagaaacttgtatcattaacatcgatgttccaaatagggctcgtcggaaaaaaagttctgctagaaaatttggtctacagaaactttgggagtggtgcttaggacttgtacaaatgagttcattgccatggagagttgtaattggtcgtctaggaaggattggtcatggagaattgaaagattggagctgtttgctgagtcgtcgaaacttgcagtctctaagtaaaaggctcaaagacatgtgtagaatgtgtggtatatctgctgcagactcccctagcattctcagtgcttgcttggtggcaatggagccgcaaggctcttttgttattatgccagattctgtgtcaactggttctgtatttggaagaagcacgactctaaatatgcagacatctcagctaaataccccacaggatacatcatgtactcatatacttgtgtttcctacttctgcttctgtgcaagtagcttcagctacttataccactgaaaatttggatttagctttcaatcccaacaatgatggagcagatggaatgggtatctttgatttgttagacacaggagatgatcttgaccctgatatcattaatatccttcctgcttctccaactggttctcctgtacattctccaggatctcattacccccatggaggtgatgcgggcaagggtcagagtactgatcggctactatcaacagaacctcatgaggaagtacctaatattcttcagcaaccattggcccttggttactttgtatcaactgccaaagcaggtccattacctgactggttctggtcagcatgtcctcaagcacaatatcagtgtcccctttttcttaag

SEQ ID NO: 135646 - DNA, 1734 bp, Homo sapiens
atgccggaggtggagcttgccagaactgatgaatccccagaaccactgccaatccccacatttttgttgggttatgattatgattatctggtgctttctccatttgctcttccttattgggagagacttatgctggaaccctatggatctcaaagagatatagcctatgttgtactgtgtccagaaaatgaagccttgttaaatggagcaaaaagcttttttagagatcttactgcaatatatgagtcctgtcgattaggtcaacatagacctgtttctcgactgttaacagatgggatcatgagagttggatctactgcatcaaagaaactatcagaaaagttggtagcagaatggttttctcaggcagctgatggtaacaatgaagcattttctaaactcaagctttatgcacaagtctgcagatatgacctaggtccttatcttgcttccctgccattggacagctctctactttcccagccaaatttagttgcccctacaagtcagtctttgattactccacctcagatgacaaatactggaaatgctaatactccatctgccaccttagcatctgcagcgagcagcactatgacagtgacttcaggtgttgccatatctacttcagttgccacagctaattcaactttgaccacagcttcaacttcatcttcatcatcctccaacttgaatagtggagtatcatcaaataaactaccttcgtttccaccctttggcagtatgaacagtaatgctgcaggatccatgtctacacaagcaaatacagttcagagtggtcagctaggagggcaacagacatcagctctacagacagctgggatttctggagaatcatcttcacttcccactcagccgcatcctgatgtgtctgaaagcacgatggatcgggataaagtgggaatccccacagatggtgattcacatgcagtcacgtatccacctgcaattgttgtttatataattgatccttttacatacgaaaatacagacgagagcactaactcttctagtgtgtggacattggggctacttcgatgctttctagaaatgggccagactcttcctcctcatatcaagagtactgtttctgtacagaccagtacggtggccgacgggagtcagacgctggggatgaatgaaggtgctgggtgcaggttgaaaaagtctcccgcttttccgttcctacagtcccggttctgcctttgtgtggtgcccccatccttcccactttgtatcgacaacccggatcaacaaacagtaataatgactgaatgtacaagtcttcagtttgtcagcccttttgcttttgaggcaatgcagaaggtggatgttgtttgcctggcatctttaagtgatccagaattaagacttcttctgccctgtttggtacggatggcactttgtgcacctgctgaccagagccaaagctgggctcaggataagaaactcatccttcgccttctttctggagtggaagctgtcaactccattgttgcattgttgtccgtggactttcatgctttagaacaagatgccagcaaagaacagcagcttaggcataaacttggaggaggcagtggagagagcatcctggtatcacagcttcagcatggactgacgttagagtttgaacacagtgattcacctcgtcgattgcgtcttgtgcttagtgaactgttggcaattatgaacaaggtgcatttcttttaa

SEQ ID NO: 135647 - DNA, 8785 bp, Homo sapiens
ccccggagtctgtgtttctctctctgggcggaggcggcggtactggcggatggtgggttgaggcgccggcggcggctgctgcgagggacgatgagtgcctccttcgtgccgaacggggccagcctggaagattgtcactgtaacctcttctgcctggctgacttgacaggaattaagtggtaaaaatatgtatggggaggcccaacttctgcccctattctgtttcctgtgacagaagaacaccccattttgagcagttctagtcgctgccttacggcacatgtacttggtgttcggcggcgagatcaaagacctgaaagaagagaaattgtgaatattttggtggggtgaagaccccagttttgctgaccttattcaccatgacttatcagaagaagaagatggagtgtgggagaatggactttcctatgaatgccgtactctgcttttccaaagcagttcacaatctattggaacggtgtttaatgaacaggaattttgtacgtattggcaagtggtttgtaaagccttatgaaaaagatgaaaaacctataaataaaagtgaacacttgtcctgctccttcacctttttcttgcatggagacagcaatgtttgtaccagtgtggaaattaaccaacatcaacctgtataccttctcagtgaagagcatatcacccttgctcaacagtctaatagcccatttcaagttatcttatgcccatttggactaaatggcactctcacaggacaggcattcaagatgtctgattcagctacaaaaaaattaattggtgaatggaaacagttctatcctatctcatgttgcttgaaggagatgtctgaagaaaaacaggaagatatggattgggaagatgattctttagctgcagtagaagttcttgttgctggtgtccgaatgatctacccagcatgctttgttctagtccctcagtcagacattcctactcctagccctgtgggatccactcactgttcatcttcttgcttgggtgtccaccaagtgcctgcttccacaagagatcctgctatgtcttcggttacgcttacaccacctacgtctcctgaggaagtccaaacagttgatcctcagtctgtccagaagtgggtcaaattttcttcagtatctgatggcttcaactccgatagtactagccaccatggtgggaaaatacccagaaaattagcaaatcatgtggtggatagagtttggcaagaatgcaatattgaacagagcacagaacaagaggaagtattctgcttcatcaggtggtctatgcgaagaagcgacagctgctaaagtggcatcctgggattttgttgaagccacacaaagaacaaattgcagttgtttgaggcacaaaaaatctcaagtcaagaaatgctggacaacaaggacaggcaccatctttaggtcagcaacaacaaatacttcctaagcacaagaccaatgagaagcaagaaaagagtgaaaagccacagaaacgccccttgactccttttcaccatcgtgtggtctgttagtgatgatgttggcatggaccgcagattccagccagccaaagacttgtgactctctgctcccagacagtcaaagtgagattttcaaatatccggaactaatgatgtagcaaaagactcctcagatgcatggcaccgaaatggcaaattcacctcaaccacccccacttagtccctcacccttgtgatgtggttgatgaaggagtgactaaaacaccttcaactcctcagagtcaacatttttatcaaatgccaacaccagatcccttggttccttctaaaccaatggaagataggatagacagtttgtcccagtctttcccacctcaatatcaggaagctgtagaacctacagtatatgttggtacagcagtaaacttggaagaagatgaagccaatatagcctggaagtattacaagttcccaaagaaaaaagatgtagagtttttaccacctcaacttccaagtgataaattcaaggatgatccagttggaccttttggacaggaaagtgtaacatcagttacagagttaatggtgcaatgtaagaaacctttaaaagtttctgatgaattagtgcagcaatatcaaattaaaaaccagtgtctttcagcaatagcatctgatgcagaacaagaacctaaaattgatccatatgcatttgttgaaggagatgaggaattcctttttcctgataaaaaagatagacaaaatagtgagagagaagctggaaaaaaacacaaggtagaagatgggacatctagtgtaacagtgttatcacatgaagaagatgctatgtcattatttagtccctctatcaagcaagatgctccacgccctactagtcatgcccgtcctccatcaacaagtttgatttatgactcagacctggctgtctcttatactgaccttgataatctcttcaattctgatgaagatgaactaacacctggatctaaaaaatcagcaaatggatcagatgataaagccagctgcaaggaatcaaagacaggaaatctggacccgttatcttgcataagcactgcagatcttcataaaatgtatcctacaccaccatcattggaacaacatattatgggattttccccaatgaatatgaataataaagaatatggtagtatggatacaacacctggaggaactgttctagaaggaaatagttctagtataggagcgcagttcaaaattgaggttgatgagggattctgtagccccaaaccttctgaaattaaagatttttcttatgtctataagcctgaaaattgtcaaattctagtgggatgttccatgtttgcacctctaaaaactctaccaagccaatatctgccccctatcaaattgccagaagagtgtatttaccgtcagagttggactgttggaaaattggaattgctttcttcagggccttcaatgccattcatcaaagagggtgatggaagtaatatggatcaagaatatggcactgcttatacacctcaaactcatacttcttttgggatgcctcctagcagtgcacctcctagtaacagcggagcaggaattcttccttctccatccacccctcggtttccaactccaaggactccaaggactcctcggactcctcgtggagctggtggacctgctagtgctcaaggttcagtcaaatatgaaaattcagacttgtattcaccagcttctaccccatctacatgcagaccccttaattctgttgaacctgcaactgtcccttccatccctgaagcacacagtctttatgtaaacctcatcctttcagaatcagttatgaatttgtttaaagactgtaactctgatagttgttgcatctgtgtttgcaacatgaacatcaagggtgccgatgttggagtttacattccagatccaacgcaggaagcacaatataggtgtacctgtggcttcagtgctgtcatgaacagaaaatttggaaacaattcaggattatttcttgaagatgaactagatatcataggacgcaatacagactgtggcaaagaagcagaaaaacgttttgaagctctcagggctacctctgctgaacatgttaatggaggactaaaggaatctgaaaaattatctgatgatttgatattattgctacaagatcagtgcactaatttattttcaccctttggagcagcagaccaagatccttttcctaaaagtggtgtaattagcaattgggtacgtgttgaagagcgtgactgttgcaatgactgctaccttgcattagaacatgggcgtcagttcatggataacatgtcaggaggaaaagttgatgaagcacttgtgaaaagttcatgcttacacccctggtccaaaagaaacgatgtgagtatgcagtgctcacaggatatacttcgaatgctcctctctcttcagccagttcttcaggatgccattcagaaaaaaagaacagtaagaccttggggtgttcagggtcctctcacttggcaacaatttcataaaatggctggccgaggctcttatggaactgatgaatccccagaaccactgccaatccccacatttttgttgggttatgattatgattatctggtgctttctccatttgctcttccttattgggagagacttatgctggaaccctatggatctcaaagagatatagcctatgttgtactgtgtccagaaaatgaagccttgttaaatggagcaaaaagcttttttagagatcttactgcaatatatgagtcctgtcgattaggtcaacatagacctgtttctcgactgttaacagatgggatcatgagagttggatctactgcatcaaagaaactatcagaaaagttggtagcagaatggttttctcaggcagctgatggtaacaatgaagcattttctaaactcaagctttatgcacaagtctgcagatatgacctaggtccttatcttgcttccctgccattggacagctctctactttcccagccaaatttagttgcccctacaagtcagtctttgattactccacctcagatgacaaatactggaaatgctaatactccatctgccaccttagcatctgcagcgagcagcactatgacagtgacttcaggtgttgccatatctacttcagttgccacagctaattcaactttgaccacagcttcaacttcatcttcatcatcctccaacttgaatagtggagtatcatcaaataaactaccttcgtttccaccctttggcagtatgaacagtaatgctgcaggatccatgtctacacaagcaaatacagttcagagtggtcagctaggagggcaacagacatcagctctacagacagctgggatttctggagaatcatcttcacttcccactcagccgcatcctgatgtgtctgaaagcacgatggatcgggataaagtgggaatccccacagatggtgattcacatgcagtcacgtatccacctgcaattgttgtttatataattgatccttttacatacgaaaatacagacgagagcactaactcttctagtgtgtggacattggggctacttcgatgctttctagaaatggtccagactcttcctcctcatatcaagagtactgtttctgtacagattattccttgtcagtacctgttgcaacctgtgaagcatgaagatagagaaatctatccccagcatttaaaatccctggctttttcggcctttacccagtgtcggaggccacttccaacatcaaccaatgtgaaaacattgactggctttggtccaggtttagccatggaaactgcccttagaagtcctgatagaccagagtgtattcgactttatgcacctccttttattctggctccagtgaaggacaaacagacagagctaggagaaacatttggagaagctggacagaaatataatgttctttttgtgggatactgtttatcacatgatcaaaggtggattcttgcatcttgcacagatctatatggagaacttttagaaacttgtatcattaacatcgatgttccaaatagggctcgtcggaaaaaaagttctgctagaaaatttggtctacagaaactttgggagtggtgcttaggacttgtacaaatgagttcattgccatggagagttgtaattggtcgtctaggaaggattggtcatggagaattgaaagattggagctgtttgctgagtcgtcgaaacttgcagtctctaagtaaaaggctcaaagacatgtgtagaatgtgtggtatatctgctgcagactcccctagcattctcagtgcttgcttggtggcaatggagccgcaaggctcttttgttattatgccagattctgtgtcaactggttctgtatttggaagaagcacgactctaaatatgcagacatctcagctaaataccccacaggatacatcatgtactcatatacttgtgtttcctacttctgcttctgtgcaagtagcttcagctacttataccactgaaaatttggatttagctttcaatcccaacaatgatggagcagatggaatgggtatctttgatttgttagacacaggagatgatcttgaccctgatatcattaatatccttcctgcttctccaactggttctcctgtacattctccaggatctcattacccccatggaggtgatgcgggcaagggtcagagtactgatcggctactatcaacagaacctcatgaggaagtacctaatattcttcagcaaccattggcccttggttactttgtatcaactgccaaagcaggtccattacctgactggttctggtcagcatgtcctcaagcacaatatcagtgtcccctttttcttaaggcctctttgcacctccacgtgccttcagtgcaatctgacgagctgcttcacagtaaacactcccacccacttgactcaaatcagacttcagatgtcctcaggtttgttttggaacagtacaatgcactctcctggctaacctgtgaccctgcaacccaggacagacgctcatgtctcccaattcattttgtggtgctgaatcagttatataactttattatgaatatgctgtgatcttcatttgatggaactgtgcaagaaaagaacaaggaaaaatggatgtttcgctgcaggattaagttacaattatcttctcagtgaaggtcatttgtgatggggtctaattcttattacttcaacaaatattgttttgacttggggggaggggctataaccctgctatttttcattgactctattgaactctttaggatgatgactgatcatacaaaacgtattataacattttcgtagcaaaattaaccttttttttttccagtcacagtatttgtgaaaagtaatgagccatagtacccagtcatgttaaatgaatattaaaagcatggagaaggaaacatgaggagcaatgaatttcaacatatggcttcagaacatcaagatgttcttgtattggattatagtatctagtattcaaaaatgcctgcatctcttctcttatttattgtaagtttttaaatgtataaattgtcttatatttcttaacctcttttataaaaattttcctagaaggtttatactgccttcttgctttaaagcctattggtctaaaatatatgtaatcgtcttaattaaaaagttgcagtagggtcgcttttagagtattatttttttgtaagggggtgggtgggacagtaaatttgtattgtctcgatgtacagtttaacggggatagagggggaataatgtccataccattgtgtgtggaggatttacagctaagctgtagttgcagagtacatgtacagtaatgaagttcactgtgtttataaattgaaaaggtaccaggtcttacagcattttatatatcacatctttacagaataacatgatggcaatatacaagtggtattgttaggtggtttaacttagaataaaatgagaattcttcagttatattttgtactatggtttagggctatgactaatatttcaggccatttccggtgaaagaaacttagttttacaagaaaaaccatttgctactgaattgcttaaactaattttagtgtttaatgttacatgcttaaatttttttcagttttaacagtgggcatattttaggcatgggaaatattattatggaatttattttccagggatctgctataaggttgaaatttagcccagctctaggcattttacaaattatttttccaaggcagtccattcttgattgtttgacttttttttttaaaatttaaagattggggaatgtatgtgagagtatgccatatgtatgggtgtgtgtgtgtgcgcgccaatccaaactgtgggtggtaaaataggatccccagtgaattcctgggtattcaggactctattcccactaggtggaaaggaacccttttttttaaacttcccttgccttttttatttatttaattttcttgggtttgggagatgtccagtccccaaacaccaggagtctggtacctttctataacacagctcagattaggggtagggcatatgcccaagggggttctcaccctcccctaaagaaggggacttggaattttaggggactttaattcacccctcccttcaataccaactttcccccttccttggtttgcacatgccaagataacggcttttatgcaggctgtacccccttgaaaaatcctttctacagtgctgctcgcaaagagagcccacggtcgcctccctacccggcattgccgacctggaattcacagtcgcccggagtctacctagcttttcttgggaaggcagtctaggccaaaatttcctatttggtaccgttcacctaattatctaccagggacaaaatccagttgtatttaccaaaaactctacttccaggtgtttgttttagttttttttttttactgaaacttgtttttggtgaatacctctgtgccttagaattaaatatcactttccttatgaacaacataaccttccttcagattgtgtatatgaaaacattagcaagtcttgttttttcctatgaagcaaacacgaattggtgacaaaggttgtcaatcatttcttcaaaattataatgcagttctaatggtcagcatattttgatattaaatttaaagatcacctctctgcatttgtttttaaattatgctaatacaccacacattatgttggtatgttttgttctgtactttcttt

SEQ ID NO: 135648 - DNA, 1936 bp, Homo sapiens
tactctggctttgtctgggtttatgactttttaaaaatcatcatgttcttatttatctatttatgagacagggtctttttctgtcgcccaggctggaatgcaatggcgagatgatggctcactgcagcctcaacctcccgggctcaagtgatcctcccaccttggcctcccaagcagctgggactataggccccagtagtcactacacctggctaacttatcatgtttatttaatgtgatacaatgaaaccctgatttgatggccacctacatgtatttcagtcctaaaatcccagccaaaaacttatgcagtacatcctaaatggcactgccacttacagaagcgattcagaaaggggtaaacttccaaaaagtccagaaatccattcttagtcctgcttcactgcacaaagacatgggaatttaacacatcactcactggaaagatgctgcccctgcaaatgcgcaaccctgttaactacttagattcaacccacactaggccccacttagggatctccaggcacagacaggatgcgctgagtagggaacatgtccccacactactagggacacccatagagggacggtcttcaccaactgcctgatcaaacctgagttacaaacgggaaagcacagtgtccaagaaacgactagaggctacactggatacacaagtgaacatcaagatgaaccaggtaccaatgatggaagcaccgaagctgcaataccttttacttacaatgggagatctagtattgcagtcagagatcagtagtgaacagggtgatgtccttattgtccgtgtcactgacaccacgtcactggtcgtgctggtcggtcggtgtattgcgccccccttttccttccttcctatatcaaaacccgagctcaccagtgtacgcaacgcgtttgcggcatacatgtttccattcccacggaagagggcgcgccgtggctgcttgcagttccgcaagcggctacatcacagagctcagcgggcgggtagctacgcgtttacggctaagcgtttgatcggcggccggcgtaggcggctacttgcaaatcctgcccaagccgtggcccacgcaaaatcggcgctatacggcggatggcagcgtcaccgccaaaaggaaatggcccttaaaatccatctgccagaggcggttcggcgcgtcgtgttcgaccggcccgtggcgggaatgcccgcgttcatgacggtcatgggccatacgcagcagggccgtgatgtcgtcagatgagcggttcggggaatggtgcggaatgcgcgggcggtcctgaagaccggcggcaccttcctgagcccagcgctggagccacttgtagccggtggcagcggtggcagttctcccagctcggcgccgaagagcgtaaagccattgcccgctttgcatcgatcatgtcgatcgtcgcgtgccggtgctgatcggcaccggcggcacaacgcccgggaaaccatcgaactcagccagcacgcgcagcaggcgggccggacggcatcaaccatcgactccgtcgcccacctgcgcagcatgatccataccgtcaaagtgcccatccgcacttcaccgtgctctgcggctacgacgatcatctgttcataccctgctgctcggcggcgacggggcgatatcggcgagcggcaactttgccccgcaggtgtcggtgaatcttctgaaagcctggcgcgacggggacgtggcgaaagcggccgggtatcatcagactgcatcaattccggaccagctcattcatccgtacgagtcgaggctcttcaaatgtcagcatgtcctcacacgcgggatcacatccttttaattactgtgtcctcctggctctctacgtcgccagggcatttctacttaccattcgctacttcataattagttccttcgttgtatttcggtatcactaa

SEQ ID NO: 135649 - DNA, 514 bp, Homo sapiens
  misc_feature (1)...(514): n = a,t,c or g
tcgtcggggttncntgcttcaacagtgcttggacggaacccggcgctcgttccccaccccggccggccgcccatagccagccctccgtcacctcttcgccgcctctccttagtcgccgccatgacgaccgcgtccacctcgcaggtgcgccagaactaccaccaggactcagaggccgccatcaaccgccagatcaacctgggagctctacgcctcctacgtttacctgtccatgtcttactactttgaccgcgatgatgtggctttgaagaattttgccaaataatttctttcaccaatnttcatggagggagaggggaacatgcttgaggaaattgatggaagcttgcagaaaccaangaggttggcccgantctttcnttcagggttanttcaaggaaaaccaggatttttgatggatttggggnagaagnggggttgaantgcanttgggattgttgcatttaacaattttgggaaaaaantgttggantcagttcaattatttgggaat

SEQ ID NO: 135650 - DNA, 1652 bp, Homo sapiens
aattccggcggaagtggtggaggaacttccggcagcggcagctcaagtggccaaggcaagatgggtcaaagtcagagtggtggtcatggtcctggaggtggcaagaaggatgacaaggacaagaaaaagaaatatgaacctcctgtaccaactagagtggggaaaaagaagaagaaaacaaagggaccagatgctgccagcaaactgccactggtgacacctcacactcagtgccggttaaaattactgaagttagagagaattaaagactatcttctcatggaggaagaattcattagaaatcaggaacaaatgaaaccattagaagaaaagcaagaggaggaaagatcaaaagtggatgatctgagggggaccccgatgtcagtaggaaccttggaagagattattgatgacaatcatgccatcgtgtctacatctgtgggctcagaacactaccgtcagcattctttcatttgtagacaaggatctgctggaacctggctgctcggtcctgctcaaccacaaggtgcatgccgtgataggggtgctgatggatgacacggatcccctggtcacagtgatgaaggtagaaaaggccccccaggagacctatgcagatattggggggttggacaaccaaattcaggaaattaaggaatctgtggagcttcctctcacccatcctgaatattatgaagagatgggtataaagcctcctaagggggtccatccttttggtcccacctggccacgggtaaaacctttttgcccaaggcagtagcaaaccaaaccctcagccactttcttgagagtggttggctctgaacttattcagaagtacctaggtgatgggcccaaaacccctcccgggaattgttccggagtttctgaagaactggccccgtccctccggtttattgatagaattttgcccccattgggacacaacagatatgacctccaattcctggtgtgagaagagaattacagcgaacaatgtttggaactgctgaacccagttgggatggatttgattcttaggggagattgtgaaagttatcatggccacaaaccgaataggaaacttggatcccagcacttatccagacaaggccgcattgacaggaagattgagttccccctgcctgatgaaaagacgaagaagcgcatctttcagattcacacaagcaggatgacgctggctgatgatgtaaccctgggacgacctgatccatgggctaaagattgacctctctggtgcttgacattcaagggcaatctgtacagaagctggtcttgatgggcctttaaggagaacgtagaatgaaagtaacaaatgaagacttcaaaaaatctaaagaaaatgttctttataagaaacaggaaggcacccctgagggggtggtatctctaatgaaccatggcttgtcatcaggaaaatggttgggagatttctcaatccctgaaagggatgaggttggggggagttgcccagaggaatccctgttcccactgattttttattagcaaaacatcctgtgtcttttggagtacgatgtgtaagtgcccattgggtggcctgttggtcactgtgcatcagtctgctttcccaataaagggtgctttttcccaaacaaaaaaaaaaaaaaaaa

SEQ ID NO: 135651 - DNA, 1279 bp, Homo sapiens
agcgatagaacactgtcagagtggtgacaaccccgagagtcgtcggggtttcctgcttcaacagtggcttggacggaacccggcgctcgttccccaccccggccggaccggccatagccagcctcccgtcacttttcaccggcacccctcggattgccaaaggtcccccgccggccgcttcaagggcgggccaagccaccgcggccagccgccgccttttcataagtcgccgcccatgacgacggcgtcccacctcgcaaggtgcgccagaacgtaccaccagggactcagaggccgccatcaaccgcacagatcaacctggaggctctacgcctcctacgtttaccctgtccatgtcttactactttgaccgcgatgaatgtggctttgaagaacttttgccaaatactttcttcaccaatctcatgaggagaggggaacattgctgagaaaacttgatgaaagcttgcagaaccaacgaaggttggccgaatctttcctttcaggatattaaagaaaccaagacttgtgatgacttgggagagcgggctgaatgccaatggaagtgtgcattacatttcgaaaaaaaatgttgaatcaagtcactactggaacttgcacaaactgggccactgacaagaactgacccccaatttgtgtggacttcatttgagacacatttaccttgaatgagcagggtgaaaggccatcaaaagaatttggggtgaccacggtgacccaaactttggcgcaagatgggaagcgccccgaatcttggctttggcgaatatctcttttgacaaagcacaccctggggagacagtgataatgaaagctaagcctcgggctaatttccccaatagccgtggggtgactttcctggtcaccaaggcagtgcatgcatgttggggtttcctttaccttttctataagttgtaccaaaacatccacttaagttctttgatttgtaccattccttcaaataaagaaatttggtacccaggtgttgtctttgaggtcttggatgaatcagaaatctatccaggctatcttccagattccttaagtgccgttgttcagttctaatcacactaatcaaaaagaaacgagtatttgtatttattaaactcattagtttgggcagtatactaaggtgtggctgtcttggattcagatagaactaagggttcccgactctgaatccagagtctgagttaaatgtttccaatggttcagtctagctttcacagtttttatgaataaaaggcattaaaggctg

SEQ ID NO: 135652 - DNA, 390 bp, Homo sapiens
ggcctacctcaccatccaagagctgctggccaagcgattctccgcctttggagatgctgggacccagaaggacgttcgtgctgtcagccttgcagccttctcctactcattccagctccaatacccagcggctgccagaccgagtgaccggcgtggacacagaccctcacttcatcatccacgtgccccagaaagaggacaccctgtgcttcaacatcaatgaggagcctggaggtatcctgagcctggtacaggaccccaacacaggcttctcagagaatggacagctcattggcaacaaggccatgagccctgggctgcatgacggcacgtacttcgggcgggtgggaatcgcaaaccctgccacggactttcagttggaagtgactg

SEQ ID NO: 135653 - DNA, 638 bp, Homo sapiens
tttcagttggaagtgactcctcagaacattacgctgaaccccggctttggtgggcctgtgttttcctggagggaccaagctgtgctgcggcaggacggggtggtggtgaccatcaacaagaagaggaacctggtggtgtctgtggacgacggtggcacctttgaggttgttttgcaccgagtgtggaaggggagctcggtccaccaggacttcctgggcttctatgtgctggacagtcatcggatgtcagcccggacgcacgggctgctggggcaatttttccaccccatcggttttgaagtgtctgacatccacccaggctctgaccccacaaagccagatgccacgatggtggggtttgcaaaaagactacagcaaggacccgtggcatggggccgaggtgtcctgctggttcattcacaacaatggggctggactcatcgatggtgcctacactgattatatcgtccccgacatcttctgagccctctggccagcacgcctgtcctcccccggggccaaggcagaggaggaggacgacatcctgacctgctgctgaggctgtacctccttgactaagctggttccttgtgtcaaagcacctcatgccttccattaaagagaggccgtgtccaaaa

SEQ ID NO: 135654 - DNA, 1524 bp, Homo sapiens
acaaaggaggcccttctcagaatcctggaagatatgaaagaggaagactatctgaatttcatcctgttcagtggagatgtgtccacatggaaagagcacttagtccaggccacgcccgagaacctccaggaggccaggacgtttgtgaagagcatggaggataaaggaatggacaatttcctcatgagaaaggggaagacgaaagctaagctagaagaaaggggagccaaccaggactcgaggaatgggagcaaggtccgctaccggagggccgcatcccacgaggagtctgagtctgaggctgctgcctgcatacgtgatgccatggcctactcagtgcatcataacctgaggtgcctggtgtcagttgattctagtgttggtgaaggtttcattgataactgggagcaggagcttcccgtgtctgctgcgtctgattatggcaagctcactgggcccttgcagcaaactcagagaggggctaccacaggttcacaggtggagaaagtgaggtgctggcagggccagaaaatcaactgtgactcctctgctgttgcacaaattcagcagccagtccagggggtcatgtcccagaaggccagacacacttacctggtggccaagcccccttcttccgggaagccgctaggggcctcggggagaactatggagcaattcaccatccacctcaccgtcaatccccagagcaaggtcacgtttcagctgacttatgaggaagtgctgaagagaaaccatatgcagtatgaaattgtcatcaaagtcaagcccaagcagctggtgcatcattttgagaccaaggaggcactccttaaaattctgggggacatgcagccaggggactactttgacctggttctttttgggactcgagtacaatcgtggaagggctcgctggtgcaagcatctgaggccaacctacaagcagctcaagactttgtgcggggcttttccctggatgaggagcaggagcttcccgtgtctgctgcgtctgattatggcaagctcactgggcccttgcagcaaactcagagaggggctaccacaggttcacaggtggagaaagtgagcaagaacgcccatggcgaggagaaggagaacctcacggcccgggccctggacctgtccctcaagtatcactttgtgactccactgacctcaatggtggtgaccaagcctgaggacaacgaggatgagagggccattgccgacaagcctggggaagattctctgggcccgtccgttgttctccatggacatgacctccagaaagttaaagtccacattgtggccgaaacccaggttgtagagcgggaacctgccccggatggcgttgcggacgttcttgaggatttgggaacggccaccaacgacctgaccttcacagaggaggtggacatgaaggagatggagaaggccctgcaggagcgggactacatcttcgggaattacattgagcggctctgggcctacctcaccattgagcagctgctggagaagcggtga

SEQ ID NO: 135655 - DNA, 840 bp, Homo sapiens
atgcttcgtgatctgctcaagaacgttgatcttaaagggttcgagcctgatgtacgtattttgcttaccaaatacagcaatagtaatggctctcagtccccgtggatggaggagcaaattcgggatgcctggggaagcatggttctaaaaaatgttgtacgtgaaacggatgaagttggtaaaggagatcccctgggggacatgcagccaggggactactttgacctggttctttttgggactcgagtacaatcgtggaagggctcgctggtgcaagcatctgaggccaacctacaagcagctcaagactttgtgcggggcttttccctggatgaggccacaaacctgaatggaggtttgctccggggaattgagatcttgaaccaagttcaggaaagcctcccagaactcagcaaccatgcctcaatactcatcatgttgacagatggcgatcccacagaggatcccccagtatttattcgcgataagctcatggagcggcgtaaccgtcgcacaggaaggacagagaaagcgcggatctgggaagtgacggacagaacggtcaggacctggattggggaggcggttgccgccgctgctgctgacggtgtgacgttctctgttccggtcacaccacatacgttccgccattcctatgcgatgcacatgctgtatgccggtataccgctgaaagttctgcaaagcctgatgggacataagtccatcagttcaacggaagtctacacgaaggtttttgcgctggatgtggctgcccggcaccgggtgcagtttgcgatgccggagtctgatgcggttgcgatgctgaaacaattatcctga

SEQ ID NO: 135656 - DNA, 416 bp, Homo sapiens
gcgaggtgagggccaacctgtcatcccaggccctgcggatgtggctggactatgggtttgtgaccccactgacctccatgagcatcaggggcatggcggaccaggacggcctgaagcccaccatcgacaagccctcagaggattctccgcctttggagatgctgggacccagaaggacgttcgtgctgtcagccttgcagccttctcctactcattccagctccaatacccagcggctgccagaccgagtgaccggcgtggacacttgagtagtgacttagccttatgtactctgttggaatttgtgctagcagtttgagcactagttctgtgggcctatgaagttaatgctgcttattggctcattctgacttcatggagaattaatcccacctttaagcacaggctactaagtg

SEQ ID NO: 135657 - DNA, 462 bp, Homo sapiens
ggcacgagagtcatcaaacggatcagcagctccagggaaggcctggctgtcccgggtctaaatgccactccccctcccatcagcgttcgtgctgtcagccttgcagccttctcctactcattccagctccaatacccagcggctgccagaccgagtgaccggcggcttctcagtgaatggacagctcattggcaacaaggccaggagccctgggcaggcatgacggcacgtacttcgggcggctgggaatcgcaaaccctgccacggactttcagttggaagtgactcctcagaacattacgctgaaccccggctttggtgggcctgtgttttcctgggagggaccaagctgtgctgcggcaggacggggtggtggtgaccattcaacaagaagaggaacctggtggtgtctgtggacgacggtggcacctttgaggttgttttgcaccgagtgtggaaggg

SEQ ID NO: 135658 - DNA, 3054 bp, Homo sapiens
  misc_feature (1)...(3054): n = a,t,c or g
ggtctgactgaggtgacagggcagcaggagccttagagcatggacggtgccatggggcctcgggggctgctgttgtgcatgtacctggtatctctcctcatcctgcaggccatgcctgccctgggctcggctacaggcaggtccaagagcagcgagaagcgacaggctgtggacaccgctgtcgatggcgtgttcatccggagtttgaaagtcaactgcaaagtcacctctcgcttcgcccactatgttgtcaccagccaagtggtcaacactgccaatgaagccagggaagtggccttcgacctggaaatccccaagacagcattcatcagtgactttgccgttacagcagatggaaacgcatttatcggagacataaaggacaaggtgactgcatggaagcagtaccggaaagcagctatctcatgagagaaagccaggccttgtcagggcctcggggagaactatggagcaattcaccatccacctcaccgtcaatccccagagcaaggtcacgtttcagctgacttatgaggaaatgctgaagagaaaccatatgcagtatgaaattgtcatcaaagtcaagcccaagcagctggtgcatcattttgagattgatgtggacatcttcgagccccaggggatcagcaagctggatgcccaggcctctttcctgccgaaggaactggcagcccaaactatcaagaagtccttctcaggaaaaaagaccagtaatggctcacactctcgacggttccagggtcatgtgctgttccgtcccaccgtgagccagcagcagtcctgccccacatgctctacatccttactgaacgggcacttcaaggtgacctacgatgtcagtcgagacaagatctgcgacctcctggtggccaataaccactttgcccacttctttgccccccaaaacctgacaaacatgaacaagaacgtggtttttgtgattgacatcacgtggctccattgagaggccagaaagtgaagcagaccaaggaggcactccttaaaattctgggggacatgcagccaggggactactttgacctggttctttttgggactcgagtacaatcgtggaagggctcgctggtgcaagcatctgaggccaacctacaagcagctcaagactttgtgcggggcttttccctggatgaggccacaaacctgaatggaggtttgctccggggaattgagatcttgaaccaagttcaggaaagcctcccagaactcagcaaccatgccttcaatactcatcatgttggacagatggcgatcccacagagggggtgacggaccgttcccaaatcctcaagaacgtccgcaacgccatccggggcaggttcccgctctacaacctgggtttcggccacaatgtggactttaactttctggaggtcatgtccatggagaacaacggacgggcccagagaatctacgaggaccatgatgccacccagcagctgcagggtttctacagccaggtagccaaacccctgctggtggatgtggatttgcagtacccccaggatgctgtcttggccctgacccagaaccaccataaacagtactacgaaggctcagagattgtggtggccgggcgcattgctgacaacaaacagagcagcttcaaggctgatgtgcaggcccatggggagggacaagaattcagtataacctgcctagtggatgaggaggagatgaagaaactgctccgagagcgtggccacatgctggagaaccacgtcgagcgcctctgggcctacctcaccatccaggagctgctggccaagcggatgaaggtggacagggaggagagggccaacctgtcatcccaggccctgcagatgtcgctggactatgggtttgtgaccccactgacctccatgagcatcaggggcatggcggaccaggacggcctgaagcccaccatcgacaagccctcagaggattctccgcctttggagatgctgggacccagaaaggacgttcgtgctgtcagccttgcagccttctcctactcattccagctccaatacccagcggcctgccagaccgagttgaccggcgtgggacacagacccttcaatttcattcattccacgtgccccagaaagagggacaccctgtgctttcaacatcaatgaggagcctgggtgttatcctggagcctgggtacagggaccccaacacagggtttttcagtggaatgggacagctcattgggcaacaagggccagggagcctgggggaaggcattgacgggcactaatttcggggcggctggggaattcgcaaaccctgccacggaacttttcagttgggaagtgactccttcagaacatttacggttgaaccccggtttttggtgggcctgttttttcctggggagggaccaagtttttctttccggcagggacggggtggtggtgaccatcaacaagaagaggaacacctgtggtgtctgtggacgacggtggcaccttttgaggttgtttttgcaccgagtgtgggaaggggagctcgggtcnaccaggacttcctggggcttctaatgtgctgggacaagtcaatcgggatgtcaagcccgggacgcaagggctgctgggggcaaatttttccaccccattcggtttttgaaagtgtctgaacatcccaccccagggttccgacccccacaaaagcccaaatgcccacgatggtggttaggaacccgcccggcctcacggtcacccaggggtttgcaaaaagacttacagcaaggacccgtggcatggggccgaggtgtcctgctggttcatttcacaacaatggggcttgaattcaccgattgtgcctacactgattatattcgtccccgacatcttctgagccctctgggccagcaacgcctgttccntgcccccgggggccaaggcagaggaggaggacgacatcctgacctgctgctgaggctgtacctccttgacctaagctggttcctttgtgtcaaagcacctcatgccttccattaaagagaggccgtgtccaaaaaaaaaa

SEQ ID NO: 135659 - DNA, 1011 bp, Homo sapiens
atggccacacaccccgatggcttccggcttgagggacccctggctgcagcccacagccctgggccttgcactgtgctctacgaaggccctgtccgtgggctctgcccctttgccccgcgaaattccaacaccatggcggcggctgccctggctgcccccagcctgggcttcgatggggtgctcggggtgctcgtggctgataccagcctcacggacatgcacgtggtggatgtcgagctgagcggaccccggggccccacgggccgaagctttgctgtgcacacccgcagagagaacctgccgagccagcgcggagccctccttatggacctggagaccccagaggagatgcaggctcggagcctgggcaggcccatcaaatcctcaaagcagtacctgcggcaggtcattgcagagtacgaggcactggaccgagaactcccgtgcatccggaagttccccacaccaccagcttcccagcccctctgcctctgcatggagaccttggacagtttgctgaaaactgattgtgaatttgtcaaagggtcagtcatgaaatctactgctcatgtcagaggggagaccaacgggcaaagaaaggggacgctgacgggggcacgcacggaggacaaaacgagtcctactaatcccggcggggatggatcgactctagactcgcccctcgcttcctccctccgggggcgccatggaacgcagggccctcactggctctggggactgggtgacgtcaggggtgagcctctcgtgattggctccatcaccctgcgtaagatcaaagggaagaaaggagagccccgacagccggagccattgtggctccggccgattgcgccggccctcgggccctcagggaggcgagggttggccccagactcccggctgaaccctcatcgcagcctcctgggcaccggcaactatgatgtcaatgtgatcatggccgctctgcaggggctgggcctggccgccgtgtggtgggacaggaggaggtag

SEQ ID NO: 135660 - DNA, 438 bp, Homo sapiens
atggccgacaggggcccgtggagggtgggcgtggtgggctatggccgcctcgcaggagccgaggacggcatgtcccaggccccgggagcacagccgagcccacccaccgtgtaccacgaacggcagcgcctggagctgtgtgctgtccacgccctcaacaacgttctgcagcagcagctctttagccaggaggctgccgatgagatctgcaagagcaccacctacctcggggtcagtgtgcctaatcataagcagataaaggattgcatttatcgatctactggcacgttcccagattgtacttcggaacaagtgctgtactcgttgctatacggtttttccaggcctgagtcggtttgggaggatttgagccctgttcctcgacttgctctggcgcagcggttccctaccgcgctcaacgccggctctatcgtctaa

SEQ ID NO: 135661 - DNA, 858 bp, Homo sapiens
attcggcaccagggagccgccgcccaggaaggggatgcggaaacccctggctcggtggagcggagaggcaggcgggcaggagccgaggacggcatgtcccaggccccgggagcacagccgagcccacccaccgtgtaccacgaacggcagcgcctggagctgtgtgctgtccacgccctcaacaacgttctgcagccagcagctctttagccaggaggctgccgatgagatctgcaagaggttggccccagactcccggctgaaccctcatcgcagcctcctgggcaccggcaactatgatgtcaatgtgatcatggccgctctgcaggggctgggcctggccgccgtgtggtgggacaggaggaggccccttgtcccaagctggccctgccccaagggactggggtgaatcctgaaccctgccctcgcccgtgtcgctggggctgctgtcactgccgctgcgccggcggcatcttaggtggccctgcgccaggttggaacggtgtcttactacaacctggactccaaagctgcgggcgcccgaaggccctgggggattgaggacggagtcaggggcctttccttggcggctgcgctggcccagggcctgtgcgaggtgttgctggtagtgaccaaggaggtggaggagaagggcagctggctgcggacagactgaccatggctgaccatcggcgcccacagcgcagtccctgggcatccccctccggctgggcacactgcatgcctgggaaaggccagcacttcatggaccctggggaggccccgccccctccccacacccctgctccccactgccgctgctgcctcaataaatctgctgatttgcaaaaaaaaaaa

SEQ ID NO: 135662 - DNA, 468 bp, Homo sapiens
ggttgggagttaacaatgcctggggaaccaagcccttgaagaagtgctggctccaaagtaggagtccaagaatatacagcaagagtaagagttgctctcacctcttcttgtagccccggggcccagcgacctgacagttacaggactgaagtctttctccagcccctccctctgcagcttgaacaccctgctagcaggaacctcacgcctcatggttgcatgactttatgagtcgctgggccagggtgaggacctgggcctcctgactcctggcccagagttcttgtccatcagttcatactgcaattttatgtgaaagcattatgactgtcctacccatgggagagtaaatgtagattgaatgctaggagtcttaaagctggagagtatagattttgaggtccccatttgggaaacatgtgccagaaatgtctaggtgtttaattaaaccggtttttggtttttctc

SEQ ID NO: 135663 - DNA, 1920 bp, Homo sapiens
atgcctttgaagagaagatcaaggctgcagttgggatcgagctatttgttggaggtgagcttgacactctgcagcacacatgtccagggccagacccgtgggaaggaggacaagacacaatgcctgtctgcagacagcttcttctgggacaagatgaagctcatcatcctggagcactattctcaggcgagcgagtgggcggctaaatacatcaggaaccgcatcatccagtttaacccagggccagagaagtacttcaacctggggctccccactggtgcgttcttggatggagagggtgccgtggataagggtggagagagtaggcaacaggggccaggtgccctttctgaatcactctcttaccatacctgtgaatccaaaaagtcttttattagcctcatccgcttgcaggtattcatttcgaagcccgaggtcggcgatgtgatccggaccatcgtgcgggcaggcctggccatgcccgggcccccactaggcccagtgctgggtcagagaagggcttccatcaaccaattttgcaaggagttcaatgagaggacaaaggacatcaaggaaggcattcctctgcttaccaagatttttgtgaagcctgacgggacatttgaaatcaagattggacaacccactgttctacttagtgaaggcaggtaccggcccggcgataactggcgcgtcaccagctactctggtttgcaacagcgtggtcacggtatcgcccaggatttgatgcctcggctggatgtcgatgctgcaggcgttgccagcgtcgttgaagaaccgacgttaacaccacatcagtttccgcgcggtgcgtcaccggggacgttcttgcacagtttgtttgaagacctggattttacccagccggttgacccgaactgggtgcgggaaaaactggaactcggcggctttgaatcgcagtgggaaccggtattgaccgagtggatcacggctgtcctccaggcacctctcaatgaaaccggcgtaagcctgagtcaactttccgcccgcaataaacaggtggagatggagttttatctgccgattagtgaaccgcttatcgccagtcagcttgatacgttaatccgccagtttgacccgctatccgcaggctgcccgccgctggagttcatgcaggtacgtggcatgttaaaaggctttatcgacctggtgttccgccacgaagggcgttattacctgctcgactataaatccaactggttgggtgaagacagttcggcttacacccaacaggctatggcagcggcaatgcaggcacaccgctatgatctgcaatatcagcttataccctggcggaccagtgccgaaccccaaagttccgccctccgcccttgcctggggcccactcaccgccgccagccgaccaggcctagaaacgccctgctcaaccggcgcgccgcctcttccgttctcgggagctgtcagctgagccaggcggatcccgctggtgcgaccgccggcatagggaggactctgcgcagccgccgtggtcgcccctgcctctcgggcgcctcccgcaggcccaaggcggcgctgccggcgcgaccaccgtcacccccacttactgcgagcctgtgctcacaggaggctcttttcagtagttctgatggggcccgagaattcgaatttttaccaatctctagaggggatcatgaggcagtggtctacctagggcagagactctcacaacaatcccaacctgttctccggccaggttatcttattcccccaggaaatgaatttggcactcggatcatgggtcccggtgattttggcttcctgcatgccagtagtagcatcgagtccgaggcaaaaccagccagcctcagcccactggtgaaaaggtatatccagatttggccacctggatccccataa

SEQ ID NO: 135664 - DNA, 3261 bp, Homo sapiens
  misc_feature (1)...(3261): n = a,t,c or g
cttcctcgggtactcggccactcggggcatcgcggcggcctttctagccgtcgatcccaagggttggtctcgcgctttcggctgcgagctctctgtggtgctggcagcgacatgtggcgcctcccgggactcctgggccgagctcttccccagtacactgggaccaaagcctctggagggtgactcctaagtcctccagcccagatgggcctcagactacctcctccacttttgctggttcctgtgcctaacctcgacaggtcaggtccccatggcccaggcacgagcgggggtccaaggtcccatggatggaaggatgccttccaatggatgtcttcccgtgtctccccgaacaccctatgggaatgccatatcttggggcactctggccgtgctggccctgcagcttggccgggcacatccacttccaggcgttcctggccgcaggaccctaagcgggtagaaacactgctccgtggcacagtcccctggaaccgtttcttctcatctcccgttgtggcacccatgctcctcactgcgacaacacatcctccccagccccgatggcccagctcccaggcacactggcctcaagggaacccaaggcttggcaaggaaagaagcctcagctcagccccggaacttctcacacaactctttgagaggagctcgtccttcaggacccctctgaggaagggtcccggtgattttggcttcctgcatgccagtagtagcatcgagtccgaggcaaaaccagcccagcctcagcccactggtgaaaaggaacaagataaatcaaaaactctttcccttgaggaggctgtgacttccattcagcagctcttccagctcagtgtttccatcgctttcaacttcctgggtaaccaaatggaccctgccccaaggcaggagggaacagagaacatgaagagtggcgaccacacggcagccttttcttacttccagaaagctgcagcccgcggctacagcaaagcgcagtacaatgcgggcttgtgtcatgagcatggcagaggcacccccagggacattagcaagatgtctaaaaggcgggcctttattatcagttggctgccagccagggccacagcctggctcaataccgctatgccaggtgcctactacgagacccagcctcttcgtggaaccctgagcggcagagggcagtgtccttgctgaagcaggctgcagactcaggcttgagagaggcccaagctttcctcggggtgcttttcaccaaggagccctacgctggatgagcagagagctgtgaaatatctttggcttgcagccaacaatggggactcacagagcaggtaccaccttggaatttgctatgagaaaggccttggtgtgcagaggaatctgggagaggccttgagatgttaccagcagtcagccgctctgggaaatgaggccgcccaggagaggctgcgagccctcttttccatgggggcctgcaagccccggggccccaacgaacctgacagttacaggactgaagtctttctccagcccctccctctgcagcttgaacaccctgctagcaggaacctcacgssctaccacattgcctcgagcacaggcaaccttggcctcctctgcagaagtgggcatctcggagccagcctggaagcctccagcagggctattcccccacacccctaccccacttgaaaagaattgttgtaagactaggttttggctaaggtgagataaaacatagtccctggtgcctcttaggggccagagcgggcaggaggttggataacaaaaatagagcatcagcaaccctttccaggtagaaattccagcgggagtttcaggttcccaagcaattttcacgtacatggctggtaagtgactgatctttccccccgcttggtagcctcacagatgagtcttggatgcattcacagtcatttctggtctgtgcaccaaaggatgccattcagtgaccctatgaaaaacccctactggaagggtcccagagacccctggtgctcaccttagcctttgtactttgagtcaaataacttaccttcttccttcttatgccctgggttttactcacacttaaatctgtactactgtttgccaatgtctgatgtgtgtatccctgggttcacaagaagattttagatgggtattcaaatttaatatttttctatttagttatatatttaatgtataatataaaaatatgattagcatattgacctgtagtttgatagatgttctgtctaggataaagctaactgtaaaaaaaaaatagtgaatcagtttaaagaaaaacataaccgtaaaagtggggcacagatcccagagaggtaagcaaaatcacaggggtgggttccatggaatgggctggacacttaggaaactctgaattagggccctcctcggggactaggcccaccctttcacctctgttcatcccccgtgggctcataatcgttttcatttcacctttgatttggaaggaagaagtttcttgcccaaattgcctggatgtgtctgcttgactttcagaacttctcacctcagctctaaagagggagcctgtgggttctcagagagatatcacaatttgagtcccaaagaagaggccagatacccatccaccttcccccaaatcttaagcacctgcgccagtacagtcaagaagaggaaagtgtgtgaagacccaggtctggctctgccactttgcctggcccatgtcaccttgaaaactgtgacctgactccctattattgtttcctcagttgtagacccaaaggccaatggtgtcctgcccctccctacccttagaagacaaaatgcaagggcattttcacccacagagaggaccctttgtgcctcactttggccccaggaggcaggtgatgctccatggttgccatgacttttatgaagtcgctgggcccagggtgaggacctggggcctcctgactccctggcccagagttcttgtccatcaagttcatactgcaattttatgtgaaaagcattatgactgtcctacccaatgggagagtaaatgtagattggaatgctaggagtcttaaaagctgggagaagtatagattttgaaggtcccccatttgggaaacatgtgtccagaaaaagtctaggtgtttaattaaaacagatattgggattatctcatcactcttgcccttgagtattatgggaagagccagggagacgggcaggggganntgaaaagctgaggctccgtcc

SEQ ID NO: 135665 - DNA, 1683 bp, Homo sapiens
atggtttccacaggcagcacccttgatgtggaaaattgggacagagcagaaggattaaaatgggctcatcaaaaaggtcttaaaattgatccttctgttttctccacttggagtttagttcatactgtacttctgccattatctccttattattctgtgggacaacaggctgaatctaaaaatctgaaagaatctgttgtcccactcacagctccagatgaaaataaaaaacaggagagggaggataaaaattggcctatacagcctcctccagttgcagaaacatctgtattgcctcctttggtagcagaactagagaccccaatacaaagaattttatgctctgctgccatagctggagagcccctaggaccttgcacttttcctatttccataaggcctgatcccaacaatccacagcaggttattcatgaacacaccccactagatgcatatctgacatggaatttaaattggcaagaaatgtgtgcagaccaggctaaacagaaccatgttgctggacacggagacattacagaggatatgctattaggtaatggcccttattcagacctggaaagtcaaatggcactcccagacgctgcttatcagcagtgtgcacaggctgttaaatgcacctgggccgcaattcctgaagagggagtcccagtacaatcctttttacatatgcaagggtcacaggaaccctatgtgcaatttcttacaagatcacaagaggcagtgaagcgtcagattcctcataccacggctgcagaaatgctaaccttaactctagcttttgaggatgcaaacgcggattgtaaacatgcactggcactgcattttgtaggacaggcattaaagaagcctcggaatatgtttcctactgcttacatcattcattatatggatgatattcttttggctgctcctacagatcaaaacctacatcagttattcagagaaacaaagcaggctttgactaaatggaatctcaaaatagctctagaaaagggatcgtggcaggctacaatcaacattgtcaaccataaagacaggttacagactttaaatgattttcagcaattattaggagatattaattggctacgcccgatgttaggtattgctacctatcaacttacacatctttaccaaaccctgcaaggagattcttcttgttcagcttatgttgtaaatttagccattcgcatagaaactgctacagttaaaaaatataacaaaagtgagtatccgtgggaccttgtgaaagcccatttgcaaggagctttcacatccaacatcacctttgatattagtgaattacaaaacaaaattcttgatttaaataggcacactcaagaatttcagccttctttagaagactggactgaattccaggaaggcctggagagcctcaacccttggacctatctaaagtaccacagtaacatcttatatgtagttcttggagtaatgttgttttgtctctgtcttctgtttatagtctgtaaaatcggatggaccgccaatcggagaatgagagctgcccagcctggtcttacattctttcaattaattcataaacagggggatatgcagggagccgaaggcccatgggacgtgaccaactcagcattccactggaggctatatgatcaaacagcaaactgtttatcatga

SEQ ID NO: 135666 - DNA, 916 bp, Homo sapiens
ccttcagtggaatgctgagttgatcacatcccatgggcctttggctccctacatatccccctttgtgtttacaaattaatagaaagaatgtaagtccaggcttggcagcacccattttctgattggcggtccatccgattttacagactatgaactattctaagtttgttacacaaatacgagtgtggttaaaatgacaatgcaattgctgctgcaactgcaagatttgtacttgttctcctaaccatagaaacatggatttcaacattggcccttcagtttgtaactcagtgtagccacgcttggttggctgtgcacatccagttctccatgtactgagctgtttgaatagaatgatgcaaagctacagagccgggcccatggttggccaccctgggttcctccagtctcccattccacggctgcatccaccttgaggacacccacacggtttgtcaatctcctgtaaaagtgcacatttacaatccgctagagttaaggttagcatttctgcagccatggtatgaggaatctgacacttcactccctcttgtacttgtgcaagaaattgtgcatagggttcctatgacccttgcatgatatgtaaaaaggattgtactgggactccctcttcaggaattgtggcccaagtgcatttagtggcctatgcgcactgctgataagcagcgtctgggagtgccatttgacgttccaggtctgaataagggccattacccaatagcatatcctctgtaatgtctccgtttccagcagcacagttctgtctagcctgctctgcacacttttcttgccaattgaaattacacatcagctatgcactcgcagacaagcaagttcgcgccaagtgtttcacatcaaagggtaaaagatgtatggcaccaaacactgattctag

SEQ ID NO: 135667 - DNA, 504 bp, Homo sapiens
  misc_feature (1)...(504): n = a,t,c or g
agtgtaaaatgaggactacggatgtgcggaancccggncgaccacgcgtccgattgtatctatgcttttcacatcaatagcaaagttgactcctgaggcagtcaatcctttctttaagttgntgactatgctaatggagtttgctggtggacctccaggaatgcctccctttgcatcttatattctgcagaggatatgggagctgcagcttatcttctggtgtcccttataccaagcaattcattccgtcagatgttccggtcaacaaggtctttgcacatcccaacccgtgaccttccactcagtccagacacaacagtagtcctacatcaggtctacaacgtgctccttggtttgctctcaagagccaaactttatgttgatgctgctgttcatggcactacaaagctagngccctattttagctntatgacttactgtttaatttccaaaactgagaagctgatgttttccacatatttcatggatttgtggaaccttttn

SEQ ID NO: 135668 - DNA, 473 bp, Homo sapiens
gaatggaagttccatcttcgttttcagaagacatgtcaaatatcaggtcacagcatgcagaagaactccagatgaaaataacttgcatcttcagtatacttcctaaagggcaatcagataatggatatgttttatgtaattaagagttcactttagtggctttcatttaatatggctgtctgggaagaacagggttgcctagccctgtacaatgtaatttaaacttacagcatttttactgtgtatgatatggtgtcctctgtgccagttttgtaccttatagaggcagattgcctccgatcgctgtggttcttattatcaaaattaagtttacttgtatacggaacaaccacaagaaatttgattctgtaaagaatcctctttagctgtggcctggcagtatataaatggtgctttatttaacagaatacctgcggaggaaataaagcacacttgatgtaaaaaaaaaaaaa

SEQ ID NO: 135669 - DNA, 2296 bp, Homo sapiens
atgaccctggatggaggtaacagtgctctggaaaatctgaatcttggagaagcaaagaccaaggtcacacagataaagaggtggaggctagattttgccttgagaaacaatgatgatgataatgataatgttaacatctattatgatggtacatttgttgtgactaaggaagcaatcacagtgaaatctagccttgctgatagcgatcatttacaagattggctaaagaaattgactctccttattcctgagactgcagttcgtcatgaatcatgcagtggtctctataagttatccctgtcagggctggatggaggagactcaatcaatcgttcttttctgctattggctgcctcaacattattgaaatttcttcctgatgctcaagcactcaaacctattaggacaacgctcctcgacttagatgccttggcaagacatttggctgactgtattcgaagtagggagatccttgatcatcaggatggtaatgtagaagatgatgggcttacaggactcctaaggcttgcaacaagtgttgttaaacacaaaccaccctttaaattttcaagggaaggacagatgccccagctaaaacctgaaacaattagcatgactggcttaaacctgtttcagcatctctgtaacttggctcgattggctaccagtgcctatgatggttgttcaaattctgagctgtgtggtatggaccaattttggggcattgctttaagagcacaatctggtgatgtcagtcgagcagctatccagtatattaactcctattatattaatggtaaaacaggtttggagaaggagcaagaatttattagtaagtgcatggagagtcttatgatagcttctagcagtcttgaacaggaatcacactcaagtctcatggttatagaaagaggactccttatgctgaagacacatctggaagcgtttaggagaagagtaatactttgtcaaaatgaaaataaatttttttcttgcctcttaaagacacacagtgcatatatgctgttttacaaacgcatggaaccagaggaagaaaatggcagagaatacaaatttgatgtttcgtcagagttactagagcccacgatgcttcagtggattgaactgttgacgaaacagtttaataatagtcaggcagcttgtgagtggtttttagatcgtatggctgatgacgactggtggccaatgcagatactaattaagtgccctaatcaaattgtgagacagatgtttcagcgtttgtgtatccatgtgattcagaggctgagacctgtgcatgctcatctctatttgcagccaggaatggaagatggcaattcattccgtcagatgttccggtcaacaaggtctttgcacatcccaacccgtgaccttccactcagtccagacacaacagtagtcctacatcaggtctacaacgtgctccttggtttgctctcaagagccaaactttatgttgatgctgctgttcatggcactacaaagctagtgccctattttagctttatgacttactgtttaatttccaaaactgagaagctgatgttttccacatatttcatggatttgtggaaccttttccagcctaaactttctgagccagcaatagctacaaatcacaataaacaggctttgctttcattttggtacaatgtctgtgctgactgtccagagaatatccgccttattgttcagaacccagtggtaaccaagaacattgccttcaattacatccttgctgaccatgatgatcaggatgtggtgctttttaaccgtgggatgctgccagcgtactatggcattctgaggctctgctgtgagcagtctcctgcattcacacgacaactggcttctcaccagaacatccagtgggcctttaagaatcttacaccacatgccagccaataccctggagcagtagaagaactgtttaacctgatgcagctgtttatagctcagaggccagatatgagagaagaagaattagaagatattaaacagttcaagaaaacaaccataagttgttacttacgttgcttagatggccgctcctgctggactactttaataagtgccttcagaatactattagaatctgatgaagacagacttcttgttgtatttaatcgaggattgattctaatgacagagggcaaagatgacgtttatgatcgtatgctgctagactacttcttttcttatcatcagttcatccatctattatgccgagttgcaatcaactgtgaaaaatttactgaaacattagttaagctga

SEQ ID NO: 135670 - DNA, 715 bp, Homo sapiens
  misc_feature (1)...(715): n = a,t,c or g
aatgctcatctctatttgcagccaggaatgaacgatgggtcagatgatatggatacgtcagtagaagatataggtggtcgttcatgtgtcactcgctttgtgagaaccttgttattaattatggaacatggtgtanaacctcacagtaaacatcttacagagtattttgccttcctttacgaatttgcaacaatgggtgaagaagagagccaatttttgctttcattgcaagctatatctacaatggtacatttttacatgggaacaaaaggacctgaaaatcctcaagttgaagtgttatcagaggaagaaggggaagaagaagaggaggaagaagatatcctctctctggcagaagaaaaatacaggccagctgcccttgaaaagatgatagctttagttgctcttttggttgaacagtctcgatcagaaaggtgaaatgtttcgaatttaaaatgtttaaagcatgtttggttttattatttttacataattgtttaccactagtttttccactagctttttattatatatgtttaattatgtaattgttattcactagcttttattatataattccttttaaataatactactattcatcaactcttgtggcataagaatttcagttttttctaccaaacttttacttcatctatgagtcgtgttagaaatagtcaccgaaaaaatatacagtaaaatatctaacaaaaaa

SEQ ID NO: 135671 - DNA, 508 bp, Homo sapiens
tttttttttttacctttcccctcctccctcctgcagtctagccaccctatgaaaattatctaataggcagagtggtaccttaatccaagaaagatttggagccacttgcagtaactttttcttttcccagataaagttctaatactcaaaaaagaagagttgatttaagtcccatatccttcaggaatgaggtataggatataaataaattcaaagtaccacattctaagatatttcactaaacattggaatgaatttttcccctttatgtactttaaaatatagaaaatatgcagttatgactagaaatagctgtaatattgtacctgcagagttgagtatctcactagtataatttataattataacctgttctgatttcttttcaaatattaggtgtcctagttgcctatgaaggtttgccacttcatcttgcactgttccccaaactttggactgagctatgccagactcagtctgctatgtcaaaaaactgcatcaagctttt

SEQ ID NO: 135672 - DNA, 3209 bp, Homo sapiens
cctttttttttttttttttgagataattaggaaagaagatttattgtttacccttgcagtgtttatggggggaaaaggtatttacagaattactgttgctagcgagaatatacagtaaagtttaaaacattttggagaattgattttgattcttaaaatgtgtctttttgcaacatatgctctggttacctataaatacattaatttggcccttgaaaacattcacatcctattctttgttagccttatttttccagtccttgttaactctctcagtgctggataataaacctgcatttcttttaaaacatttgttcagtttcggcatcagtgtcttcccccagcacttcctttatttaaaataggacccatttacttgtatgaaaaatagttgctgttaactaaaaattcaataggtgagttagacatggcttttcaagtaggattttcagtggcttcagattccatcatacacaagtgtatgttttttctgtgtaagttttttccgtgtaagttttttccgtgctcaaccgtaagtgctcaaccatcttctccccactttagtctgctatgtcaaaaaactgcatcaagcttttgtgtgaagatcctgttttcgcagaatatattaaatgtatcctaatggatgaaagaacttttttaaacaacaacattgtctacacgttcatgacacatttccttctaaaggtacgtagtactttggaaactcagtgtgtcatttccaattagttaatgcttgtggtttcattatgctggtcttttggagatttttttaaatcttctttttcaggttcaaagtcaagtgttttctgaagcaaactgtgccaatttgatcagcactcttattacaaacttgataagccagtatcagaacctacagtctgatttctccaaccgagttgaaatttccaaagcaagtgcttctttaaatggggtaagaactatgcagaggcggcggcacacacttttaaactgtccttcagttaactgtgtggccttcatatgattttactctcgcacctttaacttactgattcaaactcataagccatgtgcgacaaaaaaacaagttttaaatacacgtttactatgccttgtatgtacacagcacactctatcaccttggaagctacaagctggtatcattaaatgctgaaaggtaataaagggaacatcttagtggtcttatctctagttgggtatatttttggaaacaatacttgtgatgtttctattactgcctatggctcctatgtaactgaaacaattaatgatctactgatttaaaaaaggcagttaaatctagagcattagttgccttgtgcagaactccatgacagccatgtcctagaataatggaacactctggaaatgggctagaatgttgagcagcagcctcccaaatcacagtatgcataaaagccaaaacagatgacagagctcagtaaggaagaccttactatttgtgacatccatcagaattttaacttgagaaactgatttcaaggtttgtttttaaaattcttatatttccttttccatttttcagaaaacactatttcaggctttggtctgacttactggttcgtgggcataaaataatgctattagtgactttaagaactaatgaggctgggcacggtggctcatgcctgcaatccaagcattttgggaggtcgaggccggtggataacgaggtcaggagattgagaccatcctggccaacatggtgaaaccctgtctctactaaaatagaaaaaattaagccaggcgtggtggcgggcgcctgtagtcccagctacttgggaggctgagggaggggaatcgcttgaacccgggtggtggaggttgcagcgagccgagattacaccactgcactccagccttgccaaagaacaagactccatctcaaaaaaaacaaaaacaaaacaaaaaaaaaaacaactaatgaaatgctgtagtatcttaacactggctttctggttttatcattctaagaatcccagagaaaccagggtattcttaggaaagaatggattcctgggaaaataaacatctgcaattaactgtaaacaactgcatcaaagtgttggctttagaatttgaaatgttcctatctgggtttttgtaggacctgagggcactcgctttgctcctgtcagtacacactcccaaacagttaaacccagctctaattccaactctgcaagagcttttaagcaaatgcaggacttgtctgcaacagagaaactcactccaagagcaagaagccaaagaaagaaaaactaaagcgttagctttatggactactatcattacctttagggtgggaggagggagtaatacacttggtgtaactggtttaagagttgtgtgttcagctgaacctcctaaatataaatgctagaaacaaaattaacttcccacatccccccctaacgtgatcttaatgactttcagagaagtttcccttttggcatgtgttttcacagatgatgaaggagcaactcccattaaaaggcggcgtgttagcagtgatgaggagcacactgtagacagctgcatcagtgacatgaaaacagaaaccagggaggtcctgaccccaacgagcacttctgacaatgagaccagagactcctcaattattgatccaggaactgagcaagatcttccttcccctgaaaatagttctgttaaagaataccgaatggaagttccatcttcgttttcagaagacatgtcaaatatcaggtcacagcatgcagaagaacagtccaacaatggtagatatgacgattgtaaagaatttaaagacctccactggttccaaggattctaccctagcttgaggaagaatctgaagttcccttctacttctatctctgcagttctgtctgacttagctgacttgagaagctgtgatggccaagctttgccctcccaggaccctgaggttgctttatctctcagttgtggccattccagaggactctttagtcatatgcagcaacatgacattttagataccctgtgtaggaccattgaatctacaatccatgtcgtcacaaggatatctggcaaaggaaaccaagctgcttcttgacattaggtgtagcatgtctacttttaagtccctcacccccaacccccatgctgtttgtataagttttgcttatttgtttttgtgcttc

SEQ ID NO: 135673 - DNA, 5449 bp, Homo sapiens
agaggaagaaaatggcagagaatacaaatttgatgtttcgtcagagttactagagtggatttggcatgataacatgcagtttcttcaagacaaaaacatttttgaacatacatattttggatttatgtggcaattgtgtagttgtattcccagtacattaccagatcctaaagctgtgtccttaatgacagcaaagttaagcacttcctttgtcctagagacatttattcattctaaagaaaagcccacgatgcttcagtggattgaactgttgacgaaacagtttaataatagtcaggcagcttgtgagtggtttttagatcgtatggctgatgacgactggtggccaatgcagatactaattaaggtgccctaatcaaattgtgagacagatgtttcagcgtttgtgtatccatgtgattcagaggctgagacctgtgcatgctcatctctatttgcagccaggaatggaagatgggtcagatgatatggatacctcagtagaagatattggtggtcgttcatgtgtcactcgctttgtgagaaccctgttattaattatggaacatggtgtaaaacctcacagtaaacatcttacagagtattttgccttcctttacgaatttgcaaaaatgggtgaagaagagagccaatttttgctttcattgcaagctatatctacaatggtacatttttacatgggaacaaaaggacctgaaaatcctcaagttgaagtgttatcagaggaagaaggggaagaagaagaggaggaagaagatatcctctctctggcagaagaaaaatacaggccagctgcccttgaaaagatgatagctttagttgctcttttggttgaacagtctcgatcagaaaggcatttgacattatcacagactgacatggcagcattaacaggaggaaagggatttcccttcttgtttcaacatattcgtgatggcatcaatataagacaaacttgtaatctgattttcagcctgtgtcgatacaataatcgacttgcagaacatattgtatctatgcttttcacatcaatagcaaagttgactcctgaggcagccaatcctttctttaagttgttgactatgctaatggagtttgctggtggacctccaggaatgcctccctttgcatcttatattctgcagaggatatgggaggtgattgaatacaatccttctcagtgtctagattggttggcagtgcagacaccccgaaataaactggcacacagctgggtcttacagaatatggaaaactgggtcgagcggtttcttttggctcacaattatcctagagtgaggacttctgcagcttatcttctggtgtcccttataccaagcaattcattccgtcagatgttccggtcaacaaggtctttgcacatcccaacccgtgaccttccactcagtccagacacaacagtagtcctacatcaggtctacaacgtgctccttggtttgctctcaagagccaaactttatgttgatgctgctgttcatggcactacaaagctagtgccctattttagctttatgacttactgtttaatttccaaaactgagaagctgatgttttccacatatttccatgggatttgtgggaaccttttcccagccttaaactttctgagcccaagcaatagctacaaatcacaataaacaggctttgctttccattttggtaccaatgtctgtgctgactgtcccagagaaatatccgccttattgttcagaacccagtggtaacccaagaacattgccttcaattacatccttgctgaccatgatgatcaggatgtggtgctttttaaccgtgggatgctgccagcgtactatggcattctgaggctctgctgtgagcagtctcctgcattcacacgacaactggcttctcaccagaacatccagtgggcctttaagaatcttacaccacatgccagccaataccctgggagcagtagaagaactgtttaacctgatgcagctgtttatagctcagaggccagatatgagagaagaagaattagaagatattaaacagttcaagaaaacaaccataagttgttacttacgttgcttagatggccgctcctgctggactactttaataagtgccttcagaatactattagaatctgatgaagacagacttcttgttgtatttaatcgaggattgattctaatgacagagtctttcaacactttgcacatgatgtatcacgaagctacagcttgccatgtgactggagatttagtagaacttctgtcaatatttctttcggttttgaagtctacacgcccttatcttcagagaaaagatgtgaaacaagcattaatccagtggcaggagcgaattgaatttgcccataaactgttaactcttcttaattcctatagtcctccagaacttagaaatgcctgtatagatgtcctcaaggaacttgtacttttgagtccccatgattttcttcatactctggttccctttctacaacacaaccattgtacttaccatcacagtaatataccaatgtctcttggaccttatttcccttgtcgagaaaatatcaagctaataggagggaaaagcaatattcggcctccgcgccctgaactcaatatgtggcctcttgcccacaatggtggaaaccagtaagggcaaagatggacgtttatggattcgtatgctgctagactacttcttttcttatcatcagttcatccatctattatgccgagttgcaatcaactgtgaaaaatttactgaaacattagttaagctgagtgtcctagttgcctatgaaggtttgccacttcatcttgcactgttccccaaactttggactgagctatgccagactcagtctgctatgtcaaaaaaactgcatcaagcttttgtgtgaagatcctgttttcgcagaatatattaaatgtatccttaatggatgaaagaacttttttaaacaacaacattgtctacacgttcatgacacatttccttctaaaggttcaaagtccaagtgttttctggaggcaaactgtggccaatttggatcagcactctttattacaaacttgataagccagtatcagaacctacaagtcctgatttctccaaccgagttgaaatttccaaagcaagtgcttctttaaatggggacctgagggcactcgcttttgctcctgtcagtacacactcccaaacagtttaaacccagctctaattccaactctgcaagagcttttaagcaaatgcaggacttgtctgcaacagagaaactcactccaagaggcaagaagccaaaggaaagaaaaactaaagatgatgaaggaggcaactcccatttaaaagggcgggcgtgttaggcagtgatgagggagcacactgtagacagctgcatcagtgacatgaaaacagaaaccaggggaggtcctgtaccccaacgagcacttcttgacaatgagaccagagactcctcaattattgatccaggaactgagcaagatcttccttcccctgaaaatagttctgttaaagaatacccgaatggaacgttccatcttcgttttcagaagacatgtcaaatatcaggtcacagcatgcagaagaacagtccaacaatggtagatatgacgattgtaaagaaatttacagacctccacttgttccaaggattctaccctagctgaggaaggaatctgagttcccttcttacttctatctctgcagttctgtctgacttagctggacttgagaagctgtgatggccaagctttgccctcccagggaccctgaggttgctttatctctcagttgtgggccattccagaggactctttagtcatatgcagcaacatgacatttgtagataaccctgtgttagggaccattggaatctacaatccatgttcgttcacaagggatatctgggcaaagggaaaccaaggctgctttcttggacattaggggtgtaggcattgtcttactttttaaagtccctcacccccaacccccatgctgtttgtattaagttttggcttatttgtttttgtgcttcagtttgtccagtgctctctgcttgaatggcaagatagatttataggcttaattcttgggtcaggccagaaccccccagatgaaaaaaaacctggccaccctccagtatacttccttaaggggcaatccagataaatggatatgttttaatggtaattaaagagttccactttagtggcctttccatttaaatatggcctgtctggggaaagaaccggggttgcctagccctgtaccaatgtaattttaaacttacaagcatttttacctgtgtatgatatggtgtcctctggtgcccagttttgtaccttatagaggcaggattgcctccgatcgctgtggttcttattatcaaaattaagtttacttgtatacggaacaaccacaagaaattttgattctgtaaagaatcctcttttagctgtggcctggcagtatataaatggtgctttatttaacagaatacctgtggaggaaaataaagcacacttgatgtaaaaataattgttttatttttattgacatgactgattgattgattgctattctgtgcacttaattaaactgattgtgatgacttttcatttgtttacatacgttgcttcagtcttctcaggtgaaagtagtgagaaaaccgtgaaagaggggggaaacatttatccattatatgctgtttcactggaagtgttaccagcagtccacagaactaatctgtccccacagacttctcaatcctctccacaccgaagtgcaaaaccacagcagggaagatgtgcagggagatgtggagcaaaacacagccaatttgccctcacctcaacatgcttttgaatgcaatataccactgttttacgacctaaggatctacacaccttaaaaaccctaaaggtaaaataaagggaataggtgtcaacatcgccatttattttttgtcatcttggaacttaaaagtacagctgcaagcaagcttgctataggacaagcttcagcttgggcaaacatcaactatctgcactcaggacttacctatttccagaggaatatcgatggaaggtcaggttaatacttaatttcaggttgtttgctacttttaaatcaatgcagtgtctagttataataaagagtcaaacaatgctttacattgtatatatgttcatagatttcatccaatataaaataaagacagtccttttaaacaaaagatagggaagaggtaaatgtgacactttttccgcttacaaaaagtaatgccttataataaattttaattcaaccatttaggggggtcagctgcagtgaaccttttatttcttcaaaatgctgcttctgccaacagaatttcatgttgctcttcttacagatagataggaac

SEQ ID NO: 135674 - DNA, 243 bp, Homo sapiens
aagtaggggcactcagaaggctcacaggatgagagcaatcagtattcaccatcgtaatccacaccgtctctcatctggagagaagaggttctagctcttttgagagctcctcctcggctgggggctccacccccttggggagctgcagcaggtcgtacaagaactccggctccatcgcctcccaagcccaaccgctttccacgcaggaaaacaaaggcctagctgagtgcaaatggtggtccc

SEQ ID NO: 135675 - DNA, 1196 bp, Homo sapiens
cttctacagagctagaacctcttctctccagatgagagacggtgtggattacgatggtgaatactgattgctctcatcctgtgagccttctgagtgcccctactgcaccagcacctcttaccaatagcaactcatttattctcaagggctctttctcacagggcccgtaccccctgcctaggctggcatgctgacgtgtccccagaacctggcttctaccctccttctgtgcctccaggtctagagaaaatgaggggctcagtgagtttggggcttctcagaccgtgacgccctctcctgcctcctctgtgcaggcttgggaggcgatggagccggagttcttgtacgacctgctgcagctccccaagggggtggagcccccagcggaggaggagctctcaaaaggtgtgtgcaagaaatacctgccacccacttcccggaaggaccccaaatttgaagaactgcagaaggtacagcaggagtggatcaatgccactcttctccccgagcacattgtggtccgcagcctggaggaggacatgttcgacgggctcatcctacaccacctattccgtaagtgggcggcgctcaagctggaagcagaggacatcgccctgacagccacaagccagaagcacaagctcacagtggtgctggaggccgtgaaccggagtctgcagctggaggagtggcaggccaagtggagcgtggagagtacgtggaacaaggacctgttgtctaccctgcacctccttgtggccctggccaagcgcttccagcccgacctctccctcccaaccaaccaacgtccaggtggaggtcatcactatcgaggtagcagcgaactttgtcaaccagaagctggaccgcctgggcctgtctgtgcagaatctggacacccaggtagggactggggtcatcttactcttgctgattggacaacttgaaggcttcttcctgcacttaaaggaattctacctcactcccaactctcctgcagaaatggtaagtttcgtcaccctggcgctggagctgctgaaggacgagggcctgctcagctgccctgtcagccctgaaggtgagtgcaacaaggatgccaagagcacactgagggtgctctatggtctgttctgcaagcacacgcagaaggcacacagggacaggacgccccatggagccccgaattgaccctcact

SEQ ID NO: 135676 - DNA, 1592 bp, Homo sapiens
  misc_feature (1)...(1592): n = a,t,c or g
ggaattcccctttcgacgatattcggcggaagtctgcagccgagagtccagagaggaggaagctcctgccggctgagcgggtctggaggaagtgagcagcggggctcctgcctcccggcctggtccccgaagaccccagaagaacccggaacttgcttccattcggaatccagggaccaccctttgcactcagtaggcctttgttttcctgcgtggaaagcggttgggcttgggaggcgatggagccggagttcttgtacgacctgctgcagctccccaagggggtggagcccccagcggaggaggagctctcaaaaggaggaaagaagaaatacctgccacccacttcccggaaggaccccaaatttgaagaactgcagaagcctgcaggtgttgatggagtggatcaatgccactcttctccccgagcacattgtggtccgcagcctggaggaggacatgttcgacgggctcatcctacaccacctattccagaggctggcggcgctcaagctggaagcagaggacatcgccctgacagccacaaagccagaagcacaagcttcacagttggtgctggaggccgtgaaccggagtctgcagctggaggagtggcaggccaagtggagcgtggagagcatcttcaacaaggacctgttgtctaccctgcacctccttgaggccctggccaagcgcttccagcccgacctctccctcccaaccaacgtccaggtggaggtcatcactatcgagagcaccaaaagtggtctgaagtcagagaagttggaggaacagctcactgaatacagcacagacaaggacgagcctccaaaggacgtctttgatgaattatttaagctggctccggagaaagttgaacgcagtgaaagaggccatcgtgaactttgtcaaccagaagctggaccgcctgggcctgtctgtgcagaatctggacacccagtttgcagatggggtcatcttactcttgctgattggacaacttgaaggcttcttcctgcacttaaaggaattctacctcactcccaactctcctgcagaaatgctgcacaacgtcaccctggcgctggagctgctgaaggacgagggcctgctcagctgccctgtcagccctgaagatatcgtgaacaaggatgccaagagcacactgcgggtgctctatggtctgttctgcaagcacacgcacaaggcacaccgggacaggacgcccccatggagccccgaattgaccctcactgcctccaaagcccagagcctgcctgtcagcccagctggagggcccgaggctgcagggtgtcctcccacagtcccgctgtttcctgtgcattcgtgacccgcttccctcccaccctgtctcctgtctccatcgttggattatctttgaacccccttgtgtggatcattttgagccgcctggccttgctcagtttattttaataaaagtatttctgggagggattctggaaaaaaaaacaaaaaagcaanaatatgaattaaaataaaatgggaagccaaattcctaatgcctagatagagagagctaaactgtggccttccaggggggatcctctttt

SEQ ID NO: 135677 - DNA, 477 bp, Homo sapiens
  misc_feature (1)...(477): n = a,t,c or g
ttcgtccacattccagggcctcctggaagacttaaccttttgtctttgaaatgcatcaaggaccattatagaaaggatcccctgacctaaggatgaaatcgacctagggttaatcatgacagctgcatcagttgtattggatgcaagtcaactctggagtcctcatcccttgaatggacttgtcagctacctccccaggaggagttcagaagcttctgttggccatcacttgagtagatgacaagctgtaaggtatctgctgctaacgtggctgcttctccgagagcacattgaggtccagacagatccaaaccttggccctaaaaaatgtgtgctgtaaagttacttgatgtatatttattataattatttatggttgcatttaacaaacttttcattcaatctgatgctatntacaccatgctgtgtaaaggaagctcactaaaggaaaaaagtcacaccaataaataaccttca

SEQ ID NO: 135678 - DNA, 277 bp, Homo sapiens
caaaagcaaacagcacaaacagacattttcttttcctattgtaggtgaatgaactggtgcaggtagaaacgtacctccgcagtgaaggtgtgctggtgcgatactggtatcctattgacatgttggaaaggcccccagcaggctaccgaaggactgccaccaatgggctggtcacactggacaataccaaccttcaaattcacaggtacaattgggcccttctttctactgggtcacagaaatccaccaacttcgctctaccacatggaccatgtac

SEQ ID NO: 135679 - DNA, 731 bp, Homo sapiens
ggtgtagattaaaagctttttatttacatttctaggtctgtgatgcacgtgagttgtgacaggtgttgtccttacagctcggctgttttgatgtgtgtgtatgaagacacttaacataccattatcaaattgcaaatgtgctgagaaaattcaataaaacagggtggtaaggcaagttcaggtactcaccagcactacattcctgggctactaggttaagaacttcaacagctgctggacattgttgtatgaattcttcacaaaataagctgtcttctaaaagctgggccatgaccaggcatgctcttaatgttaaaagatttacaatatttcaaagtcatcagtgttcattgtctaaaaaagtcaacttgtccttatttcagcaaggagccgaacgactgccatcacaggagctgacccatctcctgttgcaggaagtgaggtgtgaatagagagacttccctcctgaggaagcaacatggactggactgcctgtactaccttctcagtaatggacagtttatgaagaggcaatgcctctgatcttggaacacaaagtctagacaatggaatagtcaatgtgtctgacgcttgcgaagtctttctacagtctatgggtgggaatctgactgtagctataccttcctgttcattgatagaagccactactccaatgcttcctgaaattcctctacctaaaacctgaacgaaatcgtcgacccgggaattct

SEQ ID NO: 135680 - DNA, 387 bp, Homo sapiens
ggaaatgattggtaatgaagatttggaatttactagagcaaatcagaggcgtcgccacgtgaccagccaccgcagcagctcctttacactcctgcagtcgctggccattgaggacagcagggacgagccacagagtgctgtggcaaccaggctgctgggaatgacgcgctccaggatgtccttagtcttctcaatgatctctcaaggagccacataggtaaagccatcctgagccagccagcttgtgtgtccaaactcctctccctgctgcttgaccaacgcccgtctccaaagctagtccttattattctccagctgtgccgggcggcgctgcccctgatgagcgtaaaagactgtggaaacgtggagctcccaccctggagctac

SEQ ID NO: 135681 - DNA, 587 bp, Homo sapiens
tttcgtgcccctcgcgagtgtttccgcctgttcgagcctgcatgttctcatctcaccttacctcagtcaccttcctggctgaccccagcgctgggggaggcctgccccggggcacttttatctatgccacttcaccactgccagttcaggccccgtctttttactgggaaattgaaatcgtttcctatggagacaccgatgatgacaccggacccatagtttcctttggcttcactacagaagcagagaagcgagatggggcttggactaatccagtgggcacttgtcttttccataagtaagtaaaagaagtagctcagtgtgacagagagcagtagcctcccacaaggtgtgtataggtgttcaggaagtcaaaatagagttctgtcttcaagtgagtttggggaaaggagagcattatttttcctttctggagatttccagtgcacattagtaagattccttcctagttgacctgtaattttttaaaaatctgtttattttgcaaattctataaccctttattctaggaatacagtttgggaaatattggtgtgggtattttaatactaaagtgatactataat

SEQ ID NO: 135682 - DNA, 11331 bp, Homo sapiens
cctgtgtcccctagcagttatactcgatgctgctctgtagaggcctgtggggggggacagtgcagggtggggcagcacaggtagcagcctctgccagtgtacactgaccagtgtgggttacccctttctgcattgtaggagtcttcggaggatgtctcaggaggcttgccctttctggtagacctgggctttaggtctgtctgtgttagcttgttccatgttaagaatcctgtacaatgggaccagaaattaccaaagaagaagaagcctgtcaggagctattgcggttccaaacttttacaaagagaagtgattcagccagacgtgatggaggaaatggtggtatcttgtgttattaagcacttgaacttggttgatgcactgcagtctctaataaatttccaatatcaagaagaacatgctgaagaatatgatttattatgtaaaattatgggagagacctttaagaaactcaatgccatggagagacagctgcagaacaaaatgaaagaactagaacttttatgttcaatgaaggaagtctcctttgatgggaatgatcttgaaaacatggtcctatcactgagggagaagttcctacaagaagtgaattctcttattcagaaaccctcacacccactggctaaaacaaagacgttagtgaagagtttaatgaaccgagccgagctgttgctgcatgtcaccatcgcagcccagtcgggcctcacgagaagcatctctgggacccctgctgaaacaccagcttgtaaatcagcttctgaaacaaaagtgatatctcacgctgtcaggcagcctgtttttcttcgcagcatgtcagctccttctgacctggaaatgattggtaatgaagatttggaatttactagagcaaatcagaggcgtcgccacgtgaccagccaccgcagcagctcctttacactcctgcagtcgctggccattgaggacagcagggacaagcccacctacagtgtcctgctagggcagctgtttgctttcatcggcaccaaccctgaccaagctgtgtccagcagcagtttccttttggctgcacagacaaggtggcggcggggaaacactcgcaagcaggcactggtgcacatgcgggaattgctgacagctgccgtacgagtcgggggagtgacgcatcttgtgggtccagtgacgatggtccttcagggaggacccagaattgaagaactcacatgtggtgggatggtcgagcaggtccaggaagcctttggcgagaccatgacctctgttgtgtctctgtgtgctcgttaccctatcgcttgcgcaaatagcattggactcttatgtaccataccttacaccaggagcgaagagaagtgcctggtacgcagtggccttgtgcagctcatggatcgactgtgtagcttgagcaatcagaccgagtccagctccagtgagaaacagaccaagaagcagaaggtggccaccatggcctgggctgccttccaggtgcttgccaaccgctgtgttgagtgggaaaaagaggaagagacaggatcttactatgttgcccagctgtgccgggcggcgctgcccctgatgagcgtagaagactgtggaaacgtggagctcccaccctggagctactctgtcccctccttaaacagtgagcaggaggatcccagcgacccagcttccaagatcgcctccctgctcttagcaaagctggcagattatgtggttccaggatgtcagacagttctttctccaaccgcttctgaacctgacaccacattgacaaaaaccagtcccaagaattccttgaaaggagataaagatcctggagaagagagtgaggctgtggatggcaagctctcgatattttatccacaagcgggaagaccagtcatccccatgaaagtcctccagccattgctaagtagttcagaaggacggcccttccgacttggtactggcgccaacatggagaaagttgtgaagatggatcgagacatgaccaagggtggctgttgcgaagtgattacagaagaggctgcagccgccctgcggaaagccaccaagtgggcacagtcaggcctcatcgtcagcattgggccacctgtagagtctatcaacccagagactgtgagtggactatccacaggcgacaaaaagaaaactgcccaaacttccatttgccgagagaggaactcggagcttgcaaggactgatcctgtgcgtcccttcatcagtgggcatgtggcaaacagcatggctgcagaagtgatcgccttgctacatagcttgctcatggcacctgaatcaaatgctgctcaaatatggaccacaacagcagagaaggttctgtctagagcactgatgtacattccacaattggggaaatacgcagaaagcattctggaaaatggcagcagcagtggcaggaaacttgccaaacttcagagaattgcacgccaggccgttgccgcactgtgtgcacttggaggcttcaaagagacaatcaagataggatccgaggttcaggcattgcctcttcataaactgtccattactgagaaggtagtacaggcagtccagtccatgttgcttcctcaggagggaagtctctctattcacacctcacttcctgcaacaggagatgggtcagctcctgtgatggcagtcgttcggctccttgctgaaataaggacaagagcatgcctggtcatggcccagcttttagaagacagcttattttgtgaagaattcatacaacaatgtccagcagctgttgaagttcttaacctagtagcccaggaatgtagtgctggagagcgacttgcagttgtggaggtacagtgtgaacggctgaggatgctctaccgggactgtgctcggcccccaccacctcctttgcaggctgaccgaagacaggccccgtctttttactgggaaattgaaatcgtttcctatggagacaccgatgatgacaccggacccatagtttcctttggcttcactacagaagcagagaagcgagatggggcttggactaatccagtgggcacttgtcttttccataacaacggccgagccgtgcactataatggctccagtttgttacagtggaagagcgttcgcttagacgtgactctctcccccggtgacgtggcaggaattggctgggagagaactgaggggactccacctcctccgggacagccagccaagggccgggtgtacttcacatactgcgggcagcgcctctcaccatatcttgaagacgtctctggtggcatgtggccagtggttcacattcagaaaaaggcagaaataaaaataaacgtaagtctttccaaatccttcatttggtctcctttccagaacaccaaaacccgagctaactttggctcccggccgtttgcctacgcggaagggcaggcccaccgcaatgctgctgacctgtgcactgacctagcagaagagatcagcgctaactttgaggccctgcctttcgccatggcatctgacagtgacaatgatgctggcaccagtattgcatcagacccaggcactcatgggccaccatgccggattgctgccgtggccaccgctcagcaacaatatgatagtgacacctcctgtcattataaagtcgagctcagctatgagaatttcatcacctctggcccagaccctcacccgcctcccattgcagatgatgaaagcgatgatgatgacgatgatgacatccctcaggaggaccactacgccctgctggtgaaagcatgggagaccaaggtttttcctaccatccgaagacgcttccgcaatgaagcagagcggaaatcgggcctggaccagataaagggggccttacaactaggtatggtggatattgcccgacagacggttgaatttctctacgaagagaatggtggcatcccaagagacctttatcttcccaccattgaagacattaaagacgaagcaaacaagttcacaattgataaagttcgaaaaggtctcacagtagtaacccgctctccagacagcaataatgtagccagcagtgctgttggaactgctctgccaaaatttgccatccgagggatgctgaaaacctttgggcttcatggagtcgtcttagatgttgattcagtgaatgaactggtgcaggtagaaacgtacctccgcagtgaaggtgtgctggtgcgatacttggtatcctatttgacatgttgggaaagggcccccagcaggctaccgaaggactgccaccaatgggctggtcacactggacaataccaaccttcaaattcacagggagctgctgcgctgcgaggctgcgctggccaggctgtactgccgcatggccctgctcaatatcttcgccccgaagttgcctcacttgttcactcgcctcttccacatccctgccatccgggacattaccctggagcacctgcaactgctgtccaatcagctcctcgcacctcctctcccagacggcaccatcagctccagctcgatcctcctggcgcagtctttacagcattgcatccattcccagaactgctccgccacggacctcttttaccagggcaactcccagacagtgagagagtggctcaacgtggccatcacccggaccctgcaccagggcgaggagagccttttagagctgacgaaacagatctgctctttcctgcagacagcaccagagcagttcccctccgaagagttcccaatttccgaatccaaagtcaacatggacgtgaatttccccggggcagcttttgttgttgtgtcttgtaaagaaagtcaatctggattccgcaaagactcctctctgtacaaggcaccgtgggcacgggtgctcgtatatggcctcggccacaaagtgaagcgaaatggccagctgaacctcatcgaggccgcctgttacccgcgggacgcgtccccagccaacactgggcttgcacctccccccaccgctgaccagtacccctctgtggtcctctccacagacagggtccacatcaaactgggggtgtctccacctcctggagcagtcctggtgttacattccctgcccctggagttcccactggctatggccttcgcagagcagctgctgtcctggaaatcagaggacagtgaagggaagtccgaagatgagcctgacaccattccgacatccgtcctcctgcaggtggtggagctgctaggaaacttcttgtggaccacggacatggcagcctgcgtgaaggagcttgttttccatctcctggcagagctcctgcgcacggtgcacaccctggagcagaggcggcaccccgctggcctgtcctcctcaatcgccctccagctgaacccctgcctggccatgctgatggccttgcagtcggagctccacaagctgtacgacgaggagacgcagaactgggtctcaggcggcgcctgcgggggctccgggggggcggcggccggtgaccagggcaggttctctacgtattttcatgcactcatggaagggtgcctggctgtggccgaagtgaccctgcctactaacatgagtgtcacagccagtggggtgacctcagcgaccgccccaaatctcagtgactcgtcctcctcctcctcgtcctccccaggacagaccccacagagtcccagcctcctctccaagaggaaaaaagtcaagatgaagcgggaaaaggcctcctcgtcgggcaagcgccagtcttcccgcaccgtggactcggaccccaccgtgctcagcatcggaggcagcaagcccgaggacatgctgtggttccaccgcgcactcaccctgctcatcatcctccgccacctcaccaggaaggacccacaggggctgggcgtgacgagtgacgccatcgccgatgcctgccaggccctggtgggccccaccgcccacagccgcttgctggtgatctccgggatccccacccacctggacgagggcgtagtcagaggcgccatccgcaaggcctgcaacgcccacggcggggtcttcaaagacgagatctacatcccgctgcaggaagaagacaccaagaagccaaaagacaaggccgagggcggggacgggaaagttgagcccgagaagacactggccttccccggcacagacagcatggaggtcagcacgtccagcagcctgacccccgccatgagcatcagcgcctccgcctccaccagccaggcctccatctgcagctcgcagggcatctcccaaaccgtcagcgacctctctgtggatccgctgcctgccggcctcgagctgcccatccctccgggcctgttggagccccacgcggtgtccagccaggaaagcctggacatttccctgtgcagcaccggcagcctgggcagcctgggcagcctgggggagcccctggacaatgcagagacggcctcggtgtcggacatgggctccatgtacacagtcacttccctggacaaccagcccctcgccgcccgccccatcaaaggcttcgcagtcgtggagataagatcccgagccaaaattgagaaaattcgagcaagtttatttaacaataatgacttgattggtttgtcaagtttggatggtgaagatgaattgatggaaatgtcaacagaagagattctaaccgtgtctgtagtaaatcagagtctctttgatactcaagggagcccagggttagaagattatttcaatgataagtcaattaaaggggagaagctggtgcccggagccagagaggttctgacggagatatttaagagttgtgcccattcagagcagacgctgagcctgacaccagcgaagcccatcagagtctctgacatttatcttagcaaagagcagatcaactcccagaccccaggcaacctcctccacctcttcttcaccaatgtccggccgccaaaaaaggtgctggaggatcagctcacccagatcctgaggaagtatggcgtgccaaagcccaagtttgacaagagcaagtacagcaaggccgggaaggagcagcaccccgtgaaggtggtgagcaccaagcggcctatcaccaagccgcccgccaaggacaaggctgtgctcaacagcgtcagcaggactgccttaagtgagaagaagccaactgtgaagccaaaatcaccagaaaagagcaaaccagatgaaaaggacccagaaaagtcacctaccaaaaaaacaagaagtccctgaggaaaaatacctgacgctggaaggatttcacaaatttgttattgacccgagccaggcaagatattccgtagcgtctggagggcgatcttgtcctgtggttacgatcttcactttgagaggtgcgcatgcatcgatgtccgacatgcacagaaggcctcaagaaagtggaccctggagatggacgtggcacttgtgcagtacatcaaccagctatgccgccacctcgccatcacacccgcacggctccatccccatgaggtgtacctggaccccgcggatgctgctgaccccagagtggcctgtctcctgaacgtgcccatcgagagcctgcgcctgcgcttcgccttgctgcagtccctcaacaccacactggagaccttcttcctgcccctggtggagctgcgccagacacccatgtatacccacagcatcgccgccctgctgaaggaggccaaagggctgatcttctatgacacgaaggtgaccgtgatgaatcgagtgctgaatgccactgtgcagaggacagcggaccacgcggcccctgagatcaccttggacccactggaaattgtgggaggggaaatcagagcttctgaaaactcctacttctgtcaggctgccaggcagctggcctcagtgccgtcgtctcagctctgcgtcaagctggccagtggcggtgaccccacatatgccttcaacatccgcttcactggcgaggaggtccatggcaccagcggctctttccgccacttcctgtggcaggtgtgtaaggagctgcagagttcctcgctgtcgctgctgctgctgtgccccagctcagctgtcaataagaacaagggcaagtatatcctgaccccgagccccatcacctacggggaggagcagctgctgcacttcctggggcagctgctggggattgcaattcgggcagacgtcccgctgcccctggacctcctgccctccttctggaagacgctggtgggcgagcccttggaccctgagcaagacctgcaggaagcggatatcctcacctacaattacgtcaagaagtttgagagcatcaatgatgagaccgagctggaggccctgtgcgctgagatcgcctcccagcacctggccacggagagccctgacagccccaacaagccctgctgcaggttcacctacctgaccatgacgggcgaggaggtggagctgtgcagccggggccggcacatccttgtggcgtgggagaacaaggacatctacgcggcagccatccggagcctgcggctgcgggagctgcagaatgtggagtgcgtgacggccgtgcgggccggcctgggctccatcatccccctgcagctgctgaccatgctcagcccactggagatggagctgcgcaccttgcggcctcccctacatcaacctcgagttcctcaaggcccacaccatgtaccaagtggggctgatggagacggaccagcacatcgagttcttctggggggccctggagatgttcacccaggaggagctgtgcaagttcatcaagtttgcctgcaaccaggagcgcatcccgttcacctgcccctgcaaagatgggggtcccgacactggccatgtgcccccgtaccccatgaagatcgcccccccagatggcacagcaggttccccagactctcgctacatccgcgatggagacctgattgttcatgatcaagcttccccagtactcctctctgaaaatcatgctggagaaacttcgttgtgccattcactaccgtgaagaccccctcagtggctgatgggagggagccccagaattaggctgtcactgaggcacccactctgctggcttgggaagccaccactgcggcccgtccctccagggccctgcgtgaggagttggcaacattttgcttttccaaactttcgtccacattccagggcctcctggaagacttaaccttttgtctttgtacgtttcgtgatgggttggttcttttgctgcctgtttgtggtctatttgtaggatagtttagttcccagacagtttgtgtctaatttgatcttcttggacattgtccctcatggccaccagattctaatgccataaggccccagctggttccccatcacagaaccacccagcaggaagccgggggtaacaatgaacctcgggccacacagagcgttcgtggttttcagcagagcgccttccacagacaagcctgtggccagccctgccctccagcctcgagctggagttgctccagaggcagccccagcaggcctccctccacatagaggtggctgggccaattgcccaaacacgtgagacacacagggagctttatgtgttcatcttcctgctttagaacttgctcccggtcttggtttttctgaggaaaagcccacagtggttcccctgcccctcccatacctccctatctgccgtctgtctctttgggccctggtctgacagttttcatctgaggcctcctcgggagcaggagacttaagggttcatcccgaccttagttcacagagcctagctgggtgcatcccagccggcaggggggtgaggaagacacccagagatgggggggacaatggttcaggtggggggcctcctccgagactctggttgagaggaaagcacatgattcaagcctaccccacaaaaaaggagcacaaaatgctcagaaatgggcccttcctccctgcagtgacgtagggacaaggggaaaggggccacaccctttttcaaaagagtggactgaggtgctctgctcaattttgggggtctgctttagtgacccagacacttcaagtccagatggagactcccaggggggtccttctgcccctctggccagcccccaccccagcactcccccatcacccccatgtaagtgtgtaatccccagggctgaggctgcctcccaggctcacccactgccccagtgcatctttgccccaaataaggtctttgtccaagtggtactttgttcatgagcagcacaggccatcttgttggacactgtcactttgggccttgccaggtctcacagaatcacatcgctgtatttattgtataaatattgtggaatattgggaagttttggagtggagtgctgtctaggaaggttttgggagtgtgggatgctgggtccaaggaaagaagatgttgcccggcctgctgggaaagattgtgaattctagagatagagccgttagcatccatcttcctccctgttaactcttaggaaatgcattcaagggacctttattagaaagggttcccctggacctaagggttgaaatcgacctagggttaaatcatgacagctgcatcaagttgtattgggatgcaagtcaactctgggaggtgagtgccccgcaagcagttccccctgcttttgaaaagaagatggtcagcccgctgcttcccccagcgggccacagctccttttggagtgtgggggggttcacagcctaggatgtattcctgacaataaggatccttttattttccattcctgccataatggaaagagccctttcgaatttaattaagaaagtggtttttccctcccccaacatcctttaaaaattccttggttcccctttagtcctccatccccttgaaatggacttgtccagcctaccctcccccagggaggagttccagaagccttcctgttggcccatccacttggagtaggatgaccaagctgtaaggtatctgcctgcctaacgtggctgcttctcccgagagcacattggagggtccagacagattccaaaccttggcccctaaaaaaatggtgtgctgtaaagttaccctgatgtatatttattaataattagtaatggtttgcatttaacaaacttttcattcaatctgatgctatttacaccatggctgtgttaaagggaagctcactaaagggaaaaaagtcacaccaataaataacctgcatctaattttgatttaccttaaaagttgtgtgaacacctacccttgctgagcaagttcaaaggctggcatgcttggatggctctgatatttaagtgctgccaagtggctaggaattaaagtgtttctaattattatggtc

SEQ ID NO: 135683 - DNA, 2712 bp, Homo sapiens
ttatccacgggatctgatttttacggtacaaggcttccacttccgcgacttcatcctgcactgacgaagcgaggcatagcgactgttctcccgacgttcccgcgaatcgccgccagacgttccgggtcgatagtcaggccgaacaattttgctgaagcggtttgagcgacgcgggtagcaccagattatccatatcgtggcaataaaggggtagtttgccgcgcggataccaaacgggtgagtgaggaaagccgccgctgctggcatcgtgcggcctgaccgtggagcagatgataaaccagatggaccggtgtacacgccggcgcgaaaaatccacctgtaccactgcgaccatcgcgcctgccgctggcgctcatcagcacggaaggggcaacagcgtggtgcgcgaatatgatgaatggggcaacctgctgagtgatgagaacccgcatcatcgcagcagctcattcgcagctgcgcgataacacactgatactcagtgataacggcggcagagcctgtattttgagcacctgtttcccggtgaggacggttacagccgcaggagtcactgtggctggtgcgcggcggcgtggcgaaactggatgaaggtcccggctggccgcactctggcaggcgctgccggaagaactccgcgggtactgaccggctggtggaccgcttcgggcgcacacagacgttccaccgcgaagccgccgtgaattcagcggcgaaatcaccggcgtgacggatggtgcctggcgtcattccggctggtactgaccacgcaggcgcagcgggcagaagaagcccggcgcaggccatttccggcgggacggaaccgtccgcttttcctgataccctgcgggttacaccgaatatggccgggacaacggcatccgtctgtctgccgttggctgacgcacgacccggaatacccggagaatttacgatgataaataccggggcggatggtggcgcaccgtcacacgggccggccggaaatccgttaccgttcgacagcgacgggcgggtgacagaacagctaaacccggcaggcttaagcacacgtatcagtatgagaaagaccgcatcaccatcaccgacagcctggacgccgtgaagtgcttcggttatgttccttttgaggcctgataagacgcacagcgtcgcatcaggcatcggctgccggatgcgcgtgaacgccctatccgacctacggttatgttctggctcgttggccttggcaacgattatcgcggttggcgctacacttcgttgatttgcggtcgtccagcggacccgaaatgtgatagcgcaaaatggagactttgctcccagcggccccagcactttactggcggcaaacacgtcgcagaaatcgtctgtgcgacaaccgctgtccatattcaggtcgcgacgtaccagatttaccgaccgtgtcatggcgatagccgcctccaggccatccaccagcgtgtcgtcgtgtgcataacgccgtcggcgcgatttgctgcaaggcgatgtaaacccccgcatggcgctgctgtcggcaatgatcaggtctggtttcagagcggcaatggcttccagctcggctgcgcgcgcgttccgacggactgccacggtttcaggtgcgcagcattcgggcaggatgcgttttgcatcgttatcgtcggcaataccgatgggatgacgtccacggcggccagcgcatcggcgaacgagagttccagcacacaatccgttgtggcgttttttcgagtgtaaacgtgccgtgttcgtccgaaccgtggcggcaaaggcgtggctgatcaccagcagcaggccttcaacgaatacgcttgccttgcgagtgactattatctcgagcgcggcttcaatatggacgacagccgcaataacggtagttttccacgcaagaaattcgcgcctatttgccgctgacgctcggcaacactcggtgacgccgtatacgcgcattgggctggatcgctggagtaactggactggcaggatgatattgaacgtgaaggccatgattttaaccgtgtagtttattttacggttatgatttccagaacggactttccgtttcgcaccgctaactgctgcggaatagcaatatttttcctgctgccgcacgataaatgggtaccgagatcgattggtatactgtcggtaaaggtatctccggcagctaggtatcgacagcctgcacccggaattcaggtacgcgctgaccttcaccagcgacgctgagcccatgactacctcgactgtgcctgcgccgccttgcgctgcatgttcatcagtttcaacacgaataccggtgagcttttgctggcttccgtttcgtttggcgtaatgaatgtgccaccagcgccagcagttcgtcaggaagtcgcgagccggagccgggttgaagcgcaacgatatgcttatgtgatgggggattttgcgccgcggccatgcacactgtcgagtggtgattccagcttcgccattaactaaaatcagcgccacacctgttgattcgccctttatcacgctttgttccgggcaaaggctagccaggtcaggcccgaggcggttttcagaacggcaaacgtcgcccgaccattgcccggtgaaaggataagcggctgaaaggtgagtggtttcgcgtaccaccattgcatcaacatccagcgtggacactctgtcggccat

SEQ ID NO: 135684 - DNA, 1548 bp, Homo sapiens
atgggcggcggcatcgcttaccagtcagcgtggaaaggcgtgccggttgtcatgaaagatatcaacgacaagtcgttaaccctcggcatgaccgaagccgcgaaactgctgaacacgcagcttgagcgcggcaagatcgatggtctgaaactggctggcgtgatctccacaatccacccaacgctcgactacgccggatttgaccgcgtggatattgtggtagaagcggttgttgaaaacccgaaaataaaaaaagccgtactggcagaaaccgaacaaaaagtacgccaggataccgtgctggcctgctgccgcgacggcgcggatttccgcaagatcgacaaagtgatggaaaaacagtttggctggccgatgggcccggcatatctgctggaccttgtgggcattgataccgcgcatcacgctcaggctgtcatggcagcaggcttcccgcagcggatgcagaaagattaccgcgatgccatcgacgcgctgtgtgatgccaaccgctttggtcagaagaagcgcctcggtttctggcgttataaagaagacagcaaaggcgtgggcctgtgctcctatctgctgatcgggttctattacaccgatccgaagaatggcgcagcggcaatgaaagcgttcgtcgtgacccgtgtgggtgacgtgttcttggctttcgcactgttcattctttacaacgaactgggcaccctgaacttccgcgaaatggtggaactggcaccagcgcactttgctgacggcaataacatgctgatgtgggcgacgctgatgctgctgggcggtgcggtcggtaaatctgcgcagttgccgttgcagacatggcttgccgacgcgatggcgggcccgacgcctgtctccgcgctgatccacgccgcaaccatggtaaccgcgggtgtctacctgatcgcccgtacccacggcctgttcctgatgacgccggaagttctgcatctggtgggtattgtcggggcggttacgctgctgctggccggttttgccgcgctggtacagaccgacatcaaacgtgttctcgcttactctaccatgagccagatttggctacgatgttcctcgcgcttggcgtgcaggcatggatgcgggggatccttagagtgcctgcagcatgaagggattccctactctcgcatggggagaccccacactacatcggcgctacggcgtttcacttctgagttcggcatggggtcagcgtgtttcaccctcggttattttttcatgtacaaacaagctgttattctcctgctgatgctgtttaccgcaagtgtcagtgccgcgtgcaccttgccgatagcgatcgaccatggcacgccaggccctgcggagctactgaccgtggcgctgcgctacaacctgagcagctacgacgctgcctacctcgagttggcgctgcggctcgaaatcccgattgccaaggggtccccaaactttgcttttcgtcgagcagcaaccgggaacgaggggatcaaaatgcattttctccggaataaaggaatcctatggatttga

SEQ ID NO: 135685 - DNA, 1440 bp, Homo sapiens; identical to SEQ ID NO: 131836

SEQ ID NO: 135686 - DNA, 804 bp, Homo sapiens
atgatgcgtcagtgccagccaggcttaattcgccggcatctaacggctcggggagctccaaccagagaaagtaaccactgtcattatgatgaattttcacttccgcaggcagataaagcagcaaatcttctccacaaatataccaactcagtcacaacagggctgaataacgcgcgctttcagtttttcaactggatgagcggtctgctgtgggtattgatcctgacaactctgagttacatgggatccatacatgcgaccaagcacgcgggcagtgtctttaatcgactctttatgaccaatctggctgccgcttgggccgagataagtaacgcgagcaccctggtcatatgcggcaacttcgaaagagcatcgggtacgagtcgagtctttttcgaagatgagcgcgatgtttttaccacttcgcggacctggtttcctccacgaagtcaaggcatcaggttacctggaggccccaatcagcggatccaggtccgctatatgagtccacatggattttgtaacccaaaacccccgcggggccggtggagccgatgcaccaagtgccctcttccaaaagggtccctacccgggacaaaagaaccaggggagacagcacccggcactcgggacaaagcaaacccacgaaacggtacaaccacgcatatgaaatatagcccagaatcaagtggttcataccagatgcaggatgttaacaagcaagtcataaagggaaacaccacacaaacagaattaaacagaaaatcagatgatatctcaatagatgcagaaaaagcatcgtga

SEQ ID NO: 135687 - DNA, 2559 bp, Homo sapiens
tcaataacctgactcaccacatcccccttgtgtgctacccgcaccctcgccatacgactcgccgcagaccagaccgttctggcacaccgccctgaacatgcccggcagcatctggtacgaactggtgccatcgtgagagttaagcaggataatttccggaacctgtttaccggtaatttgcccctcccgacgtaggcgcagcatatgcttagtatgctcacgacgacgggggtcacgtacccgtgtctgacaggcaaagaatggctggaagccttcccgctgcaggctgtccagcagggaaattgtgggtatatacgtgtagcgttcactgcgggattcgtgtttatcctcactgaatacgctgggcaccacgcgaaataactcttcacgggttaacggacggtcacggcgaataagatttgcagcgccaaagcgcgaagccagacgggtcataagcagactcctcagtatgggtaaaacaaataaagaaagccctgccgcacttgcgacagggctcggagaataatagggcagaattaaacactcagaagaagaaatcccagacagcgcgggccacgtatcgagtatggcacctacggtttcaccgaaatcgtcacgtgcctgctcccgggctaccgggtaccgagcacgattgcgtaaccctcccttgtccttttgtgcattccgaacatcagggttaaacgatccaactttctggtcattgacgtagacgtcgaactgccgggccttacggatatccatgatgaagctgaaccaggcattatctccgttacgccagccaagggttgagggaatggcatattgcttatggtccatcaccactgtgatgccggtactgtcatcatgcgagctgaccgttttatccccggcgaggatcagaaaaaccgagtgctggtaaataccgttctggtccggatttcccgtgcagttgatggtaaacatctttccgctggcatccgtcacactgtattccgcatttgccataatgcctgcacccagcaccgcggcctgtttcggggtttcaacgtctttggtgagtttcttcgctttgccttttacatattgatcgttaaggaaaatgccgaccagtgcgcgggcttcgttggtattatcgaactgggcgaaatcgatcgcgtgatgcaggcgctgccggatgtcgaacaagccgttacccacgcctgtgtgattaaccaggcggctgccaccggtggtgatgcgcgtcaattggtgggctatctggtgtcgcaatcgggcttcaacatcaacggtaatcgccatttgaccactaccatcaatccggtaggttttccggctgataaataaggttttcccctgatgctgccacgcgtgagcggtcgtaatcagcaccgcatcagcaagtgtatctgccgtgcactgcaacaacgctgcttcggcctggtaatggcccgccgccttccagcgttcgacccaggcgttagggtcaatgcgggtcgcttcacttacgccaatgtcgttatccagcggtgcacgggtgaactgatcgcgcagcggcgtcagcagttgttttttatcgccaatccacatctgtgaaagaaagcctgactggcggttaaattgccaacgcttattacccagctcgatgcaaaaatccatttcgctggtggtcagatgcgggatggcgtgggacgcggccgggagcgtcacactgaggtaatccgccagacgccactgctgccaggcgctgatgtgcccggcttctgaccatgcggtcgcgttcggttgcactacgcgtactgtgagccagagttgcccggcgctctccggctgcggtagttcaggcagttcaatacaactgtataccttgtggagcgacatccagaggcacttcacccgcttgacagcggcatccagagccaccatccagtgcaggagctcgctatcgctatgacggaacaggtatcgctggtcattccgatggttgcccggataccggacctggcacaatgctccggagtcaggctccgccacccgctggtcaccattgatggcgaagacgcccgtgactttgacgatgcagtttaccatcgcatcagttgtgatgatttttcctttaatatccagcatgttaagaagttcagggatagctgtgatctcattggatttcttatccgtcttgatctgcccgatgaccagactgtgcattgttgagaacgcactaatgacatgaatcgctcccctgcggcgactcttgtcataagagtgccggagcgtttttccatcaattgcaatgacgtctttatcatttgatgaatggcaatcacgcatccagttaataaagcactcgtgaaattttgcaggactgatacaggatacaactctggcaatagtatcgtgaacaggaataccattttcaaaatcaccatattgcttcaagaaatcgagatgtgtttccccgaaatcctctatatcttcccaactttcttttggaggaggttgacggtttctaaggatgattctttctgagtgaaatattgtcagtgtcattgaccttttcat

SEQ ID NO: 135688 - DNA, 1656 bp, Homo sapiens
ttagttatcctgatggtagtagaggctatcgacaccgctcagtgcggcgctctgtactggcacgcccagcaccggcaccagcgttttggcggcaatcatgcctggcagatgcgctgcgccgcctgcgcccgcaataatcacctgataaccgttctcttcggcgctttcggcgaagctgaacagtttatcgggggtgcggtgagcagaaaccacttcaacgtggtgcgggacattcaggatttcgaagatttcggcggcgaactgcatggtagcccagtcgcttttggaccccatcacgatggcgacacgcgccggattattgcgggaagacatgcgtcctgtcccctcgccttgattaatcacaaattcatttttatcgcccgttgtcagcgcatccggctcgatgttcatggtacgcaatacgccgcccatgatggcaccaaagaccggcgcggaaacggcgccgccgtagtatttacccgcctgcggatcgttgataacaacaaccagcgcgaagcgcggctgactcgcaggcgcaacgcctgcggtataagcaatatatttattgatgtagcgaccgtccggcccgacctttttcgcggtaccggttttaatggcgatacgatagcctttaatcgccgccttcacgccgccgccgcccggtagcgccacgctttccatcatatgcaccacggtgcggacaatggattccgggaagacacgttcaccgggaaccggggggtcaactttggtaatcgacagtgggcgataaatgccgtagctgccgatagttgcgtagactcgcgctaatgtaacggtgttaccattagcccgtagccgaaagagaaggtggccctctaagcgaccaatgcgccgcgtttccaccatcagtggttgccggacgagctgcgtgtcgaaaaagggtttagcccggatacgctcaagctggcgtgaaagcaggcaagccaggcgtgcggcctcatccagcgaggaggcaaaccagacattctcgtcgcgggccaccgccggggtataacctaaaaacagcgccaccgtcggtttgccggttgctttcatggcattaacaattttcagacgcacagcttcggcaggtggttttgaaacaaatgccagcacttcgcttttctcgtctgcactgagcatttccagcgctgttagcgcactgatgccgcccacttcacggctgaggtcgcgcccgccaaggccaatcgcgtgagtaattccctcccctgccagcgcaatctgcgaacacagctcctgaatcccggtaccggaagcgccaatgacgccaatattgccttccggcatcacgttagcaaaagccagcggtgtgccggcaatcatcgacgtaccgcagtccggccccatcaccagcaagcctttttcccgcgcgcgggttttaagttggatttcatcttccagcgtgacgttatcggagaacatcatcacgttgaggttgcgatccagcgcctggtttgccagctccgccgcatactcgccagccactgaaatcagcgccagattggcatcgggtaatttctgacaggcactgtcccagcgacgcacctgcgtcaacgcctggctgctgcctgacccctgcgccagttgttttagcgcctcttcaagctgctgcat

SEQ ID NO: 135689 - DNA, 1396 bp, Homo sapiens
  misc_feature (1)...(1396): n = a,t,c or g
cttccaagtagcttggatttccaggtgccgttgtggatgtgctctaaagcgccggcaatcactgcagtgcggttgccgagcaggcggtcggcaagccagccgccgagaataggggtaacgtaaaccagagaagcatatgcgctgaacaggctgatggcatggttatcatcaaaaccaagcttaacggtatagcggccatcagcctgacggtatgcaccgtgaatatcggtttcaaagcccggatagtgagcgccgatttcacacagcatctgcaggaactccagaaccggacgggtttcttcggtgatcatttcacccggcattaccagaggaactcccggcgggtacggaaggatcatattggcgttaatacgacctaccatttcgtcgagggaaacttcttcggtcataccgtgcagctctttctggaatgcagcatacggagtcattaccatcgncggcagcacttcaaatgcgcgatacatcagatccggcagattgtggtgaacaatcagtttgtggatattctgagccagttcctgaatacgcatgttttcatagaattcaggatcttcacgatacagagacggcagcatgtttttcacacgcaggttcaggtcgaacgcacgtttaaagtcagtcagagcacgcagcaggctcagtgctttggtcttatcgataccgatgctgaacaggaacagcaggttatacggaccggttttctcaacaacgatgccatgttcgtcgaggtatttcgccacgatgctggccggaataccaaagtcgctcatggtgccgtctttttccatccccggagtcagcagggtgactttgatcgggtcaagatacatgtgctcgttatcgatgtttttgaagccgtgccaggtgagtctcagcttgccgcagtggagacagcggaagagataaccctgacaatgaccacccttttgcaggcatttagctagatcagaatttctaataccgaaattctcacaatcttcttcaaggttggcaaattcatcgaggcgatcttttatatcattccagcccacatagccgataaaaacacagaaatcgccacaatgcgcgagccagaattcctgctgccatccatgataacctggcgtgcgttcaaccaactctttcagcatttcatcaggatatgtgttcttaataccggcaaattcgtcctcttcatcatactcaaattcaacaccttctatgctggcatcatcctgaaaactacctgcaaacttttcagcagcagaaccgtccgcaatacaccacggacagagatgttcaacttcatcaacgcaataaaagggacccgagtaataaactgacgtctgttgttcacagcaatcgcactctacggctttatcctgttcaaatgcgc

SEQ ID NO: 135690 - DNA, 3738 bp, Homo sapiens
atggctgaagccagtgtttttcaaactgtggatccctggaggcccggatttgccaccatccccgattttctgaaggaacgttatgataaaacgacgcgtattatcatcgacttctgcttcttaattgccaccggcgtctgctttctgccgattgttctctactccggcgcgttggcgctcaacagcctgtttcacgtcggggaatcgctacagatttctcacggtgcggctatctggctactggtaattttgcttggtctggcgggaattttgtatgcggtgatcggcggactgcgcgcaatggcagtggcggactccatcaacggtattgggctggttatcggcgggttgatggtgccggtatttggcctaatcgcgatgggcaagggcagctttatgcagggcattgagcaactcaccaccgttcacgccgagaaattaaactcaatcggtggcccgaccgatcccttgccgattggcgcggcatttaccggtttgattctggtgaacaccttttactggtgtacaaatcagggcatcgtgcaacgcacgctggcgtcaaaaagcctggcggaagggcaaaagggggcgctgttaacggcggtgctgaaaatgctcgacccgctggggctgaaacccgatctgctggcgtataataccgcgctacgtgcactcatcccacagcggctgatcgctttcgatgacgcggtacgtagcacgttgaaagaggaggaaaaactggtcaactccagcgactggggctacgacgctcaggccttttgcccgctggcgaccggagtagtgaaccaaatcggcggtaaagagcgttatttctttggcaatattttgtggcagacacgggcgttgatggaccgcgcgatcggtcataagctggcgaaaggccgcccggagcgcgaatatttacagactggcgatgcggtggatagctggaaagtgattgtcgttgaaccggaaaaacaacttacgttgttatttggcatgaaagcgccggggctgggacgactgtgttttagcctggaagataaaggcgactatcgtactatcgatgtccgcgctttctggcatccgcacggcccacattggatcgatgccaagagtggcctgacccacagcctggtcaccaccgcggccaacgagcatgacctcaatcagctgggtaatctgctgcatggagaggagcaatttgtctcagccgatgccggctaccaaggggcgccacagcgcgaggagctggccgaggtggatgtggactggctgatcgccgagcgccccggcaaggtaagaaccttgaaacagcatccacgcaagaacaaaacggccatcaacatcgaatacatgaaagccagcatccgggccagggtggagcacccatttcgcatcatcaagcgacagttcggcttcgtgaaagccagatacaaggggttgctgaaaaacgataaccaactggcgatgttattcacgctggccaacctgtttcgggcggaccaaatgatacgagtcggtatgatgattttggtgacggggggcgcacggagcgggaagagtcgccacgcagaggcgcttattggggactcttcacagctcattcacccattcggcgagcatcgcaagctgcgcctgacggtgcgcctcacgcaggcccagatgtacgcacatcacatgaatcgcttttccggtcatcggcggcacaatgcggcagtagagcacgccgcgcttttccgcaccatcgaccgaaacatcgcgattctcataatgttcaatgggataacgcgacagtacggcgttgccgtgatgcccttccgggtatacggcattgcgaccgtaggcaaaatcgctccacatagtgtcggcgagaaactcgtagtgcgaggtatcgggccagttttccacatgcagcggatgaacttcgtgcgcgcccatcacttcctgcaggcaaacaatatcggcgctgacggtacgcacggcgtcgcgaagttccggcaaaatgaagcgtcggttaaacgcggtaaagcctttgtgaatattgatggcatccccacctccaccggcctctctgccttgcgccagggcacggaccggcctctaggcggcttccacggatgcatccatgaggtgcgcatcaacaacgagctgcaggacttcaaggccctcccaccacagtccctgggggtgtcaccaggctgcaagtcctgcaccgtgtgcaagcacggcctgtgccgctccgtggagaaggacagcgtggtgtgcgagtgccgcccaggctggaccggcccactctgcgatcaggaggcccgggacccctgcctcggccacaggcatctagagcagaaaccgaagatgatcgtcgtttctgaatgctactggaccgcagcagccaaacacgcagatatcgtattcccgatcaccacatcgtttgagcgcaatgacttgacgatgaccggtgattacagcaaccagcatattgtgccgatgaagcaggctgttgctccgcaatttgaagcgcgtaacgattttgacgtgtttgccgatcttgcggaattactcaaacctggcggaaaagagatctataccgaaggtaaagatgaaatggcgtggctgaaatttttctatgatgccgctcagaaaggtgcccgtgcgcaacgcgtcactatgccaatgtttaatgccttctggcagcaaaataaactgatcgaaatgcgccacagcgagaagaacgaacagtacgttcgttatggtgatttccgcgccgatccggtgaaaaatgcgctgggtacgccaagcggcaaaattgaaatctattcaaaaacgttggaaaaatttggctataaggattgcccggcacacccaacctggctggctcctgatgaatggaaagcaaaaaaaccacccggcagcgaaaattcactgccgggcgcggttttatttcagccccagagcggctttcatggtgtagaagagatcggtctggtcggtcagtccaacaacattggcggcatgcgggccatacgccgcaatacgcaactgactgccgcggtgctgcgcggtgaactggaagccattcaggatggcgtgcgtaaattcacgccggagacggtggcgtctttacaggcggaggtcggtacactgaccaaactggttgacgatctccatcagttgtcgatgtctgatgaaggcgctctcgcctatcaaaaagcaccgacagtattaccgtatttggcgatcgccgaccgtttaatgcagttattcaataacttactggaaaacagcctgcgctacactgacagcggcggcagcctgcaaatctctgccgggcagcgcgacaaaacggtgcgcctgacctttgccgacagtgcgccaggtgtcagtgacgatcagctacaaaaattgtttgaacgtttttatcgcaccgaaggttcccgcaaccgtgccagcggcggttccgggctggggctggcgatttgcctgaacattgttgaagcacataatggtcgcattattgctgcccattcgccttttggcgggcattacagtagagttaccgctggaacgggatttacagagagaagtatgaccgagttaccaatcgacgaaaacacaccgcgtattttgatcgtggaagatgaaccgaagctggggcagttgctcattgattatctgcgtgctgcgagctatgcgccgacgcttatcagccacggcgatcactttagagccctatag

SEQ ID NO: 135691 - DNA, 1449 bp, Homo sapiens
ttagttgactgtcagctgtccttgctccaggatgctgtttttgacaacggatgttttattgcctttgatgttcattaagaagcttggcgcaaatgttgcctttttatcctcgaagaagcctctgtttgtcatgtagcttgtgataaccacattgttgcctttggcttgcggcactgcgaagtgagagtaagtgaatgtcacatcgtttggatcaagacccatttgcagcacaagccctgttttgttcagcggcttgtaagggccggttaaagagtttgatacataaccaagcatgtaaatatcgtttgagttaataccatcgatcgtcatttttgaaccgcgtgaatcagtgaacaagtaccatttgccgttcattttgaaaacattcgcgcgctcgatttcatcagttaccgtgtttgtagtgatcagcggcttcactacttttttcaatgtgtaatcattatttaactccccttctttgagcgcgcgcgccagaatggcttccagctttaacggttcccgtgccagttgatagtcatcaccggggcgggaggctaacatttcgattaattccttgcggtcttgttccgggcaaaaggccagccaggtcaggcctgaggcggttttcagaagcggcaaacgtcgccagaccattgcccggtgaaaggataagcggctgaaacggtgagtggtttcgcgtaccaccattgcatcaacatccagcgtggacacatctgtcggccataccacttcgcgcaacagatcgcccagcagtggggccgccagtgcagaaatccactgttcgtcacgaaatccttcgcttaattgccgcactttgatggtcagtcgaaaactatcatcggagggggtacggcggacatatccctcttcctgcagcgtctccagcagtcgccgcacagtggtgcgatgcaggccgctgagttccgccagcagcccgacgctggcaccgccatcaagtttatttaacatatttaataacattagaccgcgggttaagccgcgcacggttttgtattccgtctgctcattgttctgcatattaattgacatttctatcgttgcaagtttacacttatgtttgcctgttgcattagcacatttattacttactagcacagttattctgtccttgacatgcttaattcctgtaaaggctgtctcatcagctgcagtcagtgtctggccaaggcaataatgcccaaatagtgatgtttcatcggcattataagcttgttctaatgtcagattttcatcatcaatgaatttatctgctgctttgtgatcaccacaaacagcagatgctttatcatcacaactctttagaaatctaatgccttgtcttttcttacatttctgcaaccagcctgctgaatatttatacttcccttcaattttcagttcactgtgatagatctttgcttgtttcat

SEQ ID NO: 135692 - DNA, 1866 bp, Homo sapiens
  misc_feature (1)...(1866): n = a,t,c or g
ttagcggtattgcttcagcaccgcacgacccagcgtcaggatctgcatttcgtcagatcccccggagacgcggtctacacgcagatcacgccagaagcggctgatgcggtggttgcccgcaatcccgacaccgcccagcacctgcattgcgctatccacaacttcaaatgccgcattggcgcagaagtatttgcacatcgctgcatcgccagaggtgatggtgccgttgtctgctttccacgctgcttcatacagcatgtttttcatggagtttaatttgatcgccatgtgggcgaatttttcctgaatcaactggaaacgaccaatagcctcgccaaactgcacgcgctgattggcgtagcgcgccgcatcttcaaaggcgcacatcgccgtaccgtagttggtgagggctaccaggaaacgttcatggtcgaactcttctttgacgcggttaaagccgttacccggcccgccagagaaaaaggcatacaccgcaaaggccatcactaccagccagatccccatatccgggattagccccaaaagcgccagcgccagcgtcatcatggcaaagctgccaatcaacaatggacgccgtccggcagtgtttaaccacagcatcggcggaatacagccgagcataaagaacaggctaatcaccacattccctagtgccgcgtttttgccaacccccaatcccaacaaaccaacgatttgcgggccaaaggtgtaaatggcgaacattgggatcaccacatcgcggcaataaagctgatggaaaacgcccgctgacgggtattttttcactttcgggttttcaacaaccgcttctaccacaatatccacgcggtcaaatccggcgtagtcgagcgttgggtggattgtggagatcacgccagccagtttcagaccatcgatcttgccgcgctcaagctgcttgttcagcagtttcgcggcttcggtcatgccgagggttaacgacttgtcgttgatatctttcatgacaaccggcacgcctttccacgcagactggtaagcgatgccgccgcccataatgcctgcacccagcaccgcggcctgtttcggggtttcaacgtctttggtgagtttcttcgctttgccttttacatattgatcgttaaggaaaatgccgaccagtgcgcgggcttcgttggtatgcgccagcgggacaaaacttttgttttccaggtttaaggcttcttcacgaccaaaacgggccgcagcttcaatggtttttactgcggtgatgggggccggataatgtttccccgctgtttgtgcgaccatccctttagcgatggtgaagctcatggtggcttcaatcttgctcagttttagtggttccagcttcggctgacgttttgctttccagtcgaggtcgccgttaatggcctggcgtaaaaccgcctttgcgccttcaaccagtttttctgctttgactacgccatccaccagaacggttttcagncgcgtatacggggcgcaatctttaccggggggaatattttcccggacgttttggcgccccttctgtgcttcttctaaacgccagccgtgttgttccctggtttcgtcacccattgattcgttgtccacaaatttttcgcccatttgtagccccctcattggaagggggggcggcgcctcctctagtgaccctagaggatcccgaacaggtgcaccgctaaagcgttcctcgcggaacatcagatagtcccggaatcgttttatccggtggtgcgggcgcggctgacggcgattaacgataagccgacagaaggtaatgaagatgaggcgcttaaccgcgaactcaatcttacctggcaaaatacgcggcccgatcat

SEQ ID NO: 135693 - DNA, 1399 bp, Homo sapiens; identical to SEQ ID NO: 129252

SEQ ID NO: 135694 - DNA, 5356 bp, Homo sapiens
atggactggctggctaaatattggtggattctggtgattgtctttttggtaggcgtcctgctgaacgtgattaaagatctcaagcgcgtcgaccataagaaatttctcgccaacaagccggagcttcccccgcatcgtgatttcaacgataagtgggacgatgacgacgactggccgaaaaaggatcaaccgaagaagccaggtaatctgtcttttacatcatttcaatcacatcatcatcgccaggcttaccgccacttagaataccgacagtatgcgcgtgtgcacctgcgcttgcagcagtgccggacaggtccggcaacttccgactccggtatagaagttaaccagaatatagctgtcgccagagcgggtgacattgtaagcgccagattcggcattccatggaacgccaccatccgcatcggcatatgtatccgttgcccttctggcaaaagcagccacatgcgcggcgccaccataaacatcaccttgattggtaagcagcaggaaaaagaagctaatggtctggacccggaagtgctggcggagattaaccgcgaacgcgaggccttcctggcagcacagcagggaagtacttcaacggagttgtttaccaccattgaaggcaactacgctgatgctgtgcgcctgctgacgactgctcatagcgtaccgtttgacggtaaagcgacgctgtttgttgctgaacgcacacttcaggaaggtatgagtcccgaacgcgcctggtcgccgtggatagcggagctggatatctatcgtcaggattgtgcgcatgtggatattatctctccagggacgtttgaaaaaattgggccgattattcgcgcaacgctaaacaggttataccccatgtcatcactgaatattaaacagggaagtgacgctcattttcccgattatcctctggcgtcgcccagtaataatgaaattgatttacttaatctaatctcagttttatggcgggccaaaaaaacggtcatggcggtcgtttttgcgtttgcctgcgcaggcttgctgatctctttcatcctgccgcaaaaatggaccagcgcggcggttgtcacgcctccagaacctgttcagtggcaagagttggagaaatcattcactaagcttcgtgtgctggatctggatatcaaaattgatcgtacagaagcatttaacctgtttatcaagaagtttcagtcggttagcttgctggaagagtacctgcgttcatcaccttatgtgatggaccaattaaaagaggcgaaaatcgacgaactggatttgcatcgcgcaattgtcgcattgagcgaaaaaatgaaagcggttgatgacagtgccagtaagaaaaaagatgaaccgtcactgtatacctcctggacgctaagttttaccgcgccaaccagtgaagaggcgcagaccgttttgagcgggatgttcgcacaaacagcggggaaacattatccggcccccatcaccgcagtaaaaaccattgaagctgcggcccgttttggtcgtgaagaagccttaaacctggaaaacaaaagttttgtcccgctggcgcataccaacgaagcccgcgcactggtcggcattttccttaacgatcaatatgtaaaaggcaaagcgaagaaactcaccaaagacgttgaaaccccgaaacaggccgcggtgctgggtgcaggcattatgggcggcggcatcgcttaccagtctgcgtggaaaggcgtgccggtatgtcatgaaagatatcaacgacaagtcgttaaccctcggcatgaccgaagccgcgaaactgctgaacaagcagcttgagcgcggcaagatcgatggtctgaaactggctggcgtgatctccacaatccacccaacgctcgactacgccggatttgaccgcgtggatattgtggtagaagcggttgttgaaaacccgaaagtgaaaaaagccgtactggcagaaaccgaacaaaaagtacgccaggataccgtgctggcgtctaacacttcaaccattcctatcagcgaactggccaacgcgctggaacgcccggaaaacttctgcgggatgcacttctttaacccggtccaccgaatgccgttggtagaaattattcgcggcgagaaaagctccgacgaaaccatcgcgaaagttgtcgcctgggcgagcaagatgggcaagacgccgattgtggttaacgactgccccggcttctttgttaaccgcgtgctgttcccgtatttcgccggtttcagccagctgctgcgcgacggcgcggatttccgcaagatcgacaaagtgatggaaaaacagtttggctggccgatgggcccggcatatctgctggacgttgtgggcattgataccgcgcatcacgctcaggctgtcatggcagcaggcttcccgcagcggatgcagaaagattaccgcgatgccatcgacgcgctgtttgatgccaaccgctttggtcagaagaacggcctcggtttctggcgttataaagaagacagcaaaggtaagccgaagaaagaagaagacgccgccgttgaagacctgctggcagaagtgagccagccgaagcgcgatttcagcgaagaagagattatcgcccgcatgatgatcccgatggtcaacgaagtggtgcgctgtctggaggaaggcattatcgccactccggcggaagcggatatggcgctggtctacggcctgggcttccctccgttccacggcggcgcgttccgctggctggacaccctcggtagcgcaaaatacctcgatatggcacagcaatatcagcacctcggcccgctgtatgaagtgccggaagtcggtgtggcggtgggcctgcacggcgccagtgtgcagcagcaaaaatcattctgtccttctgttagtatctactcacagccgatcccgggcctgcagcaactctgcgccgctccccccccccccggcttagtgcaccgaacggcaatctccgagggggtcggaatgcctttacacgtcgtcaatttaccgccgaaaagatttgcgcgtaaacgcctggagcccaaatgggtacggataacttggcagttcgctgatatgcaagatatcggtaagacgccgctcaccgcctgccgttgccagcaagttttcagcaatgttacgcgccgacatcagcgcccgcagcatcggcataacgccacgtttgcgccagatttgccgataaccatcgaactcttcgactaccacatcccacgcatcgtttcgatatccagcgcgttcagccccatcattgacgttgccagcgcactacgcagggtgttctcacgttcgggcgtcatcaccgcctgcaacaaccaaagcatttcctgcgcttccagagtttcaaaaacactgtcgcggttcgaaagtgtagtgggcgtgaacttcgctacgcgccttcatataagtgaagatatccgcaccccggaatgcatatattgcctgcttcgggtcgccattagcaacaatgcggttcccgctgatggtgccagataccgcgaaaaatcggtactgctgggggaccgggtggccccgagcggcggcgagcggtgcaagagggggaacggaggggcccgtaaaggggggcgcgctagaggaggagcccctagggatccgaagggagcagcaagggcgaaggccaatgcatggccatggacggagccaagagagtgttccttgattgctggcgaaatcgccatcgaatgccagcgtgggattggtcaccaggatcgttttcagcgcctgatcaccacgctacgtcaggtgctggagtgcgatgcgtctgcgttgctacgttacgattcgcggcagtttattccgcttgccatcgacggtctggcaaaggatgtactcggtagacgctttgcgctggaagggcatccacggctggaagcgattgcccgcgccggggatgtggtgcgctttcccgcagacagcgaattgcccgatccctatgacggtttgattcctgggcaggagagtctgaaggttcacgcctgcgttggtctgccattgtttgccgggcaaaacctgatcggcgcactgacgctcgacgggatgcagcccgatcagttcgatgttttcagcgacgaagagctacggctgattgctgcgctggcggcgggagcgttaagcaatgcgttgctgattgaacaactggaaagccagaatatgctgccaggcgatgccacgccgtttgaagcggtgaaacagacgcagatgattggcttgtcccctggcatgacgcaactgaaaaaagagattgagattgtggcggcgtccgatctcaacgtcctgatcagcggtgagactggaaccggtaaggagctggtggcgaaagcgattcatgaagcctcgccacgggcggccaagctgctgagggtgttgcagtatggcgatattcagcgcgttggcgatgaccgttgtttgcgggtcgatgtgcgcgtgctggcggcgactaaccgcgatttacgcgaagaggtgctggcgggcgattgccgcgaccgatttgtttcatcgcctgagcgtgtttccactttcggtgccgccgctgctgccgttgaggcgttgcgtgaccatctcaatacgctgggcggcgagcaccatgaccccgtgcagttgctgaatatttactacgaaacgccggataactggctgcgtgggcacgatatgggcttacgtattcgtggcgaaaacggtcgctatgagatgaccatgaaagttgcaggaagagtgacaggcggcttacatcagcgcccggaatataacgtggcgttgagcgaaccgacgctcgacctggcgcagttaccgacggaagtctggccgaacggcgaattgcccgccgatctcgcctcccgcgtgcagccgctgttcagcaccgatttttatcgcgaaaaatggctggtggcggtcgatggtagccaaattgaaatcgccctcgaccagggggaagtgaaagcgggtgaatttgctgaacctatctgtgagctggaactggaactgcttagcggcgacacgcgcgcggtgctgaaactggcgaaccaactggtatcgcaaaccggattacgccagggcagcctgagcaaagcggcgcgtggctatcatctggcgcagggcaatccggcgcgtgaaatcaaaccgaccaccattttgcatgttgcggcaaaagccgatgtggaacaggggctggaagcggcgctcgagctggcgttagcgcaatggcagtatcatgaagaactgtgggtacgcggcaacgatgcggcgaaagaacaggtgctgcagccattagcggccagccaggaggctggaccaacgcatatgtga

SEQ ID NO: 135695 - DNA, 728 bp, Homo sapiens; identical to SEQ ID NO: 131835

SEQ ID NO: 135696 - DNA, 2231 bp, Homo sapiens
atgatgaggacgagcggaggaacacgagataatgagtcgagcagtgacgatgagagagagagagagaaccgtctctcggatgagaaatcgaacgaatatgccaacctggtcggtggtgagcgttacgagccagatgaagagaacccgatgctcggcttccgtggcgcgggccgctatgtttccgacagcttcctgcgactgtgttcgtcgctggagatcgtgaaggcacgtgaaacagtggcgttgattcaggggctgaaacacgaatctgctggcggatgataccgcgctacgtgcactcatcccacaacgggctgatcgctttccgatgaacgcggtacgtagcacgttgaaagaggaggaaaaactggtcaactccagcgactggggctacggacgctcaggcctttgcccgctggcgaccggagtacggttattttgccaaacaggcggggtttaccgttaaaacgtccgccagccttgctgctttatggcaggtagtgaaccaaatcggcggtaaagagcgttatttctttggcaatattttgtggcagacacgggcgttgatggaccgcgcgatcggtcataagctggcgaaaggccgcccggagcgcgaatatttacagactggcgatgcggtggatagctggaaagtgattgtcgttgaaccggaaaaacaacttacgttgttatttggcatgaaagcgccggggctgggacgactgtgttttagcctggaagataaaggcgactatcgtactatcgatgtccgcgctttctggcatccgcacggcaaccgggctgaacgggaaaaaccaagattccagccttattctcgccggaagtcgtttatcggccagaacatgttgctcccaatgtccattatgccgcccgttttccgcagggtaatctgcccccttggcgtggcccggctcggcaagttccgggacccggtttacctcgtttgtgtcttcacccgtcagattttccgctactacacttcaggcgatgagtttctgcaaatcaataccaccggcggcgaagatattgatgacattgatgatatcaagctctttgtctatgaagagagctacggtatcagtaaagagagtcactggcgcgaggcgatcaacgccaaagcgatgggagcaatgaccttaaactggcaggaaaaacgctggcagcgattttttaacagcgaagaaccgggaaatatcgaacccgtctacatgctggaaaaagtagaaaatcaaaaccatgccaaatgggaggtccataattttaccatgggctaccaacggcaagtaaccgaagatacttacgaatatttgctgctaaatgtggtgggtgttccggttccggacaatattcacccgatgaccaaagacgaagcaggagtctggtcgtggcgcacacctatcctgaaaggcaacctgtacgagtattttttcaatgttgatggtgtacgcagcattgatacaggcaccgcaatgactaatcctcagcgccaggttaactccagtatgattctggtgccaggcagttatctggatacgcgttctgttgcgcatggtgatttgatcgccataacttaccactccaacgcattgcaatctgaacgtcagatgtatgtctggaccccgccaggatacaccggcatgggcgagcctttgccagtgctctatttctatcacggctttggtgataccggacgttccgctatcgatcaggggcgtatcccgcaaatcatggataacctgcttgctgaagggaaaattaaaccgatgctggtggtgatcccggatacagaaaccgatgcgaagggcattattcccgaagatttcgtgcctcaggaaagacgtaaagtcttttatccgctgaatgctaaagcggcagatcgcgaactgatgaacgatattatcccgctgattagcaagcgttttaatgtccgtaaagatgccgatggccgcgcgctggcagggctttcacaaggcgggtaccaggcgctggtttccggaatgaatcatctggaaagctttggctggctggccacattcagtggtgttaccacgacaaccgtaccggatgaaggtgtcgcggcccgactgaacgatccggcagctatcaaccagcaactacgtaattttactgtggttgtgggggataaagatgtcgtaaccggcaaggatatcgccgggctgaaaactgagcttgagcgagaaaaaaattaa

SEQ ID NO: 135697 - DNA, 5793 bp, Homo sapiens
atggatgcgtcaggacaccatgtgcgggggttcgcgtcggggatgggatgctgccgcgttaggcgaaccatgaagcgagaaacggggggtggacgcttggccggtttccgcctggtgggtacattgggtcagcatctgggtgcgcacaggtcagccagcaaggggcatcagatcctggcggcggcacgtcatgtcgacaggcttgcaaaggctgcaactggcaaagcgtcagttgccatgaagtcgatctcagctggccggataacctaccggccctgttgcaggatatcgatacggtctattttctggtgcacagcatgggcgaaggcggcgattttatcgctcaggaggcgccaggtggctctcaacgtccgcgatgcgctacgtgaagtaccagttaagcaattaatctttcttagttcgttgcaggccccgccacatgagcagtcggatcatctgcgtgctcgtcaggctacgcaaggaaattcggagtgaagggaatgtaccccgtgaccgaattgcgggccgaaattatcgttggcgcaggttcccgcggcgttaggaagtcatgctgcgatatggtctacaacctgccagtgttaacgcctccacgctgggttcgttcacgcaccacgcccattgctctggaaaactttctgcactatctggttgcgttgttagatcatccggccagcgaacaccgcatcttcgaagcgcgccggaccagaggtgttcagttatcagcaacagtttgaacattttatggcggtgagcggtaagcgcccgctggtttgatcccccatcccccctccccaccccgctggatttcggtgtggtttctcaatgtgattacttccgtaccgcccaccaccgccagggcgttgatatcaggggctgaaacacgatctgctggcggatgataccgcgctacgtgcactcatcccacaacggctgatcgctttcgatgacgcggtacgtagcacgttgaaagaggaggaaaaactggtcaactccagcgactggggctacgacgctcaggcctttgcccgctggcgaccggagtacggttattttgccaaacaggcggggtttaccgttaaaacgtccgccagccttgctgctttatggcaggtagtgaaccaaatcggcggtaaagagcgttatttctttggcaatattttgtggcagacacgggcgttgatggaccgcgcgatcggtcataagctggcgaaaggccgcccggagcgcgaatatttacagactggagatgcggtggatagctggaaaatgattgtcgttgaaccggaacaacaacgtacgttgattatttggcatgcaagcgccggggctgggacgactagctgttttagcctggaagataaaggcgactatctgtactatcgactgtccgcgctttctggcatccgcacggtatgccggggcatgattttaatggttattgatgatccccgcgcatctgtttatttttcgcggaatggcaaaacaaatcgccagactggcagtaccaagcacagatttaatcgactaatacctgcgttattctttcatgtttcccatggcatcaatgggggaaatcacggaagaatgcgcacgttattttctcaacaacagtggattgatatgaagccacaccttgcgctatcgcctgcgggatatatcgacgcccgtccgcctgatgacctactacagctacaaagagatcgcccgccgcagccacacggctgtcgagtgtcatctctcgcagtgctcgcgaagcgcatccggctcgatgttcatggtacgcaatacgccgcccatgatggcaccaaagaccggcgcggaaacggcgccgccgtagtatttacccgcctgcggatcgttgataacaacaaccagcgcgaagcgcggctgactcgcaggcgcaacgcctgcggtataagcaatatatttattgatgtagcgaccgtccggcccgacctttttcgcggtaccggttttaatggcgatacgatagcctttaatacactgacgtcgcgccctaatgatgagtacgctttccaccagctcaccgatgcaacttgcgctggtggattacctttccacgtcgccgatacgacgcccatcttcgtgcgcctgcgtcgccagcttgcggaacgtaaacaacgtgcctggcaggcactgctgcgttatctgcctgcggaagtgaaaattcatcataatgacagtggttactttctctggttggagctccccgagccgttagatgccggcgaattaagcctggcggcactgacgcatcatatcagtattgcgccgggtaaaatgttttctaccggtgaaaactggtcacgttttttccgttttaataccgcgtggcagtggggagagcgtgaagaacaggcggtaaaacaattaggcaaacttattcaagaacggctcgtcgggctgctggcggaactcagcggcctgcatcgcaccactgtgcggcgactgctggagacactgcaggaagagggatatgtccgccgtagcccctccgatgatagttttcgactgaccatcaaagtgcggcaattaagcgaaggatttcgtgacgaacagtggatttctgcactggcggccccactgctgggcgatctgttgcgcgaagtggtatggccaacagatgtgtccaagctggatgttgatacaaccctggtacgcgaaaccactcaccgtttcagccgcttatcctttcaccgggcaatggtcgggcgacgtttgccgcttctgaaaaccgcctcgggcctgacctggctggccttttgcccggaacaagaccgcaaggaattaatcgaaatgttagcctcccgccccggtgatgactatcaactggcacgggaaccgttaaagctggaagccattctggcgcgcgcgcgcaaagagggctacggacagaactaccgcggctgggatcaggaggagaaacacgcctctatacgccgtaccgtgcgcagtgaacaacgagtgattggctgtctgaatctggtgtatatggcgagcgcaatgaccattgaacaggcattggtggtcttacgaagacgaacgatgtacgccaatctatttccgcccgacccgtatcgctaccggtattcttgtggtatcccacagagtgaattccagcacgctaccattgctaagcgcgtgaaagaaacaccaaacgcaactgggccggtacatgctgtaattaccaactctacctatgatggtctgctgtacaacaccgacttcatcaagaaaacactggatgtgaaatccatccactttgactccgcgtgggtgccttacaccaacttctcaccgatttacgaaggtaaatgcggtatgagcggtggccgtgtagaagggaaagtgatttacgaaacccagtccactcacaaactgctggcggcgttctctcaggcttccatgatccacgttaaaggtgacgtaaacgaagaaacctttaacgaagcctacatgatgcacaccaccacttctccgcactacggtatcgtggcgtccactgaaaccgctgcggcgatgatgaaaggcaatgcaggtaagcgtctgatcaacggttctattgaacgtgcgatcaaattccgtaaagagatcaaacgtctgagaacggaatctgatggctggttctttgatgtatggcagccggatcatatcgatacgactgaatgctggccgctgcgttctgacagcacctggcacggcttcaaaaacatcgataacgagcacatgtatcttgacccgatcaaagtcaccctgctgactccggggatggaaaaagacggcaccatgagttttgatagttgttggtggttcggtgtttgtgattattattgtgatttagcccacgttggtggggagtttttatggtgtgatttggtcgttgagcgtatcacattgttggtggttggaaatgagttttcggcagcggtttcaggcgctggaaaatcggtcctggtagatggccgtagtccaaagcagaaaaacttggttgaaggcccaaaaggcgtttctccgccaggccattaccggcgacttcgactggaaagcaaaacattgaagccacccatgagcttcaccatcgctaaagggatggtcgcacaaccagcggggaaacattatccggcccccatcaccgcagtaaaaaccattgaagctgcggcccgttttggtcgtgaagaagacataaacctggaaaccacaccttttgtccgcgtggcgcataccaacgaagcccgcgcactggtcggcattttccttaacgatcaatatgtcaaaggcaaagcgaagaaactcaccaaagacgttgaaaccccgaaacaggccgcggtgctgggtgcaggcattatgggcggcggcatcgcttaccagtctgcgtggaaaggcgtgccggttgtcatgaaggatatcaacgacaagtcgttccgcatcggtttgaccgccgccccgaaactgctgaacaagcagcttgagcgcaacaagatcgatggtctgaaactggctggcgtgatctccacaatccacccaacgctcgactacgccggatttgaccgcgtggatattgtggtagaacaaatctactcagccaatcaaacacctttgtgtacacacaatttagtgcgtcaaccagctcaccttcaacacttcacactctcacgacagtgcgaacaactaaagtcgtttcacctggctcccctacccaagagcttttttttacaagtatttcgccccatttgggacaacgttcccagggagccccaaaacacgcttcttctttcacactctcttacccttgtaacgtggattaacacccacacatttcctatctacacggctacacagttacgtacgcgggatactttacagccagctgcattcccatcaacacaccgagtgcatggacgaccatgcgcccctgctgaatctctgcggctaccagcgcctgatgcagttccgctgaaagtggcgacacaagggaaagatgcgctgcaggagctggaaagatgccaaggccctgcctgtagcgaagcccatctcatggaaatgcgtcgggtatcttacagttatcgctatattcaggaagtggcttatatcgataaccacgttccccagtgttcgtctctggagcatgaaagtccgcccgataccttccccgagccaggtaaaatttcgaaagatggttatcgtgtctggttaacatcgcataacgatttaggcattatccgtttacatggccgccaatggaaacgggcacattatgtcgtcatgatctaccccgcttcctttattgatgtcattccctatagctcatggcaaattgatgccgccattattggcaatgcccataacgttgtcataaccagcagcgatgaaattgctcagggaattattaccaggctacaaaaaacacccggtgagcatatcgaaaataatggaatcatttacgatatcctgcccttaccggagatgaatatttcgatcatcacatgggcttcaacgaaaatgttgcagaaaggctggcatcggcaagtctttatttggttaccgctcgggttggtgattggcctgctggcagcgatgtttgtgctgcgtattttgcgccgtattcagtcaccgcatcatcggatcgctgacagcactgttatggaaggtgcgaataagcggggaaattcttctcggctgactcagtcatttcatttcttcatgtttgagccgattttttctcccgtaaatgccttgaatcagcctatttag

SEQ ID NO: 135698 - DNA, 499 bp, Homo sapiens; identical to SEQ ID NO: 128768
  misc_feature (1)...(499): n = a,t,c or g

SEQ ID NO: 135699 - DNA, 606 bp, Homo sapiens
ctccattctctttgccattttccttagggcttactgcatccctgtttatgaacacctggctagctatttctagtaattgtgatggattcatccctgcaagcccagcctgtttctgcagttttcttctcatgtcttctgcgctttgacggactaaagccatgtgaatcatgtgctgattttcagggctatcgggatcaaagggagtatacatacgataggcctcacacagtctctcgtagaattgtgctggactttcttcttttccctgaatgacctcagagagcttgttaacgtttgtggccttctgagctcccctcattaatccttccaagagagcttccctgtctcggtttagcctttgcatctcctctctttcatgtgggtccaactgggggtcggttcctggcaactgggtccttccatattcttgggggttttgataatcagctagtgcatgttcctctagccacttagttcctgcttggaggactctccgcctttcttcaccaaaaacacgcctctccaccacgtgaccatcctcgtctatcccagtataacgctgcactctcaggggcatttgtgtccccgttttgggtcgtaaacgag

SEQ ID NO: 135700 - DNA, 716 bp, Homo sapiens
tcacctgccttctggtcttaggctccggtagattacaaatgacctgctttctttctgatcccaggctgcactccccgacggatagtaaatcccaagtaacgtacctgctgttggcagatctgagctttttttcttggacaccttatacccacagtcctccaggtgccggagtagagcatctgttctcttggcgcacccgactgccgtggggtgtcccagcaaaaggtcatcaacgtactggagcaacacgcagcctaggtctctggtgggaaacttctggaggtctcgagccaatgcctccccgaagatggtgggggagttcttgaacccttggggaagccaggtccaagtgtactgagtagtgacacctgactccggatcttcccactgaaaggcaaacagcttctgcctctcaggggctaatctgatgctaaagaaagcgtctttcaggtccaagcaggtgaaccagctgtcctcagctggcagcaaccccagcaatatgtacgggttaggtactgttggatgtaaagtcactgtagcctgattaaccaagcgcaaatcctgtaccagcctgtagtccttggtcccaggagtacaagtccggggcaagcagaaagcttgttttgctgaaactcccatggctccgatgatgtcaatagtctttttggataagggggcgactgggccggttactaccgaatgttcagcaccggtat

SEQ ID NO: 135701 - DNA, 582 bp, Homo sapiens
aagctcagaggatccagaacggcagccggtcctcactgggctgttcctgtccacgtgcctggtcatggcgctggggaacctgctcatcatcctggccatcagccctgactcccacctccacacccccatgtacttcttcctctccaacctgtccttgcctgacatcagtttcacctccaccacagtccccaagatgactgtggacatccaatctcacagcagagtcatctcctatgcaggctgcctgactcagatgtctctctttgccatttttggaggcatggaagacagacatactcctgatcttttagatgcccagctgtacaatttgattgccttacaaatgacctgcttcaaggatgtggaaattcctaatttcttctgtgacccttctcaactcccccatcttgcatgttgtgacaccttcaacaataacataatcctgtatttccctgatgccatatttggttttcttcccatctcggggacacttttctcttacgataaaattgtttcctccattctgagggtttcatcatcaggtgggaagtataaagccttctccacctatgggtctcacct

SEQ ID NO: 135702 - DNA, 574 bp, Homo sapiens
ctcgtttacgacccaaaacggggacacaaatgcccctgagagagcagcggtatactgggatagataaggatggtcacttggtggagaggcgtgcttttggctaccagcccatcacctgcgtcaaccttctcaactggaaaaacaatacacagaactataccgaaaagccacaagccctaattgattttctccaagctgttatccagacccacaaccccaccttggctgattggcaccagttgctcatgttcctctttaacagcgaagaaaggcggagagtcctccaagcagtaactaagtggctagaagaacatgcaccagctgattatcaaaacccccaagagtatggaaggacccaggaatcagtagactgggaactatacgtggatgggagtagcttcttcaacccccaaggagagagaggtgcagggtatgcagtgataaccctggacactgttgatgaagacagatcattgccccaggccacgtcagcccagaaagctgaactcattgctttcattcgggccttagaactcagtgagggtgagactgtcaacatttacactgattctcg

SEQ ID NO: 135703 - DNA, 195 bp, Homo sapiens
ctctgtgtcttcttcgtcttggtgtcctttttccttagcccgttggattcccagctggcagttgtttgctgatttgatggaacaggcattggcatgtacctgacttcagctgtgtcaccaccccccaggaatggtgtggtggcgtcagtgatgtatgctgtggtcacccccatgctgaaccttttcatctgcagc

SEQ ID NO: 135704 - DNA, 457 bp, Homo sapiens
gggacaccagcgagcttccaccttgctgggtttgcggaattcccgcgctgactcagaggctcgaaaagcagcatcttcccccttctgggcatcagggctccctcaagcacctgatctgggacctacttcttctaacgaagaaaaggactttctccagcatgatatgaggcaaggtctagctgttctgcccggcataagagcttctggagcagccccctttgaaggtctccaagtggacttcacagagatgtcaaaatgtggaggtaacaagtatgtagtagttcttgggcatacctactctgggtgggaggaggcctatcaaacacgaacagagaaatctcgtgaagtaacccctgtgcttcttcgtgatctgattcctagatttcgacggcctttagggatcggctcagacaacgggcctgcgtttttggttgccttggtacagaagacggcaaag

SEQ ID NO: 135705 - DNA, 559 bp, Homo sapiens
ggggttcagcatgggggtgaccaccgtgtacatcactgaggccactgcacgctttctcggggaagatgacacatctgaaccgaggtaccctcagtcttttagactctcagctgcacaacttgattgccttacaaatgacctgcttcaaggatgtggaaattcctaatttcttctgggaaccttctgtgacaccttcacacaggaacatcaacatgtatttccctgctgccgtatttggttttcttcccatctcggggacccttttctcttactgtaaaattgtttcctccattctgagggtttcatcatcaggtgggaagtataaaccttcaccacctgtgggtctcacctgtcagttgtttgctgattttatggaacaggcgttggagggtacctcggttcagatgtgtcatcttccccgagaaagcgtgcagtggcctcagtgatgtacacggtggtcacccccatgctgaaccccttcatctacagcctgagaaacagggatatgaaaagtgtcctgcggcggccgcacagcagcgcagtctaatctcaatatctt

SEQ ID NO: 135706 - DNA, 1128 bp, Homo sapiens
atgctggagattattatccagcaggccacagtgccggtggttgtcgatgctggcatcggcgttcccagccatgccccgcaggcgctggaaatgggggccgacgcggtgttagtgaatacggcgattgccgtcgcggacgatcccgtcaacatggcgaaggcatttcgtctggcgcccgctgaccggatttctggaggcatcggcatgaaaaccttcagcgatcgctggcgacaactggactgggacgacatccgcctgcgtatcaacggcaaaacggctgctgacgtagagcgggcgctaaatgcctcgcaactcacccgcgacgacatgatggcgctgttatcgcctgccgccagtggctatctggaacaactgcgccaacgggcgcagctcggctattactggacgacgactagatcctcgctggacgtgacgtcgcctaccacgctaaaccgcgagcgtctggattttgagatgagtgaaggcgagctggtggatgcattccgccatgtgagtgatgcgtttgagcaaaccagcgaaaccatcggcgtgcgcgccaataacgcgatcaacgacatggtgcgtcaacgtctgctgaaccgctttaccagcgagcaggcggaagggaacgcaatttaccgtctgacgccgctcggcatcggcattactgactactacatccgtcagcgcgagttttctacgctgcgtctttctatgcagttgtcgattgtggcggaaattttcgacagtatcgacctgacgcaacgtctgatggacgaacagcagcagcaggtgaaggacgatatcgcccagttgctgaacaaagactggcgggcggcgatttccagctgtgaattggtgctttcgggaaattccggaacgctgctctccaagatgattgtggacatccagtctcacagcagagtcatctcctatgcgggctgcctgactcagagagacatcaatcgtttccgccgccagccgcgcattcagtgcagcgctttccagttccgctttacgcgcattcagcgcctgctgaacatgctctttcgcttcgttgataaccgcaccagctgccggacgctcttctggcggcagctcacgcagggtcgtcatctgaagggttaa

SEQ ID NO: 135707 - DNA, 1390 bp, Homo sapiens
tgccagaagtttttcctttaactcatgaaagacttgctgttgttgggatctgcattccaaaggttcgcggtccccgcccccttggtgaccgcatacaaagtcttggctaatactgcaaagtttgggatccacagtctacaaaaccccacagctcctaagaattctctcaactgtcttcagctcttaggatctgctagatggcaaatgacctgctttctttctgatcctgggctgcgtctcgagcccctgtcggatagtaaatcccaagtaacatacctgctgtcggcagatctgagctttttttcttggacaccttatacccacagtcctccaggtgccggagtagagcatctgttcccttggcgcacccgactgccgtggggtgtcccagcaaaaggtcatcaacgtactggagcaacacgcagcctaggtctctggtgggaaacttctggaggtctcgagccaacgcctccccaaagatggtgggggagttcttgaacctttggggaagctgggtccaagtgtattgagtagtgacacctgactctggatcttcccactgaaaggcaaacagcttctgtctctcaggggctaatctgatgctaaagaaagcatctttcaggtccaagcaggtgaaccagctgtcctcagctggcagcaaccccagcaatgtgtacaggttaggtactgttggatgtaaagtcactgtagcctgattaaccaagcgcaaatcctgtaccggcctgtagtccttggtcccaggcttgggaacaggcaggaggggagtgttccatggagactgacaaggaactataattctaaaggttcttaggcacttgagatggacctggataccttcaagagcttctctgaggaccgggtactgtttttgcctaaccggctggaccccaggcttaacttctataagcacgggggcttggttgactgccaaccctggagggttgtcttccgcccacactcttggccaccgcttagccagagctggtcttatctcttggcccggctctgttaagaaaagtctccattcctcctctcgggggagcataagggtcataatgactcctgttccgggtaactttagcagcaaagagccgtgctctgtaaaagagatagtggctctcagtttgctaagcaagtctcttcccaacaagggcaagggacaatcaggcatgtacaaaaactgatgaatcactttatgtcctcctatagtacaagtctggggcaagcagaaagcttgttttgctgaaactcccatggctccgatgatgtcaatagtctttttggataagggggcgactgaggcagttactaccgaatgttcagcactggtatctacaagaaaatcaatgtctttacccccaactgtcat

SEQ ID NO: 135708 - DNA, 857 bp, Homo sapiens
tggacacctaatacccacagtcctccaggctccagtagattgtaaatgacctgcttactttctgttcccgggctgcgttctgacacctgtcggatagtaaatcccaagtaaggtaccagccgtcggcagatttgagctttcttcttggacactataacccacagtcctccaggagggtcctaagtgttttagactcccagctgcacaacttgattgccttacaagtgacctgcttcaaggatgtggaaattcctaatttcttctgtgacccttctcaactcccccatcttgcatgttgtgacaccttcaccaataagataatcatgtatttccctgctgccatatttggttttcttcccatctcagggacccttttctcttactctagaattgtttcctccattctgagggtttcatcatcaggtgggaagtataaagccttctccacctgtgggtctcacctgtcagttgtttgctgagtttatggaacaggcgttggaggttacctcagttcagatgatgtgtcatcttccccgagaaaggctgcagtggcctcagtgatgtacacggtgatcacctccatgctgaaccccttcatctacagcctgagaaacagggatattaaaggtgtcctgcggcagccgcacggcagcaccgtccaatttcagtatcttcttatctgttccattccttttgtagtgtgggttaaaaaaggcagcaaggtcaaataagaatgatatcacagggtgaacacacaatgtgatattaggagtaatacctccctaggatatagaatatactgtcacagagtatacacagatggggtacacccactgtgatatagaagcaatatctcc

SEQ ID NO: 135709 - DNA, 1979 bp, Homo sapiens
atgggctcctgcatggcccgagcctccccaatgggcgccaccccctgctttgcggcggtgggtcccatcgactgccaggctgaggagtgccggcacacagtgtgggactggtgggtagctttgcctaccgccgctgtgggggatccaatagggcagcccatccagtatgctcgctccacctgcgaggccggcgtgggtgagctccacatccaggatgccctgccggaggaccatggcacctacacctgcctggctgagaatgccttggggcaggtgtcctgtagcgcccgggtcaccgtccgtgagggcacgtcccctggcccaaaggggaagactggccactgtgggctgggcagtgtcagtcccttagggatgaaggaactggcactgatggagaatgtggccgagcctggctccgtgaagctctctgccaggactgtccaggtccagccctctcttgcccttagtgtggcaccaggccatggtggggagcatggatgtggagccagcggcctgggtgttgatgaccttctgctgggacaccccacggcagtcgggtgtgccacgggaacggatgccccacaccggcacctggaggactgtgggtataaggtgtccaaaaaaaaagctcagatctgccaacagcagcatgatgcgaggcaaggtccagccgttccgcccggcatacaagcttatggagcagccccctttgaagatctccaggtagacttcagagagatgccaaagtgtggaggtaacaagtatgtactagttcttgggcgtacctactctgggtgggtggaggcctatccaacacgaactgagaaaactcgtgaagtaacccctgtccttcttcgagatctgattcgtagatttcgaccgcccttatggatcggctcagacaacgggcctgcatttttggctgccttggtacagaagacggcaaaggtattggggatcacacggaaactgcatgccgcctcccagcctcagagttccggaaaggtgtccaagtcacacagagccacggaatctcacaggagcctgagaactcctcctcctgggactctcagaggatccagaactgcagcccatcctcgctttgctctccctgtccctgtccatgtatctggtcacggtgctgaggaacctgctcagcatcctggctgtcagctctgactcccacctccacacccccatgtacttcttcctctccaacctgtgctgggctgacatcggttacacctcggccacggttcccaagatgattgtggacacgcagtcgcatggcagagtcatctctcatgctggctgcctgacacagatgtctttcttggtcctttttgcatgtatagaagacatgctcctgactgtgatggcctatgactgctttgtagccatctgttgccctctgcactacccagtcatcgtgaatcctcacctctgtgtcttcttcgttttggtgtcctttttccttagcctgttggattcccagctgcacaggatccttttgtcttactgtaaaattgttccctccattctaaggatttcaacatcagatgggaaatataaagccttctccacctgtggctctcacctggcacttgtttgcttattttatggagcaggcattggcgtgtacctgacttcagctgtgtcaccaccccccaggaatggtgtggtggtgtcagtgatgtacactgtggtcacccccatgctgaaccctttcatctacagcctgagaaacagggacattcaaagcaccctgcggaggctgctcagcagaacagtcgaatctcatgatctgttccatcctttttcttgtgtgggtatccactgtcaggtctctgagcttgatgctgtcatgtcccttgacaccgcttccggggcttttcggtggatggcttttggggtggaagtggcagccccagcttaccagccatcatgctcatgtccgggatctcagtcctctggggaag

SEQ ID NO: 135710 - DNA, 2901 bp, Homo sapiens
gggacaccagcaagcttccaccttggtgggcttggggaattcccgcgctgactcagaggctcgaaaagcagcatctgcccccttcggggcatcagtgctccctcaagcacctgatcttggacctacttcttctaaagaagaaaaggactttctccagatattaggaaaaaatgtccctggggatgtgaacagccctgcgatattgagagtagtatcatcctctccccttgcatactgggaaaaatatcacagattatatttggatcaatatcaccggctgtgtgtacacctactgcgatattgaacgtagtatcatgctctctccctccctggagattaggagcaatatcacagctcgtttacgacccaaaacggggacacaaatgcccctgagagtgcagcgttatactgggatagacgaggatggtcacgtggtggagaggcgtgtttttggctaccagcccttcacctccgtcgaccttctcaactggaaaagcaatacaccgccctataccgaaaagccacaagccctaattgatttgctccaaactgttatccagacccacaaccacacctgggctgattggcaccagttgctcatgttcctctttaacagcgaagaaaggcggagagtcctccaagcagcaactaagtggctggaggaacatgcaccagctgattaccaaaacccccaagagtatgttgatgaccttctgctgggacaccccacggcagtcgggtgcaccaagggaacagatgccctacaccggcacctggaggactgtgggtataaggtgtccaagaagaaagctcagatctgccgacagcagccttgggcatcagtagactgggaactatacgtggatgggaacagcttcttcaacccccaaggagagagaggtgcagggtgtgcagtggtaaccctggacactgttgttgaagccagatcgttgccccaggccactgcagcccagaaagctgaactcattgctttcattggggccttagaactcagtgaagatctgattcctagatttcgactgcccttacggatcggctcacataacgggcctgcgtttttggctgccatggtacagaagacggcaaaggaaatgactaacaaggtcacgggggagtgtactccccctgcaatactggcagtaatctcgtcctccccaaacctggatgtgagcgacaagatcacagagggggtgtacacaccctgcgacattggaagtaatatgatcctctccccacctggatattgggaaagatatcacagcgcggaggatccagaactgcagcccatcctcgctgggctgtccctgtccatgtatctggtcacggtgctgaggaacctcctcatcagcctggctgtcagctctgactcccacctccacaccccaatgtgcttcttcctctccaacctgtgctgggctgacatcggtttcacctcggccacggttcccaagatgattgtggacatgcggtcgcatagcggagtcatctcttatgcggactgcctgacacggatgtctttcttggtcctttttgcatgtgtagaagacatgctcctgactgtgatggcctatgactgttttgtagccatctgtcgccctctgcactacccagtcatcgtgaatcctcacctctgtgtcttcttagtttcggtgtccttttccttagcctgcattggcgtgtacctgacttcagctgtggcaccacccctcaggaatggtgtggtggcgtcagtgacgtatgctgtggtcacccccatgctgaaccctttcatctacagcctgagaaacagggacattcaaagcgccctgtggaggctgcgcagcagaacagtcaaatctcatgatctgttccatcctttttcttgtgtggtaagtactgagtattgtgagaggaacaagcaaaaggtgtccaatctctacagacccacagaatctaacaacagatgtctcaatattcctcgtcctagaactctcagaggatccagaacggccagctggtccttgctggactgttcctgtccatagtgactggtcatggtgatggggaacctgctcatcatctctggccgtcagccctgactcccacctccacacccacatgtacttcttcctcatccaacctgtcccttgcctgacatcggtttcacctccaccacggtccccaaagatgattgtggacatcccagtctcacagcagagtcatctcctatgcaggctgcctgactcagatgtctctctttgccatttttggaggcatggaagagagacatgctcctgagtgtgatggccctatgaccggtttgtagccatctgtcaccctctatatcattcagccatcatgaacctgtgttctgtgggcttcctagttctgctgtcttttttttttttttctcagtctttcagactcccagctgcacaacttgattgccttacaaatgacctgcttcaaggatgtggaaattcctaatttcttctgggaaccttctcaactctcccatcttgcatgttgtgacaccttcaccattaacataatcatgtatttccctactgccatatttggttttcttcccatctcggggacccttttctcttactataaaattgtttcctccattctgagggtttcatcatcaggtgggaagtataaagccttctccacctgtgggtctcacctgtcagttgtttgctgattttatggaagaggtgttggagggtacctcagttcagatgtgtcatcttcccccagaaagggtgcagtggctgcagtgatgtacacggtggtcacctccatgctcaacccctttatctacagactgggaaacagggatattaaaagtgtcttgcggcggccgacggagcactgtctaatctcaaaaaaaaa

SEQ ID NO: 135711 - DNA, 2853 bp, Homo sapiens
atggcagtggggacagcaaacagagcacaggttgtggtccttgtcatcaaggatcttccaattcagatggtttggtcacatgtcccccgaatccactgggacctgtccacggagcgggtcctcctgatggagtttgtggatggcgggcaggtcaatgacagagactacatggagaggaacaagatcgacgtcaatgaggattttggagatggaggtgcttttccagagatccatgtggcccagtatccactggatatgggacgaaagaaaaaaatgtcgaatgcgctggccattcaggtggattctgaaggaaaaattaaatatgatgcaattgctcgacaaggacagtcaaaagacaaggtgctcgttctggctgtgaagcagctgttcccagagtttgagtttatgtggcttgtggatgaagccaagaagaacctgcctttggagctggatttcctcaatgaagggaggaatgctgagaaggtgtcccagatgctcaggcattttgacttcttgaaggtcatttatagcaaatacactgacctggttccaaaggaggttatgaatgcagatgatccagacctgcaaaggcccgatgaagaagctattaaagagataacagaaaagacaagagtagccttagaaaaatctgtatcacagaaggtcgccgcagccatgccagttcgagcagctgacaaattggctcctgctcagtatatccggcccacagtcctcctggagcctgagtccagcacagcagaaggcctggagacatgcagtcagaccggcagatttggagtcaggctgctggctggagccccggctctgccacctaaaagctgtgtgactgtgggggatctttggcaatgtctggagacatttgtgattgtcatgacttgggagatgctactggcatctagtgggcagaggtcaagtgtgttgttggacatcttacaatgcacagaactggccttcacaacaaagaactgtccagttccaaatgtcaacagtatcactgtggagaaaccctggtcaatctatcaggtgacttactataaccgtagcaaattctgcggctctggctatgctcgagaaaattccataaaatgcatttcaaatatactttataaattaaacaaaatgagtaagaagatgcagagcgataaagtgctcaatttgccggcaggctactttggtattgtgttggggacgatagggatgggatttgcctggcgctatgccagccaggtttggcaggtcagccactggttaggggatgggctggtgattctggcgatgatcatctggggattattgactagcgcatttattgcccgactcatacgctttccgcatagcgtgctggcggaagttcgccatccagtgctgagcagttttgtgagtttgtttccggcaacgacgatgctggtggcgattggttttgttccgtggtttcgcccactggcggtgtgcctgttcagttttggtgtcgtggttcagttggcttatgccgcctggcaaactgcgggattatggcgcggatctcaccctgaagaagctaccacgcctggactgtatctgccgacagttgccaacaactttatcagcgcaatggcctgtggtgcgttgggctacaccgacgccggtctggtgtttttaggcgcaggcgttttctcatggctaagccttgaaccggtgatcttgcagcgtctgcgcagttcgggagaattacccacggcactgcggacatcactcggcattcagctcgctcctgcgctggtggcttgtagtgcctggctgagcgtcaacggcggcgagggtgacacgctggcgaaaatgcttttcggttatggactgctgcaactgatgtttatgctacgtctgatgccatggtatctctcgcagccatttaaagatccgaaagcacgcgttgcttgcgaaacctacgtaaaaaccggcatggttttagttggcggcgaaatcaccaccagcgcctgggtagacatcgaagagatcacccgtaacaccgttcgcgaaattggctatgtgcattccgacatgggctttgacgctaactcctgtgcggttctgagcgctatcggcaaacagtctcctgacatcaaccagggcgttgaccgtgccgatccgctggaacagggcgcgggtgaccagggtctgatgtttggctacgcaactaatgaaaccgacgtgctgatgccagcacctatcacctatgcacaccgtctggtacagcgtcaggctgaagtgcgtaaaaacggcactctgccgtggctgcgcccggacgcgaaaagccaggtgacttttcagtatgacgacggcaaaatcgttggtatcgatgctgtcgtgctttccactcagcactctgaagagatcgaccagaaatcgctgcaagaagcggtaatggaagagatcatcaagccaattctgcccgctgaatggctgacttctgccaccaaattcttcatcaacccgaccgatccatcaaaagtggaccgttccgcagcctacgcagcacgttatgtcgcgaaaaacatcgttgctgctggcctggccgatcgttgtgaaattcaggtttcctacgcaatcggcgtggctgaaccgacctccatcatggtagaaactttcggtactgagaaagtgccttctgaacaactgaccctgctggtacgtgagttcttcgacctgcgcccatacggtctgattcagatgctggatctgctgcacccgatctacaaagaaaccgcagcatacggtcactttggtcgtgaacatttcccgtgggaaaaaaccgacaaagcgcagctgctgcgcgatgctgccggtctgaagtaa

SEQ ID NO: 135712 - DNA, 2243 bp, Homo sapiens
  misc_feature (1)...(2243): n = a,t,c or g
aagaagatggcgctcaccagctttttacctgcacctactcagctatctcaggaccagctttgaggctgaagaaaaggcaagatcccagagatcacggcagccctcgctggtctcctcccgaagagaacctcccccgtacggatacccgaaaggcttggatacctcggttattagaggatttttgagatagaggtgcttttccagagatccatgtggcccagtatccacctggatatgggacgaaagaaaaaaatgtcgaatgcgctggccattcaggtggattctgaaggaaaaattaaatatgatgcaattgctcgacaaggacagtcaaaagacaaggtcatttatagcaaatacactgacctggttccaaaggaggttatgaatgcaagatgatcccagactggcaaaggccccgatgaagaagctattatagagataacagaaaaggccaagagtagcccttagaaaaatctgtatcacagaaggtcgcccgcagccatgccagttcgagcagcttgacaaattggccncctgctccagtatatcccgatacacaccatttcaggcaaaggagtggccattcaaacttcttggagctaaaccaggagggttattcgggatggtagaaatgcaggaaagatccaatgggagcctcccaaggttcaagattaataagaaaattccccgggggnccaccttctcctcctgcgcctgtcatgcattctcctagccgaaagatgactgtaaaggaacaacaagagtgggaagattcctccttgtatttcttaactgggaaaaatggcaaagggttattacaattccattaggacaaacgtctggctgctgatggggaggagggactacaggacagttacacattaaatggaaaattttcggccaaattggcagaagccctctacattgctgatcggaaggctcgtgaagctgtggaaatgcgtgcccaagtagagagaaaaatggctcagaaagaaaaggaaaaacatgaagagaaacttagagaaatggcccagaaagccagggaaagaagagctgggatcaaaactcatgtggaaaaagtgaagtacttttcaactgttcacacagaggatggggaggcacgtgagagggatgaaatccggcatgacaggcgaaaagagagacagcatgaccggaatctttccagggcagctcctgataagaggtcgaaacttcagagaaatgaaaatcgggatatcagtgaagttattgctctcggtgttcctaatcctcggacttccaatgaagttcagtatgaccaaaggctcttcaaccaatccaagggtatggacagtggatttgcaggtggagaagatgaaatttataatgtttatgatcaagactcttataggtggtaaatatatggcccagagtatttataggcccagtaaaaatcgtggacaaggacatgtatggtgatgaccgtagaagccagaataaagaccaacagatttgttcccgacaagggagtttttttggttcagacccgtagacagagaggccgagaaggaccaagttcagtttgaggaagatcctttttggtttggacaagttttttggaagaaagcccaacagccatgggtggctcttaaaagaccctcaggatagccagccgccccaagggaacacggagcatggaaggcaaggaagaggaggaaggaataaggcacaggtcttcttccaaagttgaattgaactctttaccccttaaccctaattgattgcaagtcatatggggggaacactttgtaaatgggtcagggataaaaacccaaatctgggtgcccagatccccagcactacttttttatttccttggaggaattgggggggggatagggaaattcttccttttgaattattttaggtttttttttaaagagtgggttgtgtttgtgcttctccccccctttcagcatttatagaacatgctgccccacatacaaagtcaaggcccccttacttttaatgtgacactagtagtttggggttaatgtttttgtgtaagaacagctgcatatgagtaaagttaccccaaccacagtgaggaggaagatgttcacatactggaactgtcctgccaaataaattttgccccctattgtgctctgttttaatttgggagtggcgcaaacgtaacctcttgcttggtgcaactatttgtttcaaataaaaacatttagacaaaaaaaaaaaaaaaaaaa

SEQ ID NO: 135713 - DNA, 1588 bp, Homo sapiens
atgcctaaggcgcgccctgcctggcagcatcgagtctgcgccgacggcgcccccgccgcctccgagtggcgaaggcagccaggcatacatctcccgccttcctgcaaccctgattgtgcttatcctagaaaggagacagctgttgggggtgtggaggcgagctcggtgctgctcccttatcaacctcgcgcaccggaggcattgtgggatgcctacccgggaatccccgtgcgccatcctcgcgcggcgatacgaaggccgacgatcgccttccacagttgcgcagcccccccccccacccccccccatcgagctcgccccctcaacgtcggaaaccccgatacaggccacacgcggtgcacaccctgcgcagccgtcctcaggccacccgcgcggcacggcccccggaacgcccaccggtccccgaacagggcccaagcggtacacacccagacccgacgccacgggcccgacaaacgcgccacaacgcccctcggcaccactcgaacacgactaactgacccactaggcatatgcaccaattgccggatgcggcgtaaacgccttatccggcctacggttcggactatttgtaggcacgataagacgcgacagcgtcgcatcaggcatcatgcaccaattgccggatgcggcgtaaacgccttatccggcctacgccaaaatcgagcgggcataagagaacccggtgccgtccgcaatcaaaatcatcggacgctcttcatcatcgggcaggcaagcttctccgtggggaatggcgacccgcattggaggtcttggagaatgggcccgaatggttccggaaagagaccacgtagagcagcagaaagaatttcgtgctgcagaaatgctcagggtaggactcacagtcaaaaggcgtatattcaacagcagccacaatgttgtgtcaatgttcacttgcaaccaccagatcaacacctgcacaacatcacaaacactgtcaccaccagattcacagcaccgccactaccagcatatccatccaccaacatccaacagcaccaccacccacatcatccccaatgtcgtcagcattgtgaagccccacccccaacactgtggagcaagacctggtcaaggcaaggaacgggacgaaacggaacggaaggacgcgaaggaacggaaccgaaggaccgccacaccgacgacacgtcatacggaccggctgccacgcacggcacacggaccgccgccgccccgccccccccccccccccccccccccccccccccccccccccccgcgacagcccacgccgaccacgacggagagagaagcccgaacagcagaaggagggagggcagacagggaggacacagcgcaaggagacggcgaggcgaggggaagagagggaaacaggaaggaagaagacgcgaggggcccccccaccgaggcccgccgcagcgagaaggccacacgagacggcggagacgaaaaggcggccgccagcgcgacagcaccggccgccgcgccgccgcccgagcgacggaacagagagaacaagacaccaactgggatttataatgctggggttattgagttggaatga

SEQ ID NO: 135714 - DNA, 608 bp, Homo sapiens
ccgcgtcgacatttgttcaactaactattgttggtggctgtaccccatgaccagtgggcctagtttctcctatgtttgaggaccttgagaggaggatgtgcgagagtagatgtgtgggagagatggattgtgatacctcagcataggggtggtttgtggtttcatctgtcaacatcataacagggcacagtgacttttgaagacgtggctgtgaaatttacccaggaggaatggaatctccttagtgaggctcagagatgcctgtaccgtgatgtgacgctggagaacctggcacttatgtcctccctggggaaagaaacagtagctccactcctgccggtccctcccctaggggagagggaagcagaggagaaaacagcagcataggtggctggcaaagacaaaggaaagaccaatagaagagaaagaaaccaaaaacagcaagcgcagagccaaacagccaggcaggtaggccaaaggttaagtccctctccccagccctgcggtttgtgaaaaagagggtgggcaccggctccgggaggagagcagaggaggtgaaaaggcgtaattcttgcaatttgcggcaggcatatctgccaagcctctag

SEQ ID NO: 135715 - DNA, 2484 bp, Homo sapiens
  misc_feature (1)...(2484): n = a,t,c or g
aggcccagggttggcaccctggctgtctgcctgtggatttcatttctgccttttagtttttacttgtttctttggaggcagaaattgggcataagacattatgaggggtggtctcctcccttaacagcacaaacgcttaattaacatttctttttcttttgagacaggttctgtcgcccaggctggagtgcagtggtgcagtcatagctcagtgcagcctggaccacctgggctcaagcagtcctgacacctcagcctctcaaaatttgggattacaggcgcgcgccaccgtgcgggtcaggaggcttccctgagggccccggaggtggagctgggcttttccttccgaagcgcccctgggaatctctctctttacggccttggaacctgggaaactacattacccagaaagctctgcgtcaaatgacagcacggcagagccagtgagagttcacattgaaggcgtttccgtgtgcgcaagtaaggtagaggcgggactcccggcgccctttagtagcgaccatttccattggcgttagggagtccttggagcgctgtgttgggaccgtggtggtgactggatccaggaggtcgagagtcgttcttctctttgcacagacgtgactctgcagctctttaacggcgcccgctgctctcaacccagcttaccccacgtggtcccatggcggcggccgcgctaaggttccccgttcagggcacagtgacttttgaagacgtggctgtgaaatttacccagggaggaatggaatctccttagttgaggctcagagatgcctgttaccgtgatgttgacgctgggagaacctgggcactttatgtcctccctggggttgttggtgtggagtggaagatgaggcggcaccttctaagcagagtatttatatacaaagagagactcaggtcaggactcctatggcaggtgtgtctcccaagaaggcccacccctgtgagatgtgtggcccgatcttgggagacattttgcatgtggcagatcatcagggaacacatcacaagcagaaactgcacaggtgtgaggcctgggttaatatattgtatgacagtggcaactttcatcggcgccagaatgagcacattggagagaaaccctacagagggagtgttgaggaggcgttgtttgcgaacaggtgtaagttgcatgtgtcaggggagtcatctgtcttcagtgagagtgggaaagactttttgctcaggtcaggattactccagcaagaggccactcacactgggaagtcaaacagcaaaactgagtgtgtgtctctgtttcatgggggaaaaagccattacagctgtggaggatgcatgaaacattttagcaccaaagatatactcagtcagcacgagagactgctccctacagaagaacattttgtgtggtgtgaatgtgggaaatcctctagcaaatatgacagcttcagtaatcatcaaggagttcacactagagaaaaaccttatacgtgtgggatatgtgggaaattatttagcagtaagtcccacctccttgtacaccagagaattcacactggagagaagccatatgagtgtgaggtttgtcagaaattttttaggcacaagtaccacctcattgcacaccagagagttcacactggagaaaggccatatgaatgcagtgattgtgggaagtcatttacccacagctctacattccgtgttcataagagagttcacactggtcagaagccttatgagtgcagtgaatgtgggaaatcttttgccgaaagctccagtctcactaaacacaggagagttcacactggagaaaagccttacgggtgcagtgaatgtgaaaaaaaatttaggcaaatctcttcacttcgtcatcatcagagagttcacaaaagaaagggcttatgagtgcagtgagtccagtctcattaaatattggagaatacacacctgagtaagatcctgtgattgcagcaaatgtggaaaatgtttacccaaaggtctgctctccttggatattggagagttcacactagagaagagtccttacaagtaaaataaatttgggcagttttgtagccacacctctgtattccttcaggattatagttaacactgaatgaaggccttactagtgtgacaaatacaggatatttatccagaagtctggctgcataactcacaggagagctgttcatgttgggaggatttctacatggggaggatttgcttgagcccctgggaggcagaaggttgcagtgagccgagattgcaacactgccagtcccagtctgggcccacagagtgaggaccctgtttcaaaaataaaatatataaatgacatccaataaagtatgcatatttgagctgcaggataagtcttgaattttctttttcttttttttgagacagcctcgctctgtcacccaggctggantacagtggcataatctcggctcactgcaagccctgcctcct

SEQ ID NO: 135716 - DNA, 1974 bp, Homo sapiens
tcagcgcaatgttacgttcatattgtaggatcggttccctagctgcagcgacgtcaatgcgaggcgtacagccgccagcatgaaagatgacgtcaacgcagccagtaaaattttcattgtttgcctcacactctgttccttgcggacagtcatttcccggcagacgtgcgtttgctccagccatgccgcgcagacgaataccgtccagcgaccatttacccgaaccgggccaatctcaccagcatgtaaatcgccagagatgggcttgtcgagaattaatcgcggcttttctaccgtcatcgtaccgattgtaactggtcgaaaccggtggagagatcggtcagcgtaatcgtgcttcatgccactcaccttttcctgccggcagctccccaggaatctttcagactgagatcggaaagccctgcctcttgccatgatcgttaaatccattatcaaagaaggtggtgtagttaatactgccccaacgtaaggacggaatttgctgctggcatcaccaaaataccacgcgccatcagtgttggtggcagatgatgaacggttgcaatatcgccggtgcccgggtgccgattttatggcggaacggcgtcgctgccagtaattccaaccaatgttgtcggtcgccatataagtaaacgtaaggcccagttgcgtgtattggtcacgctgaatccacccagacttcctaacgtaccaccagcacctctgttggacgtacggttgcagaacctgcacgcataaaaaattcgcctgttcatgcgcaaaggcacagcgtttcaacgtggcttgccggacgcgcatgtacgccgttaggtagccacaaataaattccacaatcagggccattgcctctctcccggtacggtttccgtcagcatttaatgacgggcgtttcacactgattcccttcgtggtatcgggcggtattttgctggcggtttccgtcatttgtatggcaaaggcgcagtgccggatgccgtagccgatccaaatctgaaaaactgtttgatatcggcgttgcgggcttgacgctgattgtgcctttcgcgtatcgcgattatcgtcgtcacggtgcgtggctttcagcgcgacgctcggctgtttctggatgatcctggcctggattttattccgctggagcacccgcgtcagccgtttaacccgctggcgcagtttatcttccgatgctgctgtggggggtagcgctgatcgtacggcggatgccggggcgctctcggcgctaatgttgattgtgctgtcgctgaccgtttcttgcccgttatgatatgcgaaagcaggcacatcaacaatgcgctgaaatatgccaaaggcgagttcgtgtcgattttcactgcgaccacgtaccaacgcgatcgttcttgcaaatgaccatgggctgttccggacccgtttgaacgcaacctggggcgtttccgtaaaacgccgacgaaggcacgctgttctatggtctggtgcaggatggcaacgatatgtggacgccactttcttctgcggttcctgtgcggtgattcgtcgtaagccgcggatgaaattggcggcattgctgtcgaaaccgtgactgaagatgcgcatcttctctgcggttgcaccgtcgtggctatacctccgcgtatatgcgtatccgcaggcggcggggctggcgaccgaaagtcttctgtccggtttcaccagaatcttgcgcaagtgcatataacgcgtggtgtagctggaccatgacgaatagccacataataacctgctgcgccactgcgtttggcaccaccacttcaccgtcacccactgaaagcactggcgtaccctgcggcaggcgaaatcaacacctcttctgaacgcaaagtacgcccagcagctggctttgctcacgtttaccatcaagcatttctcggacattaacaccgcaaattcatcgccttttttcagtttgcggaaatccat

SEQ ID NO: 135717 - DNA, 1086 bp, Homo sapiens
cccttaccggtgagcgggttatcgagacggaagatttgtaccatcccgcgcgccagcgaatacgctgaccgatatgcgccgacagactttcggtcgccagcccgccgcctgcggaatacgcatatacgcggaggtatagccacgacggtgcaccgcagagaagtatgcgcatcttcagtcacggtttcgacagcaatgccccaatttcatccagcggcttacgacgaatcaccgcacaggaaccgcagagaaagtggcgtcccacatatcgttgccatcctgcaccagaccatagaacgcgtgccttcgttcggcgttttacggaaacgccccaggttgcgttcaaagggtccggtgagaagaagtggtgcggcgtctgcatcatcgccagctgttttctttcaggaaccagcccatggtcatttgcaagaacgatcgcgtggtagtggtcgcagtcgaaaatcgacacgaactcgcctttggcatatttcagccattgttgatggttgcctgctttcgcatgttcatgagtggtgcgggcgaatatttcacccccacgttttgcgcaaactggcgaaactcttccctgccgcgtcatcaaggatccagatattcagcttatctttcggccagtcgataccagcgaggccgggacaaagatatccaccgacggccacagcgacatatctttcggcaatgcaccggctgacgattcagcggcgcattattcagatcaactcgaaatccgcaaagtgggcagcaaacgcaactctggctacagcgcagcgaaatttggggcgtcgggctgactcaatcactggcgctggatctggcggagtacggcatacggtgcattcactgatgctcggtaacctgctgaaatcgccgatgttcagtcactgttgccacaatacgcgaccaagctgggtatcaaaccggatcagtcgagcagtattacatcgacaaagtaccgctcaaacgcggctgcgatttcaagatgtgctgaatatgctgctgttctacgccagtcctaaggcgtcgactgcaccggacagtcgtggtgtcggctccagtcccccaaattag

SEQ ID NO: 135718 - DNA, 1743 bp, Homo sapiens
ctacttacgggcaacgtccccgtacgtgccacgaccggctccacacgcacccgatgcccacccacgctgcgcacgcgctggaccccgcaccccgcgatagcgacccgacaacccgtcgtaaccgcgcccgagtactctgaggttccgcaaactcacgatggtgtcgataaatacttccagcaactgcggcatcgcttcaccgtggatcaactgacccgcgtcaaagtcgatccagtgttttttcttcgccgccagttcactgtaggtggcgattttcaccgtcggcacaaatccaccatacggcgtgccacgaccagtactgaacagcaccatatggcagcccgcacccgccagggcgctggtcgctacggcatcgttacccggcgcacttaacaagttcagccctggcgttttcagacgctcgccgtaacgcagcacgtcaaccacgacgctggaacccgctctcatggtgaccagtttttcaaacgttgcttcgtcgcggcaatggtccatcagcaactgctctgcgccaaacatctccggcacttcggtcagtacggtagtaccgccgttagcaatcacgtagtcagagaaacgccccagcatcgggttagcagtaataccagaaagaccgtcagaaccaccgcagttatacagctgatgcaaatgctcgattccggcttcgatctcatcatcctgctgttggcagatcatgaaatgaacgcgttcaggatcgatatcgcccagcgtttcacggaatgcggcaacctggttgttttcacagcccagaccaatcaccagcactgcgcctgcgttcgggtggcgcaccatgttttgcagcatggtgcgggtattaatgtgatcgtcgcccagctgtgagcagccgtaggtgtggctgaagaggaacacgccgtcagtaccttcggcgttgttggtctctttcagcaaacggttctggatctgccgcgcgatgccgttgacacagcccacggttggcaggatccacagctcattacgcaccccgacatcgccgttagggatcctcatcccgcgcgcccagcgaatacgctgaccgatatgcgccgacagactttcggtcgccagccccgccgcctgcggaatacgcatatacgcggaggtatagccacgacggtgcaaccgcagagaagtatgcgcatcttcagtcacggtttcgacagcaatgccgccaatttcatccagcggcttacgacgaatcaccgcacaggaaccgcagaagaaagtggcgtcccacatatcgttgccatcctgcaccagaccatagaacagcgtgccttcgttcggcgttttacggaaacgccccaggttgcgttcaaacgggtccggtgagaagaagtggtgcggcgtctgcatcatcgccagctgtttttctttcaggaaccagcccatggtcatttgcaagaacgatcgcgttggtacgtggtcgcagtcgaaaatcgacacgaactcgcctttggcatatttcagcgcattgttgatgttgcctgctttcgcatgttcatgagtggtgcgggcgatatatttcacccccacgttttgcgcaaactggcgaaactcttccctgccgccgtcatcaaggatccagatattcagcttatctttcggccagtcgatacccagcgaggcgtaaatggtatttttcaccacgttgagatcttcgttgtaagtcgggacaaagatatccaccgacgggcacagcgacat

SEQ ID NO: 135719 - DNA, 2196 bp, Homo sapiens
tcagcggaatgcctgtctgcaatcgcttcgcccattgcagcggatatgttcgcgtaagtagctgatgcgatagtcgtcgttaatctcgccattggcagcaaattcatcttttgcgcccaggccgttttccaccagaaacagcggcttctgataacgatcgtacatcatattcatggtgatacgcagaccgagtggatcaattccccagccccagtcgctcacctgtagatacggattacgcagcgatttcaccacgttcgccgcactgctgttgttggcgttcatctccgccgaggcgcagcgcgaggcgtaatagctgaaagagacaaaatcgacggtgtttttcaggatttcatcatcgcccggtgctttgttgatggttacccctttttcgcggaatacgcgggcagagtaagccggatacgtgccccgcgcctgcacatcgataaaaaacaggttttcccggtctttctccagcgccgcccagacatcttccggcttgcaactgtaagggtagaagttaccgcccgccagcatacagcccacctgattttgcgggttaacctcatgggcgattttggtggctagcgcactggcaaccagctgccaggatgtcggtttgccactcatttttgagaaggtgatcgcgaagttgtagccgcgaacggtgcagctcaaacgatcgtcttccagcgtcagcggacgcgcattatttggtgcgaaaggcactggctgcgcggtgttttcctgcaaccgtacaagtgccgccagcttcgcttcccaacgcagcaacatgcggtgattttgcccctccaggggcttgagtaataattttgccagccccatcagcgccccggtattaccggcactgacacaggcttgcgctcgaccttctttcaccagctccaggccacgcgcattgaactcccacgactggcgcagaccatagaacagcgtgccttcgttcggcgttttacggaaacgccccaggttgcgttcaaacgggtccggtgagaagaagtggtgcggcgtctgcatcatcgccagctgtttttctttcaggaaccagcccatggtcatttgcaagaacgatcgcgtaggtacgtggtcgcagtcgaaaatcgacacgaactcgcctttggcatatttcagcgcattgttgatgttgcctgctttcgcatgttcatgagtggtgcgggcgatatatttcacccccacgttttgcgcaaactggcgaaactcttccctgccgccgtcatcaaggatccagatattcagcttatctttcggccagtcgatacccagcgaggcgtaaatggtatttttcaccacgttgagatcttcgttgtaagtcgggacaaagatatccaccgacggccacagcgacatatctttcggcaatggcaccggctgacgattcagcggccatactacctggaagtagccgagcaccagcacaatccacgcgtacgtttcagcgaagagcagaataagcccgcacaccaggctgaccggatcgtcccagttcagcgtagaggtgtaacgccaccagatataacggcaagaaacggtcagcgacagcacaatcaacattagcgccgagaagcgccccggcatccgccgtacgatcagcgctaccccccacagcagcatcaggaagataaactgcgccagcgggttaaacggctgagtaacgcagattaacgccagaatcagcgagaaggtgacgatgataccgaggatcaaccgccgcgccccggcactcaaatgaccgagctcttttttctcatccagatgctgtgttttatggctaacgcgctcaggcagctcgttcatccattgatggtaacgtccacgaatattttgcagacctgaaaatgcccgcctgcgcggtttcggcgtttctttgcgcgatgcaccgatcaataaccagcatgtttgaatgagataacggaccgggtccagcggacgcggacgcgaggcgttgatatgcggatacaggtttttatgttctgcgcgaatacgctgccagcgcgggtgctccagcggaataaaaatccaggccaggatcatccagaaacagccgagcgtcgcgctgaaagccaacgcatcattgaaaaaggtctgaagtgtatccagggcaaaggcattgttaactctatctcgatgaaagagggcgtcgatgcctttatccat

SEQ ID NO: 135720 - DNA, 1147 bp, Homo sapiens
atggactggttggttttttatttgaaaaaggggcgactgtgccctgaaccgacgactgattccgaaacgtatccgtttatcaatgagggcaacagcgatgcgcgggtgatccctgtcggcccgctgcatatcacctccgatgaaccgggtcacttccgcttgtttgtggatggcgagcaaattgtcgatgctgattaccgcctgttttatgtccatcgcggcatggagaaactggcagaaacgcggatgggctacaacgaagtgaccttcttatcggaccgcgtgtgtgggatttgcggttttgcccacagtgtggcctataccaattcggttgaaaatgcactggggattgaggtgccgcaacgagcacatactattcgctcgattctgctggaagtcgaacggctacacagtcatttgcttaaccttggcctctcctgccatttcgttggttttgataccggctttatgcaatttttccgcgtgcgggaaaagtcgatgacgatggcggaattgctgatcgggtcgcgtaaaacctacggtctgaatctgattggtggtgttcgccgcgatattctcaaagagcaacgtctgcaaacgctgaaactggtgcgcgagatgcgcgccgacgtgtcggagctggtagagatgctgcttgctacgccgaatattggaaacaacgcactccaggggcaattgggcatttctccgaacccggaacaagaattccggccccggtggaatatttggcggcctttggaattcaaccccttaagcccgaatacgggcaatatttccaaagaaacatggtttaaccttttaccggccgggcgaagtgttttccttcccgggttgaatggctccggtgttcaagagaagaacgcttgtgaatttcgccgtggggcaagtgccgtgggcacatttctgtgggccccccttttcgagaaacaaaacccatttgtgcccgggcagcctggggttgttgatgaccttaatgggattgttgatcgtgctgtgctggctgccgctggcgacgcggatgtcgcatcaggggcagcccgtttaagcgcacgtcaccgcagcatcgtcatcagctccatgggagaacgatgctgctttatcagatcacgcatcacccgcatatgcg

SEQ ID NO: 135721 - DNA, 557 bp, Homo sapiens
atgcgaaagcaggcacatcaacaatgcgctgaaatatgccaaaggcgagttcgtgtcgattttcactgcgaccacgtaccaacgcgatcgttcttgcaaatgaccatgggctgttccggacccgtttgaacgcaacctggggcgtttccgtaaaacgccgacgaaggcacgctgttctatggtctggtgcaggatggcaacgatatgtggacgccactttcttctgcggttcctgtgcggtgattcgtcgtaagccgcggatgaaattggcggcattgctgtcgaaaccgtgactgaagatgcgcatcttctctgcggttgcaccgtcgtggctatacctccgcgtatatgcgtatccgcaggcggcggggctggcgaccgaaagtcttctgtccggtttcaccagaatcttgcgcaagtgcatataacgcgtggtgtagctggaccatgacgaatagccacataataacctgctgcgccactgcgtttggcaccaccacttcaccgtcacccactgaaagcactggcgtaccctgcggcaggcgaaatcaacacct

SEQ ID NO: 135722 - DNA, 1650 bp, Homo sapiens
ttactgacggtggacattcagtccggcatagctttgggtaaccggcatcatttccagggtattgatattgacgtgagcaggcagcgttgacacccaccagacggcttcgctgacatcttctggcgtcaatgcaacggtattttgataggttttttctgctttaccgtcatcgcctttaaagcggacattggaaaactcggtaccacccaccagacccggttcgatgtcggtgacgcgcaccgccgtaccatgcagatccgtacgcagattcaggctaaactgacgaacaaacgctttcgtcgcaccgtaaacgttaccaccggcatacggccagctacctctcccgttgcgattggcggcggtgattggtttccagttgccgtataacgcccagcgcagcgtgattgcgcacgccagcaccgtttcgtagatttcactccagaaagagtggcgatatttgccctggatcttggagttggtcaggctggcatggatcatatgcggcagcacgaatagggcgatcatcaacgctggcgcatagatgatgtaggcatgaagcagcaggaacgccagcggcgcagtcaggaagatcagccgtggaatgcccgacaagaagtggaacatggcgttgacgtaacatagccgctgagcaaacttcagccctttaccggtgagcgggttatcgagacggaagatttgtaccatcccgcgcgcccagcgaatacgctgaccgatatgcgccgacagactttcggtcgccagccccgccgcctgcggaatacgcatatacgcggaggtatagccacgacggtgcaaccgcagagaagtatgcgcatcttcagtcacggtttcgacagcaatgccgccaatttcatccagcggcttacgacgaatcaccgcacaggaaccgcagaagaaagtggcgtcccacatatcgttgccatcctgcaccagaccatagaacagcgtgccttcgttcggcgttttacggaaacgccccaggttgcgttcaaacggagagatcgtggtaacgctattcgccagcttgccgctgctaacattttccctggcgacatgctgtttaaaaacttcggtgtcacccgtcacgggcgtgtggttttttatgattacgatgaaatttgctacatgacggaagtgaatttccgcgacatcccgccgccgcgctatccggaagacgaacttgccagcgaaccgtggtacagcgtctcgccgggcgatgttttcccggaagagtttcgccactggggtatggggagatgcttttttgagtaaagcttccatataatttttctccgcaatgtatcgagggttatccgtaaagccaaagctttcagccatcttatttaatgtattaaggattaattcagcaataacccggtgaccaaattcaaaagccaactcaaaggcagatatttttgtggggggggacttcatagagtggtcctgcaggcggtgtatgtttgccgccaatgtccgcgcaggcgagtaaggcgttacgccgcatccggcatcaaatgactcacgttgtcccgcttctggtttgcgcgatttttgcccagtaaaaatgttcgcgcaaaccttccgccgactcttccgccacagcccgcaattcatcgctgtccgcttcat

SEQ ID NO: 135723 - DNA, 931 bp, Homo sapiens
ttacttcagcggcgaacggttacgatcaatgccgtagcgttcgatctctttatacggcacggtttttgactggcgcttgcgcacatctaccagcgtcacacggtcggtacaggagtagcagggatcaaggctaccgataatcagcggtgcgtcagaaacggtattgccgcgcagcatgtaacgcaacaccggccagttggcgtaagtggcggcacggcagcgccagcggaacaatttttggttatcaccgagcatgctccagtgcacgtcttcaccgcgtggcgcttcaacaaagcccagcgcgaatgcgtgaggtttatagctaaagccttcggtcagcagtggggtatccggcatgttgtcgagggcaaattccagcattgccagcgaatcaaacgtctctttgacacggaccatcacgcgtgagaaaacatcggcggcggtaaaggtaaacagtgttttttggaatattgtcgtattcggcgtatgggtgatcaaagcgcaaatcacgggcgatttgtgggtcgagaatgccaatgccctgagtgcgttgttccatattcggcggtagcaagcaagaatttctaccagcttcttccgagaatcgctgccaagccgacatccggttccccgatatcggccgcttgaagcgttctggacgccatgcacccgaggctattaccgtttttttttttcgccggcaagggagaatgcggaataccgcaccctgataacactgggcaaaatttttgctagtgcgtgctagctttccgggcgccagcacgctatgctgtaaatcaccggggcgcacaatcagcgtctgataagtcggcacgggtgcgttacgaattctccataacgtcatcagtccggcgatgactatcaccagcgcagtaacgtaacgcttcttcacggttttccgctttttcat

SEQ ID NO: 135724 - DNA, 1719 bp, Homo sapiens
  misc_feature (1)...(1719): n = a,t,c or g
atgaaaattatttcagcagaaataccagtgcctaaagaagatgaagttttgattaaagtagaatatgtcggtatttgtggttcagatgtacatggttttgaatcaggcccgtttattccgcctaaagacccaaatcaagaaatcggcctgggtcatgaatgcgccgggacggttgtggctgtgggaagccgcgtgcgcaaatttaaaccgggggatcgggaccacaatgaaagggcctctgttgagaccctcccacatccggaatcacatcccgcgatgctgccagatgttaaaccggttaagaagataattattctgggagcagcttgtattgctttgatgacgttgcaagcgtgcaaatgcctgggagcaacggaaattgccgtcgttgatgtgctggaaaaacgtctggcaatggcggaacagcttggtgcgacagtggttattaacggcgcaaaagaagacactattgcacgctgtcagcaatttaccgaagacatgggcgcagatattgttttcgaaacagcgggttctgcggtcaccgttaaacaggcaccttatctggtaatgcgcggcggtaaaattatgattgttggtactgtacccggcgattcggcaatcaatttcctcaaaatcaatcgcgaagtcactatccagacggtacttccgctatgccaatcggcgattcgatgtgaaatcgatggtgacgcatatttacgattatcggaatgtatatcggaactgcactctaatctgatggtgcaatcgttgtttgccgactttgcgaaaatcttcccgggtcgtttcaccaacgtcaccaacggtgtgacgccgcgtcgctggctggcggtagcgaacccatcgctttcagccgtgctggacgaacacctgggccgtaactggcgcaccgaccttagcctgcttaatgagctgcaacaacactgtgatttcccaatggttaatcacgctgtgcatcaggcgaagctggagaacaaaaagcgtctggcagagtatatcgcccagcagctgaatgtggtggtgaatccaaaggcgttgttcgatgtacaaatcaaacgtattcacgaatacaaacgtcaattgatgaatgtgttgcatgtgattacccgctataaccgcatcaaggccgacccggatgcgaagtgggtaccgcgcgtgaatatttttggcggtaaggcggcttcggcctattacatggcgaagcacattattcatttgatcaatgacgtagcgaaagtgatcaacaacgatccgcagattggcgataagctgaaagtcgtgttcatcccgaactacaccgtgtactttgtggctcacaacaancgncagccaggccatacgcacacgacgaccgttggattcatcaatgatcgacgcccgtcccagcagatcggtatcgttcggatactgttcctgcaaggttttcaggaaatagtcgttgatttcaaagatgatctgcaggtgacgcggcagaattttacccagcatatcaaccggccaggtttccagcgcctcgctcatcagcgtgtggttagtgtnaggagaagacctgacaacacacctcaaacggtaccgaggcgtcggcaattagaagagcgactggtactgcaactgcgaatgatttcgaaaggggcttattactggtatcgccgtgaacaagagaaaaccgcaattattccgggaaatgtgaaggacgagtaa

SEQ ID NO: 135725 - DNA, 1323 bp, Homo sapiens
atgggcgcctgtgtgcgcagacggggcaggagcggacagaactacggatattcacggcgtagtcactgggagaactctttctatccctactgggtctctgtcgagcatattggcgaggtggtccttgagaaaatctcgttcctagctgtgccgcaggcgtgtgctgtggcctctagacaccgtaaaattaccgggcgtaactctgaaaaagacgttcgccatatcgaaattgacttaggtgactcgggcatgcgttaccagccgggtgacgcgctgggcgtctggtatcagaacgatccggcactggtgaaagaacttgtcgaactgctgtggctgaaaggcgatgaacctgtcaccgtcgagggcaaaacgttgcctctgaacgaagcgctacagtggcacttcgaactgaccgtcaacaccgccaacattgttgagaattacgccacgcttacccgcagtgaaacactgctgccgctggtgggcgataaagcgaagttacagcattacgccgcgacgacgccgattgttgacatggtgcgtttctccccggcacagcttgatgccgaagcgctaattaatctgctgcgcccgctgacgccgcgtctgtattccatcgcctcctcgcaggcggaagtcgagaacgaagtacacgtcaccgttggtgtggtgcgttacgacgtggaagggcgcgcccgtgccggtggtgcctccagcttcctcgctgaccgcgtggaagaagagggcgaagtccgcgtatttatcgaacataacgataacttccgcctgtcagccaatccagaagacccggtgattatgattgggcccagcaccgggtttttggccgagagagactctatttaccaaaacaactggacagtttcgacagtgccggaccagcatactgtagcttctcaggatgaatttgaaaacctggttcgtaatgtcgacgtaaaatcgcgaattatggatcagtatgctgactggaaaggcgtacgttatcgtctgggcggcagcactaaaaaaggtatcgattgttctggtttcgtacagcgtacattccgtgagcaatttggcttagaacttccgcgttcgacttacgaacagcaggaaatgggtaaatctgtttcccgcagtaatttgcgtacgggtgatttagttctgttccgtgccggttcaacgggacgccatgtcggtatttatatcggcaacaatcagtttgtccatgcttccaccagcagtggtgttattatttccagcatgaatgaaccgtactggaagaagcgttacaacgaagcacgccgggttctcagccgcagctaa

SEQ ID NO: 135726 - DNA, 6813 bp, Homo sapiens
  misc_feature (1)...(6813): n = a,t,c or g
ttaattgccagccatcgccgccgcagtcagggtctggtgctgatcgtgtttatcctccagcatttccaccgaaagcaccgttcgccgcagccagataaatcgataacgcgccgccagatcaaacaaccgttcacgcatttgcagcaaatagtgagaaccacagcccgccacaattgccgtatgaaacgcctgatgacgcagatcccactcatcaagcattttctcgctggcgtcacaggcctcaagcttactcagcagatgcgcttttgcgagaacgtctgcctcccactcatcgccaccgcgggcaatcgccagactcactaacatcgcttccatattggcgcgggcgtcgaaaatatcgagcagctcctgctctgacatagacgccacccgataccctttttgattcaccaccgtgaccagccgttccgccaccagttgcgaaagagcttcccgtaacggcccaacgccaagtgcataacgcgatgtcagcaaactcattcgtaatttttcatccggtgaaaatacggaataatatcgttcttcagccagcgatagccatccagagacgtaatggtcatggtgtgactcgctgtgcggcagcgctgcactcgcgtcatggaagcctttcagttgcgcgacatcgcgtacatctgccggtttgtcgccaagctgacgataaacctgcgccagcgccgttgcgcccagcgcgttattgcctttgcccaaatcaatcagcagcagtgcgttatcttcggtagaaagctgcggcgtgatggtgtgacgtacatcttccacgcgggcaaatgcagaaatcaccagcgacagcggcgacgtcatttcgcgctcttcgttaccttcctgccagcgggttttcatcgacatggagtctttacccaccgggatcgtcaggcccagcgccggacaaagctcttcgcccacggctttaacggcttcatacaggcccgcatcttcaccagcgtggcctgccgccgccatccagttggcggaaagtttgatgcgtatgatatcgccaatttgtgttgcggcgatgttggttaacgcttcaccgaccggcagacgggcagaggcggcgaaatccagcagcgcaaccggcgcacgctcgccaatcgccatcgcttcaccgtagtagctgtcgaggctggcggtagtgaccgcgcagttagcgaccggcacctgccacggccccaccatctgatcgcgcgctaccatgccggttacgctgcggtcgccaatggtcaccaggaaggttttttccgccacgcgtctgcaactggtgatcccttcacgggccagcgcgtcgcctttcgctttcagcgtttgtacatcgcgggtcatcttcggcgttttaccaagcaggacgtccagcggcagatcgatcggctgattatcaaaatgacgatcgtgcagagaaagatgcagttcttcggtcgcttcaccaatcaccgcgtagggtgcgcgctcacgcttacacagttcgtcaaacagcggtaattgatcggcagcaaccgccagcacgtagcgttcctgggattcgttacaccagatttccagcgggctcatgcccggttcgtcgcttagaatctcgcgcagttcaaatttaccgccgcgcccgccgtcgctcaccagttccggcatggcgttagaaagaccgccagcgccaacgtcgtggataaacaggattgggttggcatcaccaagctgccagcaacggtcgatcacttcctggcagcgacgctccatctccgggttgtcgcgctgtacggaagcaaagtcgaggtcggcatcagactgaccagacgccatagaagacgctgggtaccgaactcgagtcgtaatctgtctcttttgctcctgtcgggttggtgttcgttgttctgttgtgtggttgtgaatattttcgacataagcgtaggcttcatgtccacgagcgtagccgtaagtcagcttgctgtaatagggtttctggctaagtaaaggcagacgctgttttacgtcagcccaactgtcaggattccctttggtttttgccgtcagggcgcgggcatccagcatatgcgggtaccgagctcggtagccacattggaaagatccccaagggttcccgcgcggcgtaccgccgcagtgctcggcgaagtggcgaagcaggcgccgtcgacacgccgagaagcgcgcatcggtgatgagcgacacgtcttgccccacgagatatgcttgtagcgcggaggtgagnctggtaggtctcttccatgccggtgccggacggccgccgccgatcaccaccatgatatcgccctgcacaatctcttcccgcttgatcgccttgatcgcctgcgcttccgagacaaacacccgcacccggccggtgtggtggtatacgccatcttcgcccaccaccgacgggtcgatcgccgtggccttgatcaccgaaccttccggcgcgatgttgcccgtcgggaagcagaccgtcgaggtcagccctttcgcttttgccttctccggcggcaggatcacgtcatccggctctacgccgtcctgctcgcgcaggcactggcggaagcgcgcccggcgctcggacgcctgccaccattcaaggttctcgcccaccgtctggccggtcacggtcatggcgtccagatgcagcaggccgaggtcgcgcaggtggagcatcacctccggcacgccgcccgcgaggaaggcgcgcacggtcgggtgatagtccgggccgttgggcagcacgctcaccagacgcggcactttacggttgatgcgcgtccagtgctcaacgtccgggatcgtgcagcccgccgcgtgggcgatggccggaatgtgcagcagtaaattggtggagccgccgaacgccgcgtggatcaccatcgcgttttcgatggctttatcggagaggatatcccgcgtggtgatgccgcggctatccagctcgctgaccgcgcgcgccgactggcgggcgatctccagccacaccgcctgcccggacggcgccagcgcggagtgcggcagcgccagacccagcgcctccgcgaccacacccgccgcccggcgaggcgcaggcgcgacagcccagttcgcggcctcctgcagggagagttcgtggttggcgaaacgcgcgccgatggtctgcaccttgcccgcgtcttctacgacgtcgcgcagctcgccccctacccaggatgtcggctcgcagaggaagtagtggtttaccgtaccgttgtaacggttttcgatacgacgcagttcgccgtaacgttcaccggggctgatgttacagccgatggaacattgctggcagatgctcggcgcaaactgcatatcccatttacggttgtaacgctcggagtgcgttttgtcggtaaatacgccggtcgggcaaatttcgaccaggttaccggaaaattcgctttccagcgtgccgtcttccgggcgaccgaagtagacgttgtcgtgcgcaccgtaaacgcccagatctgtaccgtcagcgtaatctttgtagtaacgcacacagcggtagcaggcgatgcagcggttcatttcgtgagagatgaatggccccaaatcctgattacggtgggtacgtttggtgaaacggtagcgacggaagctgtgtccggtcatcacagtcatatcctgaagatggcagttaccgccctcttcacataccggacagtcgtgcgggtggttggtcatcaaccactcgaccacgctttcacggaactgtttcgcttcttcgtcgtcaatggaaataaaggtgccatcggaagccggtgtcatacaggacatcaccaggcgaccacgcgtgtcttccgcgttttggtattgcttcaccgcacactggcggcaagcaccgacacttcccagcgccggatgccagcaaaagtcgggaatatcaaggcccagagacagacaagcttccagcaggttgtccgctccgttgacctcgtattctttgccgtctacatgaattgtagccattagcatgcttccacagcgctctttcagcaggttcggctgaatcccattaatcaaatgggtattgctgaacggctgtttgattcccgcctcaaattcttcgcggaaatatttgatggcgctctgtaacggctccactgcaccaggtgcgtgggcacagaaagttttacccgggcctaagaatcgacacagttgctcaagtgtttcgatatcgcccggctgaccttcaccacgctccagcgcacgcagaattttcacgctccacggcagaccgtcgcggcacggcgtacaccagccgcaggactcacgggcgaaaaactcttccaggttacgcaccagcgacaccatgttgatctcatggtcaaccgccatcgccagcgccgtacccagacggctgcccgctttaccgatactttcgaattccatcggcagatcaaggtgcgcttcggtcaggaagtcagtccccgcgccgcctggctgccaggctttaaatttcagaccatcacgcataccaccggcgtaatcttcgaggatctcgcgtgcggtggtgccgaacggcagttcccacagtcccggatttttcacccgaccggagaagcccatcagcttggtcacggtgtcgaaagctatcgcaccactggcgcgccgcgtatcagtcctactcactttatggacagcgacggcaaagtgggcgcggaagtggctccgcgtcgttatttctgtctgcaatgtcacgtaccgcaggccgataccgcgccaatcgtggggaatacccccagccgtctggcgctggggacgctgctgttgatcggttttgttggcggcatcgtcttctggggtggccgggcttgccgattcgaagatattcctgtaaatcagctctcgccgggcaacaacgccgcgtcgctttagcgcgtctgtgctacccgtgccacgtatgatggcagagccaacaatcccgcaatcaatgccgatatatttcgggttttccgggtgttcatagcttacgaagatgttgccaggtgcatatcggcatggaaaaagctgcacgccgcgttccgccagcaatttcatgttagtgccgtttttctccagcgccgcaacatcagacaccggaatgccgtaaatgcgctccatcaccatcatcccttcactacaatagtcagggtaaacttccgggatgtagagcatcgggctgtcttcaaaattgcgccgaagctgaatggcgttggcagattcccgcagcaaattcagttcatcaatcaatgtcttttcgtactcgcgcaccacttcggttgggcgcagacggcgaccatccggcagcaaacgcggcacccagcgagccagacggtagataagtttcagatccgctttaataaccggcaaaatatccgggcggatgactttaatcaccacctctttaccattcgatttcaatcgcgcggtatgaacctgggcgatagaagcagaagccagcggcttgatttcaaaatcgtcaaaccacgcttctaccggcaagccgcccattgcagcttcaatctgctgcttcgccagcttgccatcaaacggagcaactttgtcgaatagggcgatcatcaacgctggcgcatagatgatgtaggcatgaagcagcaggaacgccagcggcgcagtcaggaagatcagccgtggaatgcccgacaagaagtggaacatggcgttgacgtaacatagccgctgagcaaacttcagccctttaccggtgagcgggttatcgagacggaagatttgtaccatcccgcgcgcccagcgaatacgctgaccgatatgcgccgacagactttcggtcgccagccccgcctgcctgccggaatacgcattatagcgctggcaggtattaggccacggagggttatcgacagcaatgccgccaatttcatccagcggcttacgacgaatcaccgcacaggaaccgcagaagaaagtggcgtcccacatatcgttgccatcctgcaccagaccatagaacagcgtgccttcgttcggcgttttacggaaacgccccaggttgcgttcaaacgggtccggtgagaagaagtggtgcggcgtctgcatcatcgccagctgtttttctttcaggaaccagcccatggtcatttgcaagaacgatcgcgttggtacgtggtcgcagtcgaaaatcgacacgaactcgccttgggcatatttcagcgcattgttgatgttgcctgctttcgcatgttcatgagtggtgcgggcgatatatttcacccccacgttttgcgcaaactggcgaaactcttccctgccgccgtcatcaaggatccagatattcagcttatctttcggccagtcgatacccagcgaggcgtaaatggtatttttcaccacgttgagatcttcgttgtaagtcgggacaaagatatccaccgacggacacagcgacatatctttcggcaatggcaccggctgacgattcagcggccatactacctggaagtagccgagcaccagcacaatccacgcgtacgtttcagggaagagcagaataagcccgcacaccagggaagcgatgatcgaatgatcatagcaagcgggcatggctttacgctcttcggcgccgagctgggagaactcgccaccgctgcccaggaagaacaggccgtcaacgcctgctttgatcagatcgtcgatcagcgcggcggtgcccggcttatcgagctggccgtcggcggtaaaaatggtggagacagggggaatgattcccgtgaacaacgcggactgcggcatgagatctccttgctgaatcat

SEQ ID NO: 135727 - DNA, 1875 bp, Homo sapiens
tcaccgagctcggtccactagggcgttcatcatcgctggcgcatagatgatgtaggcatgaagcagcaggaacgccagcggcgcagtcaggaagatcagccgtggaatgcccgacaagaagtggaacatggcgttgacgtaacatagccgctgagcaaacttcagccctttaccggtgagcgggttatcgagacggaagatttgtaccatcccgcgcgcccagcgaatacgctgaccgatatgcgccgacagactttcggtcgccagccccgccgcctgcggaatacgcatatacgcggaggtatagccacgacggtgcaaccgcagagaagtatgcgcatcttcagtcacggtttcgacagcaatgccgccaatttcatccagcggcttacgacgaatcaccgcacaggaaccgcagaagaaagtggcgtcccacatatcgttgccatcctgcaccagaccatagaacagcgtgccttcgttcggcgttttacggaaacgccccaggttgcgttcaaacgggtccggtgagaagaagtggtgcggcgtctgcatcatcgccagctgtttttctttcaggaaccagcccatggtcatttgcaagaacgatcgcgttggtacgtggtcgcagtcgaaaatcgacacgaactcgcctttggcatatttcagcgcattgttgatgttgcctgctttcgcatgttcatgagtggtgcgggcgatatatttcacccccacgttttgcgcaaactggcgaaactcttccctgccgccgtcatcaaggatccagatattcagcttatccgtagcagaatgctgagtcgccagtaacatgcgcgaatcctggcgcggattatggatttgtcgggtaaccagcagggattgcgtcatcgcctcacggaccatgtaatccggcaaaaaaccaattccttcacctaaaatctggcactgacatttggtgttgaaatctggcaccagaattgactcctgcccgtgcagcaaccagcccacttttttattaatcgtatgcgcggtgtcctccaccataatattagggtagagacgcagttggctttcggcgatgggttccggcacaaaggctaacgggtgatccggggcgatagcaaaagcccagcgaatcgcgccaatttcagtgtaatcaataccgccgccgtccagtagtgtatcgggtgcgccgatggcgatattggcctgattattaataatcgcatcccagacgccgttatacacttcggtggtgacggtaatctggcaggtaggaaactgctttttcagcaccttgcccgcgtcttccccgacggtcggcggcagcgtcgccccgcccggcaccagaatagtcggcaggtcgtgcatcgcggccagcgcaatcatggtggcgggcagccctttatcgcaggtcgctacgccgatcaccgcccgccgcgtcggcagggagcggatcaggcggcgaaacacgatcgccgcgtcgttgcggtacggcagggaatcgaacataccgtgcgtgccctgcgagcgcccgtcgcacggatcgctgacgaaggccgcgaacgggatcccgccattgcgggtgatctccttcgccgccgcctgcatctgcatgccgatctcccaatgcccggtgtggtagcccagcgcgattgggcgtccgtctccggcgcggatgccgccctctttgccggtgagcttgttggcgtcccagcccatcccggcgttctgcgtcatgccgaacaggttgccgctgggagattccatcagcatctgcggggtcagcggcagagcgccctgcggccccgccgcgtgggtgatcaccgcataaaacgcgtcgtcctgcggggtgaaaattttctcaatggtcat

SEQ ID NO: 135728 - DNA, 1145 bp, Homo sapiens
atgcgtcacgccatcggtacgccagcatcgcaagataaactgatctacgaagaaaaagacgatacctattacgtcagcctgcataaaacgacctcgaagcactatgtagtcattcatttggccagcgccaccaccagtgaagttcgcctgctggacgcggaaatggccgatgccgagccgtttgtttttctgccgcggccgcaaagatcacgaatacagccttgatcactaccagcatcgtttttatctgcgttccaaccgccacggcaaaaactttggcttataccgtacccgtatgcgtgatgagcaacagtgggaagagttaattccgccacgcgaaaacatcatgctggaagggtttacgctgtttaccgactggctggtggttgaagagcgtcagcgcgggttaaccagtttgcgccaaattaaccgcaagacccgggaagtcattggtattgcctttgatgatccggcctatgtgacctggattgcctacaatccagaacctgaaaccgcgcgattgcgttatggttattcttccatgactacaccagacactttgtttgaactggatatggataccggtgagcgtcgtgtattaaaacaaacggaagttcctggtttttatgcggcgaattaccgcagtgaacacctgtggatagtcgcccgtgatggcgtcgaagttccggtttcgttggtctaccatcgcaaacattttcgcaaaggacacaacccgttgctggtgtatggctatggttcttacggcgcaagtattgatgccgatttcagttttagccgcttgagtttgttagatcgtggctttgtctacgccattgtccatgttcgcggcggtggttgcaaaatcaacctggtcgtcgataacggcaaaatcgtccgggcggaggcagcgcaggggaaaaccaaccagggtaccctgtgtctgaagggttattatggctgggacttcattaacgatacccagatcctgaccccgcgcctgaaaacccccatgatccgtcgccagcgtggcggcaaactcgaacctgtttcctgggatgaggcactgaattacgttgccgagcgcctgagcgccatcaaagagaagtacggtccggatgccatccagacgaccggctcctcgcgtg

SEQ ID NO: 135729 - DNA, 3196 bp, Homo sapiens
ccaaataaatttactgacatcaaacccttcccgggtctgcgactgccagcatctcctgtttcacttcgtcagaaatggttggcgtgcgggagagtatccacaggtagtcgcggtccgggccggaaaccagcgcatggcggtattcccgatcgagtgcaataacgttataaccgccatagaaaggaccaaagaatgacactttcagcgcagcgcgagttggtgcgccggtaaagtacgctttcccttcactctgctgccacattcctctgtcagggttatagcctttattaatgacattcaggccgccgtcatcacgcaggctgtatgttgcggtgactttttccagtccacgttcaaagcggtgatcaaaacgggcaatctcataccaggtaccgagataacgtttggcgtcgaaattatttactacggtcacgccacgcggcggcgtaggagaactgcaggcaacgaccagaaatgcagctgtcgctggaataaagcggaaaagatcaaaccgagggcgaccagcagaagaaccagagctgaccgcagacagaggacaaggagaaaacgagataacggaagctgccacggcagcgaaggcccggcgcacgatgcggccgaaaaccggcaaccaaaatccagacaaacaccgcacgcgtggcttgcagatttgccacaccttcaatgcgaatggcaaccgcgcccgctgttctgccgctaatgccatggcggcgacgatttcgggtttatcgagcgggctgtccggaaccggctggcaggagacaatcaggccaccgttagcagcgattttttgatccagttgtgcaagtaacgacatacatcttcctaaatcgtttttggcgctgccaaacggcacggcaccgctgaatggtttaccgtcgatagcgtcatgagtacgcaacgcttccgggcgcgaccaacgctgaacgcgagaaggcatatccagcccaatcagcaggatcaccacgaacgtcagactgaacgagagcgatgccagcgcagtacccagatccagacgttgagcgatcaacgcgccgatgattggggccagtgcaccgcccaatgcgccaacgttgtaggtgaagcccaggcccgctgcacgctggtcggtatcgaaataaccgccaatcagttttgcatttgctggaagaacagtaacagaccgagcacccagacgtttgcgccgccaatcgcaaataccggaataatcagcagctgcgaggccagcaggctacaaacgtacgctttgcgggttcccagccagtcaccgaggaagccacctacgcagcatcccaccgccgcgccaaagccactaaagaacagcacattggctacacccaagaacagcgacgatcgcggcattttgcaggttaccggcgaagcagaaccacagcgcagtagccgccgccagtgtcattacgatatgagcgtcagcatcatggccccatatgtcaacagagtatgcgcgactgccgcgaccgcctctcgcagcgctcctcttaggagatacaccacaggactccaaggcgcttctcagacagtgagtaaaaactttagcaacaacgcccgcgccaacggtacggccgccttcacggattgcgaaacgcagaccgtcgtccatcgcgatcgggtggatcagggtaacaaccattttgatgttgtcgcccggcattaccatctctacgccttccggcagttcgatggtaccagtcacgtcagtagtacggaagtagaactgcggacggtagcctttgaagaacggagtatgacggccgccttcatctttggacagaatgtacacttcagattcgaacttggtgtgcggcttgatggtgcccggcttagccagtacctgaccacgttcgatttcttcacgtttgataccacgcagcagaacacctacgttctcaccagcacggccttcgtccagcagtttgcggaacatttcaacgccagtacaggtagacttctgagtctctttgataccaacgatttcaacttcttcaccaactttgatgataccgcgttctacacgaccggtaacaacggtaccacgaccggagatggagaatacgtcttcgatcggcagcagaacggctgtcaatcgcacgctctgttccgatatagatccggtgccccccaatcggtaccagatcaccctgacgcccgctggctgttgcccgatcccatcgaaaccctgaaagccgccgaaacgctggtacaacagggatttgtcgtgctgccttactgcggggccgatccggtattgtgtaaacgtctggaagaagtcggctgtgcagcggtgatgccgctcggcgcgccgattggctcgaatcagggactggaaacccgcgccatgctggagattattatccagcaggccacagtgccggtggttgtcgatgctggcatcggcgttcccagccatgccgcgcaggcgctggaaatgggggccgacgcggtgttagtgaatacggcgattgccgtcgcggacgatcccgtcaacatggcgaaggcatttcgtctggcggtagaagcaggcctactggcactccggaccgggcagccgcagttattttgctcatgccaccagcccgctgaccggatttctggaggcatcggcatgaaaaccttcagcgatcgctggcgacaactggactgggacgacatccgcctgcgtatcaacggcaaaacggctgctgacgtagagcgggcgctaaatgcctcgcaactcacccgcgacgacatgatggcgctgttatcgcctgccgccagtggctatctggaacaactggcccaaacgggcgcagcgtcggacccgtcagcgattgggcaaacacagttagtttctacgtcccgctttatctttccaatctttgcgctaacgactgcacaacatcaactgtctctggaaggtcactgtgcccgtcaaatcagccgccgtctgtgtcgcaactacgacctgattttgaccatggaaaagcgccatatcgaacgcttatgcgagatggcaccggagatgcgcggcaaagtgatcctgtttggtcactgggataacgaatgtgaaatccccgatccgtatcgcaaaagccgggaaacgtttacagcggtgtacacattacttgaacggtctgcccgccagtgggcgcaggcattgaacgcagagcaggtataa

SEQ ID NO: 135730 - DNA, 3158 bp, Homo sapiens
tcaaagagcaacgtctgcaaacgctgaaactgtgcgcgagatgcgcgccgacgtgtcggagctggtagagatgctgcttgcacgccgaatatggaacaacgcactcagggcattggcattctcgaccgacaatcgcccgtgatttgcgctttgatcacccctacgccgactacggcaatttccaaaaacactgtttacctttaccggcggcgatgttttctcccgcgtatggtccgtgtcaaagagacgtttgattcgctggcaatggcattcgcgctgggctttgttgaagcgccacgcggtgaagagtgcactggagcatgctcggtgataaccaaaaattgtccgcgtgagcctcgtgccgcaactaagcaaatggcggtgttggttaatggtgggcggatacggtctgagccccgtgatattgtagctgatccggtacctgtccgcggtgacgctattggacgccgaaaagggggtatagagtaggatgaatattagcagccgggtgacgcgctgggcgtcggtatcagaacgatccggcactggtgaaagaacttgtcgaactgctgtgctgaaaggcgatgaacctgtcaccgtcgagggcaaaacgttgcctctgacgaagcggccgagacgaaggcgattgttgctggtgcgtttctcccgggacagttgatcgaaagtaataattgtggccctaagcggttgatcctgctctccagggaagtgaacagtcctcccgtggttgtcacatgagcgcgtcgtggcaatctccgcgggaaaagggggtttataaacgcgacacacgatataggtggccttacccagttgctccgcctgtcggaggaccaaacaacgcggccatcgacacagacgactagacacggaagaagcacggcggcaagagaacagaacgacaagagagagaaaaagcggagcgacaaaactacacagaccggtgcaaatgaccatgggctggttccggacccgtttgaacgcaacctgggcgtttccgtaaaacgccgaacgaaggcacgctgttctatggtctggtgaggatggcaacgatatgtgggacgccactttcttctgcggttcctgtgcgtgattcgtcgtaagccgctggatgaaattggcggcattgctgtcgaaacgtgactgaagatgcgcatacttctctgcggttgcaccgtcgtggctatcctccgcgtatatgcgtattccgcaggcggcggggctggcgaccgaaagctgtcggcgcatatcggtcagcgtattcggttgccggtctccggtaccaaagacaccaggtacgccgactcgcacctgaatggagaatgacgctgcccgcgcaatttcccgcgaagatgtcacctcttctcgtgtccgttcaggattctcgaggtggatagggctcagctccacgccagcgccatctggcagggcgccgtcccgtgacaacccggccaaaacacgtatcccaccatggccctcaggaaaattcagctcatcgcctgagtcatgtcgataatgaatcgacctgtattgtttgcggcactcttcggttgcaacattcggcgcgttattttccaccgtctttgccggaaacgctgtttttagcaccggttaaccacagcgtggatataactggcaggctgctgtacccaaataaatttactgacatcaaaccttcccgggtcgcgactgccagcatctcctgtttcacttcgtcagaaagtttggcgtgcgggagagtatccacaggtagtcgcggtccgggccgcaaccagcgcatggcggtattcccgatcgagtgcaataacgttataaccgcgttcaaagcggtgatcaaaacgggaatctcataccaggtaccgagataacgtttggcgtcgaaattatttactcggtcacgccacgcggcggcgtaggagaactgcaggcaacgaccagaaagcagctgtcggatacccagctctttttctggaataaacgcgacatagctaccaatcgccgtcgcaccggagtaagttatggcagatttagacgatattaaagatggtaaagatttcgtaccgatcaaccgcaaaaaaatatcccttttaccctgaaaggttgcgtgcgataaacgctgtgttcggcggaaactggtaactcttaatgtaccggagcaattgcgggccgatccgatattgggtaaacgtctggaagaagtcggctgtgcacggtgatgccgctcggcgcaccgattggctcgaatcagggacgcgccatgctggagattattatccagcaggccacagtgccggtggttgtgatgctggcatcggcgttcccagccataccgcgcaggcgactggaaatggggccgacgcggtgttagtgaatacggcgattgccgtcgcggacgatccgtcaacatggcgaaggcatttcgtctggcggtagaagcaggcctactggacgtcagtccggaccgggcagccgcagatattttgctcatgccaccagccgctgaccggatttctggaggcatcggcatgaaaaccttcagcgatcgcggcgacaactggactgggacgacatccgccggccccgtctgttgtttctgactcttcaatgcctgttgtacatcccgataatcgtaaatatgcgtcaccatcgatttcacatcgaatcgccctgaaaaatagcttcaatcgtgaccggataacgatcgcatagcggaataccgtcagataaggtgcctgtttaacggtgaccgcagaacccgcttttcgaaaacaatatctgcgcccatgtcttcggtaaattgctgacagcggcaatagtgtcttcttttgcgccgttaataaccactgtcgcaccaagctttccgccattgccagacgtttttccagcacatcaacgacggcaatttccttgctcccaggcatttgcacgcttgcaacgtcatcaaaccaatacaaccgcaccgccgcgaacatggacaatgcgtagacaaagcctactgatctaatcaaactcaagcggcgtaaaactgaatcggcatcaatacttgcgccgtaagaaccatagccatacaccagcaacggttgtgtcctttgcgaaaatgtttgcgatggtagaccaacgaaaccggacttcgacgccat

SEQ ID NO: 135731 - DNA, 753 bp, Homo sapiens
tcaagcctgggacggcttcaggtacatcagggggcagcagagggaccccagggaggtggcctctgaaagttccaggctcccttcagccagggatgaggccagtggagccttgagctgtcccctttcccagaaaccctggatgatgttgagttttgccagtggctgacgcaggagcacggcgtagcggcgattccgctgtcggtgttttgcgccgatcccttcccacataaactgattagtctctgttttgccaagaaggaatcgacgttgctggcagcagctgaacgcttgcgccagctttagcgtccaggcgcgggaatattgacggtcggcaaacaactcttgcagtccgttaatttgcttcaggcgcagcacttcgtcgctgtccattcccagctctttgccaattttattatcgtcccatcccaactggctaagttcacggacgatttccgacatggcggtgatttgatggcgtccacgagcgcgattatgacgaatagtcgcggcgatgcgttgattacgcgtaccttccagacaggtcaccggcaaataaccaatattagtgacaattgtcaggtcgtcagagtaaggataaagcgcttcgcggataatctgattggtgacgtgcggaccataaaagtcgctggtatcaatatgattgacgcccaatgccagcgcctcacgcagcacggttatagcgacgtggcgatctcgtggggggccaaaaactccaggacctgccagttgcat

SEQ ID NO: 135732 - DNA, 1517 bp, Homo sapiens
atgccagccagagctctcctgtttgaggtgtctgttggcttctactgggagatgtgtcccagtcaggatacacaggggtcagggacccacttgaggaggttttctgtcccttatcagagctcaaacactgtggtgggaatccactgctcgcttcaagctgcgagcgttgccgcgattcggtgtctcctgcgctaccgggtcacctgcggcgtgacccgcctggtaacatgccttttctcccgaacgttgttgtcacggaccgtcggttggttctcgcgggtcaacttcgtcgctcccctggttctcccgactttagagcttcaggttccggggttcgatgtgaccgggaacttcagtttcgccgaccaccgatcactgtgttcttgttcgggaatgagcaacaaggttaaagccctggcagatatagccattgacttcgccctctttcatcatctcgaagtattgcaggacgtcgtagcctttatcccacttcggcaaccagtcaaagccccagctattttccgccgtcgctttatcaccaaagaaggccttcatcatagagacgaagaatttcgggtagttgccccagtagtttacctggccttccagcagcggttttggcgtgttggcggtaaggtaggtttgcagatcggtctgcttctcgcttggcagcgtcatgtaacctggcaggctctgcgacagcagccccaggtccgtcagcccctgaatattggagtgaccgcgcagggcgttaacgccgccgcctgccatccccatattgccgagcagcagctggatcatcgccatcgtacgaatgttttgcgcaccaacggagtgttgcgtccagccgagggcatacaggaacgaggcagttttatcgtgagcactggtttctgcgatgtattcgcagactttcaggaacgcgtcttttggcgtaccacagatgttttcaaccacatctggcgtgtagcgggaaacgtgctgtttcagcaagttccacacgcagcgcggatgttgcagcgtggtatcgcgtttggcgaagccgttttcgtccagttcataagtccaggaggatttatcgtacttgcgtttttccgcgtcgtagccgtgaacagtgatcctgtgaccggcgtgtcgcaaaccatgccgcaagcgccgtggacaacgccggtggaggtgaaatatctgctggaagagaagctcggcattcgggtgatggtcgataatgactgcgtgatgctggcgctggcggagaaatggcaaaataattcgcaggaacgggatttctgcgtgatcaacgttgattacggcattggctcgtcgttcgtgtatttaacgagcaaatttatcgcggcagtttgtatggtagcggacagattggtcacaccatcgttaatccggatggcgtcgtctgcgactgtggacgttatggctgcctggaaactgtcgcctcgttaagcgcattaaaaaaacaggcgcgggtatggctaaaatcacaaccggttagtactcaactt

SEQ ID NO: 135733 - DNA, 1280 bp, Homo sapiens
gcgtagaaaaagcttatgacctgctgactctggcgcagggcgagttccaggccgataccgccgttgctggtttgcaggctgcttatgctcgcgacgaaaatgatgaattcgtgaaagcgaccgttatccgtgctgaaggtcagccagacgcggcaatggaagacggcgatgcactgattttcatgaacttccgtgctgaccgcgcgcgtgaaatcactcgtgctttcgtgaacgctgatttcgatggcttcgcgcgtaagaaagtggttaacgtcgatttcgtgatgctgaccgaatacgccgctgacatcaaaactgcggttgcttacccacccgcttccctggttaacaccttcggcgagtggatggcgaaaaacgacaaaactcagttgcgtatttccgaaaccgaaaaatatgcccacgttactttcttcttcaacggtggcgtagaagagtcgttcaaaggcgaagatcgcattctgatcaactcaccgaaagtggctacctacgatctgcaaccggaaatgagctccgcagagctgaccgaaaaactggttgcggccatcaagagcggcaaatacgacaccatcatctgtaactatccgaacggcgacatggtaggtcacaccggggtgatggaagcggcggttaaagcggttgaagcgctggatcactgcgtggaagaagtcgcgaaagcggttgagtccgtgggtggacaactgctgatcaccgctgaccacggtaacgctgagcagatgcgcgatccggcaacgggtcaggcacacacgggacacaccaacctgccagttccgctgatttacgttggtgataagaacgtgaaagcggttgaaggcggcaaactttctgacatcgcgccgaccatgttgtcgctgatgggtatggaaatcccgcaagagatgactgttcaattgagcatccaaccagccagcaaactcccaattgctggcctcaggatccccaatcgggatgatatcttttgggcgaagaatattcgtaagatcgtcgtcaacgaggaagtaggtgacaccgggcgttataacttcggtcagaaatgcgttttctgggcggcgattattttcctggttctgctgctgtggcagttaattgtggttatcatggtgcatatctacgccgccctttgggtgaaaggcacgattaccgccatggtggaaggatgggttaccagcgcctgggcgaagaaacatcacccgcgctggtaccgtgaggtccgcaagacaacggaaaagaaagctgaatga

SEQ ID NO: 135734 - DNA, 2451 bp, Homo sapiens
atggcggcattttttaacttttttggcgtgttattgggcggacttagcgttgcctatgccattgtccatatgttgccaaccgatttgttgctgaatatggggtcaacccacggcctggcgatggtcttttccatgctgctggcggcgattatctggaacctgggaacgtggttcttcggtttaccggcctccagttcgcacaccttgattggtgcgattatcggcatcggtttaaccaacgcgctgttaaccggctcatcggtgatggatgcgttaaacctgcgtgaagtgaccaaaattttctcctcgctgattgtttcccctatcgtcggactgtcagttgttgcgctggataacgttaacttcacgctcaataaaggcgaagttcgtgcgctgttaggtaaaaacggcgcgggcaaatcgactctcattcgaatgcttaccggcagcgaacgcccggatagcggtttagtgaagatgagagcctgcattaataatcaacagattcgccaccataacaaatgcgtgattctggaactgctgtaccggctaaagcgcgccaataaatcaacgctggcccggctggcgcaaatttcgattccggcagtcagtaatattttgcaggaactggaaagcgaaaaacgggtggtgaatattgacgatgaaagccagacgcgcgggcatagtagcggtacatggctgattgcgccggaaggtgactggacgctgtgcctgaacgtgacgcccaccagtattgagtgtcaggttgctaatgcttgtttaagtccgaaaggtgaatttgagtatttacagattgatgcaccgacgccgcaggcgctgctgtccgaaatcgaaaaatgctggcatcgccaccgtaaattgtggccggaccataccatcaacctggcgttggcaatccacggtcaggttgatcctgtgaccggcgtgtcgcaaaccatgccgcaagcgccgtggacaacgccggtggaggtgaaatatctgctggaagagaagctcggcattcgggtgatggtcgataatgactgccagttacattattgtaagacagcaattctcaactggagccgaaaaatggcgctttcaagacaaaaatttaccttcgaaagacttcgcagattcaccttaccggaagggaaaaaacaaacttttctttgggatgcagatgtaacaaccctggcatgccgagcaactagcggagcaaaagcctttgtattccaaagcgtatatgcggggaaaacccttcgcatgactattggcaacattaacgactggaagattgatgatgcgagagccgaggcaagacggttacaaacattgatcgatacagggatagatccacgaattgctaaggctgtaaaaatcgcagaagcagaatccctgcaggcagaatcacgtaaaacaaaagtgactttctccgtcgcctgggaagactatcttcaagaattgagaaccggtatcagtgcaaaaactaaacgcccatattctactcgatacattgccgatcacattaacttgtccagtcgtggaggcgaaagtccgggcctgggactgctgctggcgtttaccttgtttggtaaagggatgagtaaacgttctgcgcccggggcgatgattattcacttcctcggtgggatccacgaactgtatttcccgtatgtgctgatgaagccgctgaccattattgccatgattgcgggcggtatgtctggcacctggatgtttaacttactggacggtggtctggtggctggcccaagtccggggtctatctttgcttacctggcactgacgccgaaaggctcgttcctggcgacaattgccggtgttacggtaggtaccctggtgtcctttgctattacttcgctgatactgaagatggaaaaaacggtggaaacggagagcgaagatgagtttgctcagtcagccaatgcggttaaggcgatgaaacaagagggtgcattctcgttaagcagggttaagcgtatcgcctttgtttgcgatgcggggatgggctccagtgcgatgggcgcgaccaccttccgtaaacgcctggaaaaagcggggctggcaattgaagtaaaacattacgccatagaaaacgtgcctgcggatgcggatatcgtcgttactcatgccagtctggaagggcgcgtgaaacgtgtgacgataaaccactatatggtccagctgttgtcttccagcctgggtgaaatcatgaccacgctgacagcacaacagattgcctgtgtttacgcctggctagcgcagttgttctcccgtgagctggacgatgaacaactgacgcaaatcgccagtgcgcagatggctgaatggttttcgttgctgaaaaacgaaccgccgctcactgcggcggtgaacgagctggaaaaccgtattgccacgctgacagtacgacgagcaagagattaa

SEQ ID NO: 135735 - DNA, 2638 bp, Homo sapiens
atggaccgcgataaccgttgggatcgcgtagaaaaagcttatgacctgctgactctggcgcagggcgagttccaggccgataccgccgttgctggtttgcaggctgcttatgctcgcgacgaaaatgatgaattcgtgaaagcgaccgttatccgtgctgaaggtcagccagacgcggcaatggaagacggcgatgcactgattttcatgaacttccgtgctgaccgcgcgcgtgaaatcactcgtgctttcgtgaacgctgatttcgatggcttcgcgcgtaagaaagtggttaacgtcgatttcgtgatgctgacccaatacgccgctgacatcaaaactaccgttgcttacccacccgcttaccttgttaacaccttcagccagtggatggcaaaaaacgacaaaactcagttgcgtatttccgaaaccgaaaaatatgcccacgagcggctggcgcaccacgttgcacagggggcaaaccaatacgcgcccatgaccggcgtgcaggccttgcgcgaggcgattgctcagaaaacggaacgtttgtatggctatcaaccagatgccgatagcgatatcaccgtaacggcaggggcgacggaagcgttatacgcggcgattaccgcactggtgcgcaatggcgatgaagtgatttgttttgatcccagctatgacagttacgcccccgccatcgcgctttctgggggaatagtgaagcgtatggcactgcaaccaccgcattttcgcgttgactggcaggaatttgccgcattattaagcgagcgcaccagactggtgatcctcaacactccgcataaccccagtgcaactgtctggcagcaggctgatttcgccgctttgtggcaggcgatcgccgggcacgagatttttgtcattagcgatgaagtctacgagcacatcaacttttcacaacagggccatgccagtgtgctggcgcatccgcaactgcgtgagcgggcagtggcggtttcttcatttggcaagaccctatcatatgaccggctggaaagtgggttattgtgttgcgccagcgcccatcagcgccgaaattcgcaaggtacatcagtatctgaccttttcggtgaataccccggcacagctggcgcttgctgatatgctacgtgcagaacctgagcattatcttgcgttaccggacttttatcgccagaagcgcgatattctggtgaatgctttaaatgaaagccggctggagattttaccgtgtgaaggtacatactttttgctggtggattacagcgcgctttctaccctggatgatgttgagttttgctagtcgctgacgcaggagcacggcgtagcggcgattccgctgtcggtgttttgcgccgatcccttcccacataaactgattcgtctcatacaaactgccgcgataaatttgctcgttaatcacgaacgacgagccaatgccgtaatcaacgttgatcacgcagaaatcccgttcctgcgaattattttgccatttctccgccagcgccagcatcacgcagtcattatcgaccatcacccgaatgccgagcttctcttccagcagatatttcacctccaccggcgttgtccacggcgctttcggcatggtttgcgacacgccggtcacaggatcaacctgaccgtggatttccaacgccaggttgatggtatggtccggccacaatttacggtggcgatgccagcaatttttcgatttcggacagcagcgccttcggcgtcggtgcatcaatctggagtaaggctgccctaccagttcatggcgttgatagccagtgataacttctgctgctgggttcatggtggttacatcaccctggcggtcaatggcaatgacgccatcggcagcgttttcaataatcagatcgttaagtgtccgcgtttcacgcagtgcctgggcgaggttattaacactctgactgatttgccccatttcaccgggcaattgtggtaatcgagtgggaatattttgtgccagagtcgagaggccatcggtgatgatatcaatattggcgctcaggcgacgggagataaggacaatcaacagcaggcttatcagcaaaccagcggtgagcacaatgataatcctcacatccattttccaggcctggcggcgaatatcttcggttaattcattggcccagatatagccgaggatttcaccattacgctcaatggggagcattgaattcaaaatatcgccgcgcacctgcctgcctgaataaactaaaggggtatttgtacgcatcacttcgcgaccagggtgatctgcggcaatggtaacgccgacattattctgatatagcgctgaaggcgcgtaggtgattatcgcatccagcattttgttgtaataaccagcaccgatgccagggaaggcgtgagtgatattttcggtaatgggggcaagttctgcatttaatgcgcggatacgctcctcacgtggtaagtcgatgtagagatcatagcgatcgcctagtgcctgattaagcaggttgaccacggcagaaagttttttctctttttcagataagactgctgaacgtccttccgtttctacgatataaccaatagtaagcgttgggacaatgaccatcaggattgccat

SEQ ID NO: 135736 - DNA, 470 bp, Homo sapiens
  misc_feature (1)...(470): n = a,t,c or g
gcggctgctggacaagaggggtgcggtggatactgacctttgctccggcctcgtcgtgaagacacagcgcatctccccgctgtaggcttcctcccacagaacccgtttcgggcctcagagcgtctggtgagatgctgttgccgctgcttacctgtacagccagtgctacgagctcaccaccaacgaatacgtctaccgcctctgccccttcaagcttgtctcgcagaaacccaaactcgggggctctcccaccagccttggcacctggggctcatggattggccccgaccacgacaagttcagtgccatgaagtatgagcaaggcacgggctgctggcagggccccaaccgnttccaccaccgtgcgcctcctgtgcgggaaagagaccatggtgaancagcaccacagagcccagttggtgngagtnactgatgggagctgatgaacgtcagccgtttgtncggagttt

SEQ ID NO: 135737 - DNA, 452 bp, Homo sapiens
agcttggcacgaggggaaccgcggctgctggacaagaggggtgcggtggatactgacctttgctccggcctcgtcgtgaagacacagcgcatctccccgctgtaggcttcctcccacagaacccgtttcgggcctcaaagcgtctggtgagatgctgttgccgctgctgctgctgctacccatgtgctgggccgtggaggccccaccgccactgtcacccccgcagccggccagccctgctgaggaagacaaaatgccgccctacgacgagcagacgcaggccttcatcgatgctgcccaggaggcccgcaacaagttcgaggaggccgagcggtcgctgaaggacatggaggagtccatcaggaacctggagcaagagatttcttttgactttggccccaacggggagtttgcttacctgtacagccagtgctacgagctcaccaccaacg

SEQ ID NO: 135738 - DNA, 2336 bp, Homo sapiens
ctcccccaaccttatcccgcccctgggggttcgcgggcatttttcaggaactttctttccggcttgagaagccgccactcccaagatggagcaggaaccgcggctgctggacaagaggggtgcggtggatactgacctttgctccggcctcgtgtagcgtgaagacacagcgcatctccccgctgtaggcttcctcccacagaacccgtttcgggccatcagagcgtctggtgagatgctgctgccgctgctgctgctgctacccatgtgctgggccgtggaggtcaagaggccccggtgcgtcgtccctcaccaatcatcacttctaccgttgagtccaagcctttcacctggcctggacggttcggccaccatcccatttgatcaaggtcaacgattgacctattgcgactgcaaagaatggctcttgacgaagccaggcaacggctgcctggtccttaatgggcaagctttccactggccaccaaacacttgggctataaagccccttgtaataatccccttccaaaccggggtcaaacgatggtgtttgtgactgctgcgatggaacagacgaagtacaacaagcggcgtcatctggtgagaacacctgcaaagaagaagggcccgtaaggagaagagagtccctgcagcagatggcccgaggtcacccgcgaaggggttccgtcttgaagaagatcccttatttgagggactgggaaagaaggcacgggaggagaagcagaaaaagcttcattgagctacaggctgggaaagaagtctctggaagaccagtgtggagatgctgcggacagtgaaggaggaagctgagaagccagagagagaggccaaagagcagcaccaaaagctgtgggaaagaacagctggctggcttccaaggccccaacagggagcaggacgctagggcggctgatgccttcaaggagctggatgatgacatggacgggacggtctcggtgactgagctgcagactcacccggagctggacacagatggggatggggcgttgtcagaagcggaagctcaggccctcctcagtggggacacacagacagacgccacctcctttctacgaccgcgtctgggccgccatcagggacaagtaccggtccgaggcactgcccacccgaccttccagcaccttctgcccctgacttgacggagcccaaggaggagcagccgccagtgccctcgtcgcccacagaggaggaggaggaggaggaggaggaggaggaagaagaggctgaagaagaggaggaggaggaggattccgaggtgcagggggagcagcccaaggaggccccaccgccacttgtcacccccgcagccggccagccctgctgacggaagacaaaatgccgccctacgacgagcagacgcaggcccttcatcgatgctgcccaggaggcccgcaacaagttcgaggaggccgagcggtcgctgaaggacatggaggagtccatcaggaaccatggagcaagagatttcttttgactttggccccaacggcgacgtgttgcttacctgtacagccaagtgctagggacctcaccaccaacgaatacgttttacccgcctctgcccctttcaagttttgtttttcgcaggaaacccaaattcgggggtttttcccaccagccttgggcacctgggggcttcatgggattgggccccgaccacggacaagtttcagttgccatgaagttttgagcaaggcacggggcttgctggcaggggcccaacccgctccagcatccgtgacgcttctggttcgggaaagagacccatggtgaccaagcacccacagtagcccagtcgctgcgagtaccttcatggaagttgatgaacgccagccgccttgcccggagccacccgccttgaagcaaccccaaccgaaagacggaccatgacgaagttcttagctggatgggcgcaagagaacctcaaagaaaggcatgaagccaagccccatgcagtgccggtccaactccgccccttctgggccctgcctgtggcttcttgttgcccttcctcctctggccggcaaggacctttgtgggggcttcgtgcccttgcttcttgggggcccagggcggggcttgggtccacacttcccaggcccccaacagccttcaaagatgggttaagggagcttgccctccctgggcccccgcaccttggtgactcgccccaccacccccagccctgtccctgccaccccttcctagtgggggacttagtgaattgatttgaccttgttgaccttcaatacaattaaatgttgatcccccacccaaaaaaaaaaaaaaaaaaa

SEQ ID NO: 135739 - DNA, 359 bp, Homo sapiens
  misc_feature (1)...(359): n = a,t,c or g
aattagagaagaaaatgactttcgcatctcggtggctggcgcacaggagaagccagcnctgctcagaataggcaatgactggtgcattccgaaaggaataacgccgacgacgcacatcattaaattaccgattggcgaaatcaggcagcccaatgcgacgctcgatctcagccaaagcgttgataatgagtattactgtctgctgctggcgaaagaacttgggttgaatgttccggacgcagaaatcattaaagcgggaaatgtgcgcgcgttagcggtcgaacgttttgacaggcgttggaatgctgagcgaacggttttacttcgcttgccacaggaggatatgtgtcagacattcg

SEQ ID NO: 135740 - DNA, 925 bp, Homo sapiens
atgtccattgcggtaaccaccaccgatccgacaaataccggcgtcagtaccaccagcagtagttcgctcacgggcagcaacgccgcagatttacaaagcagttttctgactttgctggtggcgcagctgaaaaaccaggacccgaccaatccaatggaaaacaacgagctgacgtcgcaattggcacaaatcagcacggtcagcgggattgaaaaactcaataccacgctcggatctatttccggacagattgataacagccagtcgttacaggccagtaacctgatcggtcacggcgtgatgatccccggcaccactgttcttgcgggaaccggcagtgaagaaggggctgtgaccacgaccacgccgtttggtgttgagctgcaacaggcggcagacaaagttacggccaccatcaccgataaaaatggcgcggttgtgcgcaccattgatattggtgaactgaccgccggagttcacagtttcacctgggacggtacgttgactgatggcagcactgcgccgaacggttcttacaatgtagcgattagcgccagtaacggtggtacacaactggttgcccagccgctgcagtttgctctggtgcagggtgtgatccgcggcaacagcgacataacaacattcggggtgaatatgaaattagcacatctgggacgtcaggcattgatgggtgtgatggccgtggcgctggttgcgggcatgagcgttaaaagttttgcagatgaaggtctgcttaataaagttaaagagcgcggcacgctgctggtagggctggaaggaacttatccgccgttcagttttcagggagatgacggcaaattaaccggttttgaagtggaatttgcccaacagctggcaaaacatcttggcgttgaggcgtcactaaaaccgaccaaatgggacg

SEQ ID NO: 135741 - DNA, 3858 bp, Homo sapiens
atgtctggcgggcagacggaaaaacaagcgcaactgatccgtgattttcaaccagatatgatcatggttacgccatcttattgccttaacctgattgaagagctggagcggcagttgggcggtgatgccagcggttgctcgctgcgggttggagtatttggtgctgagccgtggacacaggccatgcgtaaagagattgagcgtcgcctggggatcaccgcactggatatttatggcctgtcagaagtgatggggccgggggtggcgatggagtgtctggaaactaccgacggcccaaccatttgggaagatcatttctatcctgaaattgttaatcctcatgacggcacaccgcttgccgatggtgaacatggcgaactgttattcaccacgctgaccaaagaagcattgccggtcattcgttaccgcacgcgtgatttaacccgactgttaccaggaacggcgcggactatgcgccgcatggatcgcatcagcggacgcagcgatgacatgttggtccttcgcaggcgtcatttatgtcgacctagcgcatgccaactatgccgcccaccttccttaccggcgacggaccgtgttctggagttgtttgcccaaagcggtgcccagtggctggtgatccttggcgacgtgttgaatcacggcccgcgtaatgctttaccggagggttacgcgccagccaaagtcgctgaacggcttaatgaagtggcacataaggttatcgctgtgcgcggcaactgcgacagcgaagtggatcaaatgctgctgcatttcccgataaccgcgccgtggcaacaggtattactggaaaaacaacgtctgtttttgacgcatggtcatctttttggcccggaaaatctgcctgctttaaaccagaacgatgtgctggtgtacggtcatacccatctgccagtggcagaacagcggggggagattttccacttcaaccccggctcggtgagtattccgaaaggcggtaatccggcgagttatggcatgctggataatgacgtacttagtgtaatcgcactcaatgatcaaagtatcattgcgcaggtcgcgattaatccagcgccagaaaaagaaggtttcctgataatggaacagcgtcgtttggcaagtactgaatgggtggatattgtcaatgaagagaacgaagtcattgcacaagccagccgggaacaaatgcgggcacagtgtctgcgtcatcgtgcaacttacatcgtcgtgcatgatggcatgggcaaaattctggtccagcgtcgtaccgagacaaaagactttttacccggcatctgcgccaccagcaaagtcagaaaactgctttgtaaatctgcggcgttgctgcccgtgagcgaactactgctggtgttactgacgccggtatttgtcggatcggctgttatcggcaaactgggtgcgttcgcgatccatatcgacggtattaccgtcaagcgaaggctggtccggaatacggtattgcagttttgcggtaggagccgtcagccccttgaatatgtgagtgccggcgataccggtccggtactgcgggcgctgaaacggatgatggcgatgcgccactatatgcgttcacaaaccgtgaagggcgttactgatactcgtgccatcgacgaagtagccctgagcgtcgcccaggtcgaagagatgtatcgctatctcgccattgccaactatgaagatcgttttgttatcccgaccagccatcgggaaatggcgggcgatgccttcgcagaacgcaacggctgcggttttacctttggcgacggttgccacggttcggacagtaaattcaacctgttcaacagtagccgtatcgatgccatcaacatcaccgaaatcctcaaagtgatcggcctgttgatggagtatccggacgagctgttgtgggaatgcaaggaggacgcgctggcgttgatccgccgcgacgcgccgatgcttacggatttcacccacaacctgcttaacgcgccgctgctggataaacaggccgaatggtgcgaagtgtttgaccgcgggcgcaccacgtcgctgctgctgttcgaacatgttcatgccgagtcccgcgatcgcggccaggcaatggtggacctgctggcggagtatgaaaaggtcggcctgcagctggattgtcgggaactgcccgattatctaccgctgtatctggagtatttaagcgtactgcctgacgatcaggcgaaagaaggattgctcaatgttgcgccgatcctcggccctgggcaaaagcaactgctggcactggcgcgcgtgctgttcgagacgccgcaaatcctgatccttgatgaggcacccgccagcattgactccggtactgaacaggcgattcaacatgctctggcggcggtgcgtgaacataccacgctggtagtgattgctcaccgcttatcgaccattgttgatgccgacaccattctgtgcttcatcgtgggcaagccgtggagcagggcactcaccagcaactgctggcggcccagggacgctactggcagatgtatcaactgcaacttgcgggcgaagagctggcagccagctgcgttttcattttcaaacttcttaacttcctgctctctttctcgtttttcatttctggcacaccgcttgcaataccttcttcgtgtagcagaaccattaccgaattctgaccggaggggatctatgaagctggtgaccgtgataatcaaaccattcaagctggaagacgttcgtgaagcgttatcttccattggtattcagggcctgaccgtcaccgaagtgaaaggtttcgggcgtcagaaagggcatgccgagctgtaccggggggcggaatacagcgtcaatttcctgccaaaagtaaaaattgatgtggcgattgctgatgaccaactcgatgaagtgatcgatatcgtcagcataaatgatgtatcccggtatgaagatcgggtatccgcaacgtttttacgaagaaagttttgcgggaagtttcggttgaagaaaagtgatacatcgcagatgccccgtcaaatgtacggaaggcacgacgtgggctatcgcgttttaccggttcttccggcgtacgcaaatagcgataggtctgaaaacgcggatccagggctgttccaacaggcgacctacgaggcttgcaagcattgccccccaaccccccggaacatcggctgccgaggacgggaattcactgtgaatggaagaaacgccgtttcatttgatcctgacgtcatcatgatcggagagatccgcgatggcgaaacagcagagatcgctattaaagcggcgcaaactggtcacctggtgttgtctaccctacacactaattccacctgcgaaacgctggtacgtttacagcaaatgggggtcgcccgctggatgctatcatcggcgcttacgctggtaatagcccagcgtctggtacgcaaactttgcccacattgtcgccggcagcaaggggagcccatccacattccagacaatgtatggccatcgccgctgccccactggcaggcacccggttgtgtacattgctaccacggtttttatggtcgtacggccttatctgaaggtctgcccataaagccgacctgcaggctgtcaagcatttgcccccccaccccccgtgcagtttggtgccagcacgttcatcgtttgttcatgctttcagtgtcagaaccccaaaagcacccggaatttcgctgtctgggcaacatgcgccagcgtttgcttgcaccaccagcgacatattcaaagtgggcagtgccaccacgaataaccgtaccgagcgcaatcacgggtcgtatttaccggttttag

SEQ ID NO: 135742 - DNA, 3355 bp, Homo sapiens
ctattccgttactctccggactccgccccgccgtgttcttcggctcggtactcttgggtccaccagcccgttcagtacccggtacgccggcaggggcgcaggcagcacttcatccgcttccggcacccgctcacaccaaccgagcagccaccacggcccctgcggactgtttgtcgccagataacgatgcggacttaagcggagttcttccggcagcgcctgccagagtgcggccagccggtgaccttcatccagtttcgccacgccgccgcgcaccagccacagtgactcgctgcggctgtaaccgtcctcaccgggaaacaggtgctcaaaatacaggcttctgccgccgttatcactgagtatcagtgtgttatcgcgcagctgtaagcggatatccgcaggcattttccagccggggccgaggctccccaccggcgcgggcgtttttgtccggtaactgctgtaggtgcgggagaggatgaacggcagcgggccgggcagggcgatgtcggtttcaccgggaaggacctttgcaccgagcaggggattgaccggatggccggacgtcactccgccggggcacaccgaacaggccacgccggtgggggcaccaatgcgcaccccggctgaacccagcacgatgctttcttctgaacgatagaaacgacgtgcatcttcctctgcgttttcaccaatcaccatgccttccggaataacacaagcacgatcgatgacgcagcggcgcagacggcacgagcgacctacccatacttccggtaacaatacggcggaatcaatgttgcagaatgaattcacgcgaacgcgcgagaacagaacggactgcaccaccaccgaaccggagatcacacaaccgccggaaaccagtgagttaagggtcatcccgtggctaccggagcgatcctgcacgaatttcgctggcggtaatgattcattgtaggtgcgaattggccaattgcgatcgtacatatccagttccggcaccacagaggccagatcgaggttcgctttccagtaagcttccagcgtacccacatcgcgccagtacggctcggcatccgggtcggattgtacgcaagagagcgggaacgggtgcgcataggccagaccggcttcggggggtcctcttgcgatggctttcttgatgcggatacccggggtttcacccccggttacgctaccggacagtttgatcagttctttgatttcgtccatgttggagataacaaccggagtcagggtagacttggctttctcttccagcagcggcagatcaaattcaatgacagtatcgccaactttcacgcgctgaccttcttcagcaatacgcttgaagccttcgcctttcagttcaacggtgtcgataccgaagtggacgaacagttcaacgccgctatcagattcgatagagaatgcgtggttggtttcaaagattttaccaatggtgccgtctactggcgcgaccattttgttacccgttggtttgatagcaataccatcaccaacgattttttccgcaaaaacgacatccggcacgtcttcgatattgacgatgagcgtctcacgtagggtcgtgctcaggtcgatcaaaaaaacacttccataaccttgccgaataaattcgcgattcatctcaatgatacccatccggtactgtcgattcctgagatgatgcgtctgctgatcgatgagcaccaatttagctgggacgacgcgtttgaggtgtgttgtcaggtcttctcctacactaaccacacgctgatgagcgaggcgctggaaacctggccggttgatatgctgggtaaaattctgccgcgtcacctgcagatcatctttgaaatcaacgactatttcctgaaaaccttgcaggaacagtatccgaacgataccgatctgctgggacgggcgtcgatcattgatgaatccaacggtcgtcgtgtgcgtatggcctggctggcggttgttgtgagccacaaagttaacggtgtatcggaactgcactctaatctgatggtgcaatcgttgtttgccgactttgcgaaaatcttcccgggtcgtttcaccaacgtcaccaacggtgtgacgccgcgtcgctggctggcggtagcgaacccatcgttcatcgccgttaaccagttgcattggcgtcgccttccagcttttgatattgccttttcgcctgtttcgggcacagattaaaggcaaagcgcagacaatgcttggtgatcatcaccgggacttcgcccttctcttcatgtgcttcatacgccgcgtcaatcagctgcacaccatagcgatgataaaattcacgcgctttctggttgtatacgttcgcgaggaaactcagatgcgtttgcggataaaccggcgcaggatcagcaaccggtttacggctgccgcgctggtaactggcaagacgcgcagcatccagcatgtcagcagcttcacggcggaactggtttaacagactgtttggtacaaacagcgcccccggcaaattaatttgcacatcgcgggcgtaatagagggtttgccccagttttgccagaccatccttcagattgttcattgctttttcggcgttattggcttcgtcgaactgcccgtccagcgtatgcgtgatgctgacaccctcttcactggtgagggtcagaatcagttgttcctgccagccgcccagttcaatgtctaccgccacccgacgttcggtgggtacgtccagggttgttagttccccacaggtatccgggatagacatattacgcgagcgggcgtcgagcacttttccccatgcttgtacggtagtcgccatatcaaaggtaaggatttggtcgctttctcccggcgcggcaaaggccagggggttagtaccgtagtaaatttccgcgccgccaaacggcaccaccattggatcggattggcacatcgaaatgccaatgaatccggcgcgggctgcctgctgcacaaaataagagattgcgccgctgtgacccatccggctgataccgaccaccgcaacgccattttgctgggcggttttgatggcatgttccatacccattttcgccgcgacctgtccggcggcattgtcggcatgtaaaattgccgagcacggcccggtttcctcaagacgaaactccggttcgcggttggtgccgccttttgaaatgcgttccgcgtagtattccacgcgcaccgcgccatgagagtggatccctctggcatcggcgtaaaccaatacttcacccacggttgcagcgtgctcacgttttaacccagcctggcagagtttattctcaattagctggtggagtgtttcccgactgattttcat

SEQ ID NO: 135743 - DNA, 3942 bp, Homo sapiens
tcacagtcgttgccagtctggagtatccaatgtagctccgtaatgcatctgaaagcctccgtacagggtgaagatggccgtaaccaaatcctgacgatgggttgctacggtcatcggggtaacgcgtgtggtcagctgcggcgcattgagcagaacgaaaatgatcatagtcacatcgaacgcgattttcttttcatcgccgcactcctggccttcgcgatctacgatcagttcatcatgccccgccgtaacggccccaccctgctggcaattcctttgctccggcgtggtcgcatcgatagcgttatcttcgtcggattgattgtcattcttattgcaaagcggtccagtttccggaatattacacagcggttgttgcagatggcgacgggcatggcgtaactggcgcagcgtgttggagtaaatgccggtgatcgcactgttgtgcaccatggtgtagaacatacgcaagatggcttccggctggcgcataaatagtgtttcatcacgcaggtcgattagcgtaccgcgtagctgaaactcatcgtcgattggacgtggtttttcgtcggcgggaagggcgaggatggcttcatcgaacagttgcagcagcatctggttgagttcactgacgcggcgtgtaacgcggaagtaatccttcatcatccgctcgaccggttcgttaccttcaccactgtaattcagacgctgggcgacgctaagctggcgatcgaataacaggcgattatcgtaacggctgacgaccagatgcagggcaaagcgaatacgccacaatatatgcagacattcgtttaattccgcccgctccgccatttcatccagcgatgttgcgccaaaatgacggcgggccacccattgcagagtgtggatatcgcgcaagccgccagggctgcttttgatgtctggttcaaggttgtagctggtgccatggtaacgctgatggcgctggttctgttcttcaactttcgccgcgtagaacttgtcggaaggccagaatccttcgctgaaaatatgtttttgacagttcgaggaacagcgcaacatcgccaataataagcgggattcgattaaattggtggcgacggttaaatccgataacccttccagcatgcactcttcaagcgtgcgcacgctatgaccgacttccagctttacatcccagagcagcgttaacagctcgcccactttttgcgcctgatcgtccgggagctttttacggcttaaaatcagtaaatcgacgtctgaaagtggatgcagctcgccacgaccgtagccaccgacggcgaccaatgccaggtcggcaatctggctgaatcccgcttcaatccataatcgttgcaggagctggtcgataaactcggtgcgcgcctcaatcaactgttctgcagagatcccattgtcaaaggcatcacccagccaacgctggaaagtatcgatatgggcttttatcccaccgacggttaattcatcacggggccagacgcatggattttgcggttgaccgggcagggtggggagagcggtgtttgcgtactgttcgtaatttccaagctgctgagagatgcttatttgttcctgaccacgcttactgtagaacagattaaaataatcaataaattgtgtctgctcattggtgtctccggtaggaggcttgacggtgtaaccactcattcgactgtaggcactgtcggataagttataaaaaccttgcgtagaatagcgatatcctgcgaccagataaacatcgcggaagatccccgctgaccaccacatatcctggtcttccacgtaggtagagtccgcccactgcatcacgcgcacacacaacaggttgtcgccggttttaaccatcgcgctgatgtcaaactctgcggtcaggcgactgcccttgctgaaacccacatactgaccgttaacatagacttcaaaataggtttcgacgccgtcaaatttaatcagcgtctgtttaccctgccagccgtcgctgagggtgaaaatacgttgataggcaccggttgggttatcgctggggacaaacggcacatcgatggggaacggaaaaccttcgtcggtatattgcagtttgccgtgacccgaggggggatcctctagagtcagggacttcctcgcgataacgcagttcgtcttcgtccatccacggtagcggattgtgtccccactcacctgccgtgccattgcgcgccgatatgcgcccgcccattgaattggctttatcgcctctatgctccatcttggttcaccaatgcgcgcttttaactcgctcaaccggttaggggcttcagcactcagtaacgaaatcgccagcggttcgatcttttttcccgtagccggcatcggctggttgctggcaatgctgaaaaagctgtcaccggcattgcgtacgctgtggctgatagtgacgatggttcttggcgtcatctttgtctggatgatggtgcgtgtgtataacagcattgataccgttccgacctggtacagcatctggacgccgatgggcttcttcctgttgttgagtctggctggcgtcgatggctgggcgatgcgtctgctgccagcaatttctgtactggcacaaacattctgttgccatcgtttctgtcccgtgaatgaagagtcagttgttggaatattcagcttgtgcgacgtggatttgtcgggagcttcaaacctcttcgttagcagccatccataatccataaaggttggccagcaaatagccttcttcacacgggttaactgatgcaattgcacaacggcttgccagtggctggattgcgccagttctgccagcaactcgttatccagcggctctatttcttcaccacggcgactgcgcatcagtgcactcgccatatgtgtcatcgccatcgttccttgctcactgcgcaccggcagatggcactctgtttccagtacgttgacgacctgcatcatgcctttgcagatgtccttatcaataacgcctgctacccgttgttgatgggcgagcagggcgtgtttatctacaacggcacgcagcagttgttgcattgggtaatcatcgactcgcgtcaggaccacggcttcggtggcctgtaaaaatcgcggatcgtctgtgagcggcgtcgcctctaatcccagcatggtcagttcgttttccgccaccacgttccagatcaccgcatcgacatcgcctttaacaatgcgttgtaaactctcgtgataagagagatcagctcggtcccggccagtgttggggtgggtatcgatttccccgggggggcggccacttgggcgggcccggttgtaattaagcccggacaatcttaagccgtgatcatcgggtgtacccaaccacgaaacgggcttcaaagtgtgccagttaggacccacggcatgggccattatcaggaaagccggaaaaatattcggtcgtgaggagccaaaacgcgtatccgttccctgcatatatggcgacgcggcggaaagggcgataaagtgcggcacaaatcgtgacaagccgtgcagcaaataaatggcgtcatcgccactggcgcagccaacatggacatgctgaccaaaaacggtcgcctgctgaatgagataaccaaagttttccagcgtgcgttgatagcgttcgttatcgcatacctcctgacgctgccatttctgaaacgggtgcgtgccaccgccgcaaatttccagatgatggtctgtggctgcctgcaatacgactttctgcatcgctgaaaactgcccggcagcctggttgatatcacggcaaacatccgtcgccagctccagcatactttcggtgatatcgtgctttacctctccggccgtgatcttatttttaaccgcgtcaatcagcattgaagagtcctggcttaagtcatagcccggcggattaaccacctgcat

SEQ ID NO: 135744 - DNA, 2800 bp, Homo sapiens
atgccgaacgttgatgttgtcggagagatggttaacaccatgtcggcgtcacgcagctatcaggccaatgttgaagtgctcaacacggagaaagctatgtccattgcggtaaccaccaccgatccgacaaataccggcgtcagtaccaccagcagtagttcgctcacgggcgagcaacgccgcagatttacaaagcagttttctgactttgctggtggcgcagctgaaaaaccaagacccgaccaatccaatggaaaacaacgagctgacgtcgcaattggcacaaatcagcacgacgctgcgcgcatattaaggaaaggaacaatgacaacattacttaacccctattttggtgagtttggcggcatgtacgtgccacaaatcctgatgcctgctctgcgccagctggaagaagcttttgtcagtgcgcaaaaagatcctgaatttcaggctcagttcaacgacctgctgaaaaactatgccgggcgtccaaccgcgctgaccaaatgccagaacattacagccgggacgaacaccacgctgtatctcaagcgtgaagatttgctgcacggcggcgcgcataaaactaaccaggtgctggggcaggcgttgctggcgaagcggatgggtaaaaccgaaatcatcgccgaaaccggtgccggtcagcatggcgtggcgtcggcccttgccagcgccctgctcggcctgaaatgccgtatttatatgggtgccaaagacgttgaacgccagtcgcctaacgtttttcgtatgcgcttaatgggtgcggaagtgatcccggtgcatagcggttccgcgacgctgaaagatgcctgtaacgaggcgctgcgcgactggtccggtagttacgaaaccgcgcactatatgctgggcaccgcagctggcccgcatccttatccgaccattgtgcgtgagtttcagcggatgattggcgaagaaaccaaagcgcagattctggaaagagaaggtcgcctgccggatgccgttatcgcctgtgttggcggcggttcgaatgccatcggcatgtttgctgatttcatcaatgaaaccaacggtctgtcggcccacaacacgcgtatcttaacagcagtgtacgcgctgattaagtgtctattaccgatgatgaagaccttcaagcgttcaaaactctcacagcgtcatataagactactcccgctgcggcaaaaacctcgctacatgttccgagccatgaatcataaacgcgtgaatgcgtggaatgctgagcgaacggttttacttcgcttgccacaggaggatatgtgtcagacattcggtttaccttcatcggtgaaatatgaatcagatggaggcccaggcatcgcgcggatcatggcttttttgatggggtccagcgaggcgctgaaagatcgctatgattttatgaagttccaggtcttccagtggttgattggcgcaacggacggtcatgcaaaaaacttctccgtatttgttcaggctggcgccagttatcgcctcacgccattttacgacatcatttcagcatttccggtccttgccggtacgggaatacacatcagcgatctcaaactggcaatggggcttaacgcatccaaaggcaaaaaaacggcaatcgataaaatttatccgcgacattttttggcgacagcaaaggtgctgagattcccggaagtgcagatgcatgaaatcctgagtgactttgccagaatgattccagcagcactggataacgtgaagacttcattaccgacagattttccggagaacgtggtgacggcagttgaaagcaatgtgttgaggttgcatggacggttaagccgagaatacggtagatatcgctattctacgcaaggtttttataacttatccgacagtgcctacagtcgaatgagtggttacaccgtcaagccttctaccggagacaccaatgagcagacacaatttattgattattttaatctgttctacaattgtgcccatcacccactaacccgtaatcttgatcataactggcagcaggcactgacaaaaacctccagcgaacgtcgggtggcggtagacattgaactgggcggctggcaggaacaactgattctgaccctcaccagtgaagagggtgtcagcatcacgcatacgctggacgggcagttcgacgaagccaataacgccgaaaaagcaatgaacaatctgaaggatggtctggcaaaactggggcaaaccctctattacgcccgcgatgtgcaaattaatttgccgggggcgctgtttgtaccaaacagtctgttaaaccagttccgccgtgaagctgctgacatgctggatgctgcgcgtcttgccagttaccagcgcggcagccgtaaaccggttgctgatcctgcgccggtttatccgcaaacgcatctgagtttcctcgcgaacgtatacaaccagaaagcgcgtgaattttatcatcgctatggtgtgcagctgattgacgcggcgtatgaagcacatgaagagaagggcgaagtcccgggtgatgatcaccaagcattgtctgcgctttgcctttaatctgtgcccgaaacaggcgaaaggcaatatcaaaagctggaaggcgacgccaatgcaactggttaacggcgatgaagtattaacgctaaagtttgattgccgcccatgcgagatgcacgtcattggcaaaatcaaaaatcacatactgaaaatgccgttaccgggaagcgtagtggcatccgtaagtccggatgagctgctgaaaacattgccgaagcgaaaagggtaa

SEQ ID NO: 135745 - DNA, 1946 bp, Homo sapiens
atgtttgatgggaaaactttcaaacttgtagtgggatgccagagtgttttctcacagtgggtgggtcctgtatttaatcaggcaatactgttcaatatctgccgtctcttcctgcggttcaaccaccggttctgcttgttctgcaacttcctgggctacggcaacatcagactcggtaactcacctgcggctgttcagttaccgcggcagcgatcacttcaggatgcgtcgtttcaaccacttccggttgcggttcggcaacctgaacgggggcttctacgacaccggccacttcttcaacaactggcgcgctaacaaccggttcgatagcggcggcgacagggacctcagtcaccatcggctgcacatgtacttcttcctgttcgcgctgctcttcaacctgtacatcttgcggacgtacaattggatagcggatccagactttgccagaggccagttccggagacgcgcacgctacggtcaacggcattggcgactgggttggataacgctcgtcacgatagcgacgacgacgctgaccacttacgcgcaggtgacgaggcgagcggcgagaacgacgcggcatgccaccgttgtcacggttatcagcattgttctcttcttgctgttctggtgcagtttgcgctacgactggcattactgcatcctaatacttagatcgactccatctgttctgtcccagtatcctgtgggcaatgagttaaggaggaggcgcttagtccacctacatttactgtgcacctactctgatgacgactctagagatccccggtaccggcaagaatcccgtacccgtaatggcgtagtgccagtaattgtaaatatcgacgttcatcgttttggtcagacgggtgaccagcatggcgccatgattatcccagttatttttcttctcaatgtcgccatgcacgaacgagctagcggtcacatccccaacggcaaccgcacctattatttgagccgctcgcaaccaccggtttttgcgctgatggtggagttgtttgaagaagatggtgtagcggtcgcccgctatctcgaccaccttaaaatggaatatgccttctggatggacggtgcagaatcgttaatccctaatcaggcctatcgccatgttgtgcggatgccggacggatcgctgctacatgcgatactggtgcgattgccacacttcgtgtgattaatcctggcttgaggacgttgaaaccgcgaaacattctggtcgcccgcccaacgaggtgtaccgcgatttacgcgcgggggcggcctccggttgggattactcttcccgttggctgcgtgatactggtcgtctggcgagcattcgtaccacccagttcatccccatcgatctgaatgccttcctgtttaaactggagagcgccatcgccaacatctcggcgctgaaaggcgagaaagagacagaagcactgttccgccagaaagccagtgcccgtccgatgcgcgagtacgaaaccggtgaacagtgggataaacccaacggctgggcaccgttacaatggatggcgattcagggatttaaaatgtacggcgatgaccttctgggtgatgaaatcgcgcgaagctggctgaagacggtgaatcagttctatctggaacagcacaaactgatcgaaaaataccatattgccgatggtgttccccgcgaaggcggcggtggcgagtatccgttagcaggatgggtttggctggactaacggtgtggtacgccgtttaattggtttgtacggcgaaccataatatttttacagccagccgctaacttcctgctggctgtaaaattatcctcttcaggaggagatatttaacatcattgccgcctgggtgcgatttttcacttccagacggcgatacagggattccagatgcgcttttaccgttccggtactgatattcagcgctctgcc

SEQ ID NO: 135746 - DNA, 2517 bp, Homo sapiens
atgaaaacgttaattgcccggcataaagctggtgaacatatcggcatatgttcagtctgttctgcccatccgttggttatcgaagcggcgctggcatttgatcgcaacagcacgcgcaaagtgctgattgaagcaacgtcaaaccaggtcaatcaatttggcggttataccggaatgacaccggcagactttcgcgaatttgtttttacgattgccgataaagttgggtttgcacgcgaacgcattattctcggcggcgatcatctggggccaaactgctggcagcaagaaaatgcggatgcggcgatggaaaaatccgtcgagctggcagtggtcattgacctgtggtcacgtgccgttattggctggtcaatgtcgccacgcatgacggcgcaactggcctgcgatgccctgcagatggcgctgtggcggcgtaagaggccccggaacgttatcgttcacacggaccgtggaggccagtactgttcagcagattatcaggcgcaactgaagcggcataatctgcgtggaagtatgagcgcaaaaggttgctgctacgataatgcctgcgtggaaagcttctttcattcgctgaaagtggaatgtatccatggagaacactttatcagccgggaaataatgcgggcaacggtgtttaattatatcgaatgtgattacaatcggtggcggcggcacagttggatcaactctctgctgtcgcagaagcggaacacgcaaggtagaattgaagatggaaggcagcatgacaaatgggtcgcggagcgcaaccgtatagaggatccccgtctggtcaccgtgcgtgaaggtgaagcccgtgaagtggtgctggcaaaaatgcacgaaaaacgcgttgaaaaagcgctagttgccgcactggtggtcgcactgctgattagcggtggtatcctgacctgggccggatttaacgatccgcaggagatcaacggcaccttaagcgccgatgccacacctgctgaagctatctcccccgtagccgatcaggactggcctgcctatggtcgtaatcaggaaggtcaacgcttttcgccgctgaaacaaattaacgccgataacgtccataatctgaaagaagcctgggtgttccgtactggcgatgtgaagcagccgaacgatccgggtgaaatcaccaatgaagtgacgccgattaaagtgggcgacacccctttactgtgtaccgctcaccagcgcctgtttgcgcttgatgccgagatggacggcatcgccacgctgaaagagatcaaagcgttaaacccggcaattccggtgctgattatgactgcgtactccagcgtcgagacggcggtagaggcactgaaaactggggcgctggattatctcatcaagccgctggatttcgataacctacaggcgacgctggaaaaagcgctcgcgcatacgcacagtattgatgctgaaacacctgcggtgactgccagccagttcggtatggtcggtaaaagcccggcgatgcaacacctgctcagtgaaatcgccctcgtcgcgccatcggaagccacggtactgatccacggcgattccggcaccggtaaagagctggtcgccagggcgattcacgccagtagcgcacgtagcgaaaaaccgctggtaacgctcaactgtgcggcactcaacgaatccttgctggaatctgaattgttcggtcacgaaaaaggggcgtttactggagccgataaacgccgggaagggcgctttgttgaggcggacggcggcacgctgtttctcgatgaaattggcgatatctcgccgatgatgcagataatacctttcatcgcaaaggaaaaagcagcttcatctgtccgtgactctagaggatcccctgagcgcgaggagatacgagctggtttgtcagccaaaatgagcattcgtgcgatagctactgcgctgaatcgcagtccttcgacgatctcacgtgaagttcagcgtaatcggggcagacgctattacaaagctgttgatgctaataaccgagccaacagaatggcgaaaaggccaaaaccgtgcttactggatcaaaatttaccattgcgaaagcttgttctggaaaagctggagatgaaatggtctccagagcaaatatcaggatggttaaggcgaacaaaaccacgtcaaaaaacgctgcgaatatcacctgagacaatttataaaacgctgtactttcgtagccgtgaagcgctacaccacctgaatatacagcatctgcgacggtcgcatagccttcgccatggcaggcgtcatacccgcaaaggcgaaagaggtacgattaacatagtgaacggaacaccaattcacgaacgttcccgaaatatcgataacagacgctctctggggcattgggagggcgatttagtctcaggtacaaaaaactctcatatagccacacttgtagacacgaaaatcacgattctacgatccatcgattcgactctaggggcaacagattcctgtctccagtaa

SEQ ID NO: 135747 - DNA, 1530 bp, Homo sapiens; identical to SEQ ID NO: 132442

SEQ ID NO: 135748 - DNA, 1866 bp, Homo sapiens
tcatagctgagtgaagaacacctgcacgccgcgttccgccagcaatttcatgttagtgccgtttttctccagcgccgcaacatcagacaccggaatgccgtaaatgcgctccatcaccatcatcccttcactacaatagtcagggtaaacttccgggatgtagagcatcgggctgtcttcaaaattgcgccgaagctgaatggcgttggcagattcccgcagcaaattcagttcatcaatcaatgtcttttcgtactcgcgcaccacttcggttgggcgcagacggcgaccatccggcagcaaacgcggcacccagcgagccagacggtagataagtttcagatccgctttaataaccggcaaaatatccgggcggatgactttaatcaccacctctttaccattcgatttcaatcgcgcggtatgaacctgggcgatagaagcagaagccagcggcttgatttcaaaatcgtcaaaccacgcttctaccggcaagccgcccattgcagcttcaatctgctgcttcgccagcttgccatcaaacggagcaactttgtcctgcaataacgccagctgatcggcaatatgcggtggaaaaagatcgcggcgggttgataacatttgcccgaacttgatccaaaccggccccagttcttgcagggccagtcgtagtcgctcacctaaaagtttgtctttatgccgatttggcatccagaataatgagtatcgccatagccgtagcggcagggtgatacgcattttggggatcagttcatcaagtccgtagctgacactgtctgagcgcgaggagatacgagctggtttgtcagccaaaatgagcattcgtgcgatagctactgcgctgaatcgcagtccttcgacgatctgaatatacagcatctgcgacggtcgcatagccttcgccatggcaggcgtcatacccgcaaaggcgaaagaggtacgattaacatagtgaacggaacaccaattcacgaacgttcccgaaatatcgataacagacgctctcctagcccctacatcagaaagcgtggtgcgcacaccgagctgcgtagcgatcatcccttgctgataaaccagcactggcaccacttcgcgggtatggtggctgtgaccaatggtcggatcgttgccgtgatccgccatcacgaccaggcaatcatctggctgcatcgcctcaacaagccgggcaaggttacggtcaacgacctgcaaacgttcggcataacgtgcgacgtcttctgcatgaccagcgaggtcggtttcctgaatgttggtgcaaataaacgccgtcggatgggtgttaaattcgttgagggtgatatccataatccgctggctatccaccagattttgccagctcacgccataaggattgttgacgatatctgccaccttacccaccagcacggttggcacgcctgcttcatacagtttttgtggcacctgcactttttcatcgacgccatagcccatatgcacgacctggaaaccgttgtcataagcgccagaacgcggcgcattgataccaataaagcgcccttctttgctttctgcggcatcgagaatgcgttgactgtcggttaacaggccaccaaatgtaatgacccgaccgacctgtacctgctcacgcacgatacgaccaattttgattgcgtcgtcaaaagagatcacagagagattggcggtaatgttatagacctggcctaaatccgcctcgagattatcgccaatcgcaaccgcctgattgacccacagaaattgcagatcatcgccacggcgctccacctgccagccagcggaaactaatgcctgctcaacacggtcaatcacatcgcgaaaaggcat

SEQ ID NO: 135749 - DNA, 2155 bp, Homo sapiens
ttatcccagcaaacggtgaatacgttgcaggccggtcaccagacgatccacttcttcatgggtgttatacatggccagcgacgcccgacacatcgcagggacgttgtaataggccatcaatggcattgcgcagtgatgtccggtacgcacagcaatgccgtaattatcgagaaaactgccaacatcataggcgtggtgtttaccgagattaaaagcaataacgccaagcctgttttgtgggccatagagagtaatgccgctgcaaccgatggtgaaatagtttttgatggcgagattttaaaatccgcttgtgaaatcaatgactctgataagaaaattgaagttgctcttggtcactataatgccgaacagtttcgtaatattggcgagcgtagcccaaaaattccattcactattcctttagttaactgcccaatgactggtgaaatagcgaatatcctgggttcaaaacccggaacgatcttcactatgttaagggatactggcggcataaaaccccatgagcgtaagcgggctgtagctcacctgacactgtctgagcgcgaggagatacgagctggtttgtcagccaaaatgagcattcgtgcgataggttactggcgctgaatcgccagtccttctaccttctcacgtgaaagttcagcgtaagggggggcacaggctattacaaagctgttgatgctaatatccgagccaacagaatggcgaaaaggccaaaaccgtgcttactggatcaaaatgtaccattgcgaaagcttgttctggaaaagctggagatgaaatggtctccagagcaaatatcaggatggttaaggcgaacaaaaccacgtcaaaaaacgctgcgaatatcacctgagacaatttataaaacgctgtactttcgtagccgtgaagcgctacaccacctgaatatacagcatctgcgacggtcgcatagccttcgccatggcaggcgtcatacccgcaaaggcgaaagaggtacgattaacatagtgaacggaacaccaattcacgaacgttcccgaaatatcgataacagacgctctctggggcattgggagggcgatttagtctcaggtacaaaaaactctcatatagccacacttgtagaccgaaaatcacgttatacgatcatcgttagactcaggggcaaagattctgtctcagtaaatcaggctcttaccgacaaattcctgagtttaccgtcagaactcagaaaatcactgacatgggacagaggaatggaactggccagacatctagaatttactgtcagcaccggcgttaaagtttacttctgcgatcctcagagtccttggcagcggggaacaaatgagaatacaaatgggctaattcggcagtactttcctaaaaagacatgtcttgcccaatatactcaacatgaactagatctggttgctgctcagctaaacaacagaccgagaaagacactgaagttcaaaacaccgaaagagataattgaaaggggtgttgcattgacagattgaatctacaaccgcgctcttgatgtcagactccctgaacagttctcgataatcgggaaactcagggcgcgttatcctgtggccactctctgccatgtgttcggggttcatcgcagcagctacaaatactggaaaaaccgtcctgaaaagccagacggcagacgggctgtattacgcagtcaggtacttgaactgcatggcatcagccacggctctgccggagcaagaagcatcgccacaatggcaacccagagaggataccagatggggcgctggcttgctggcagactcatgaaagagctggggctggtcagttgccagcagccgactcaccggtataagcgtggcggtcatgagcacgttgctatcccgaatcatcttgagcgacagttcgccgtaacggaacccaaatcaggtgtggtgcggtgatgtgacctatagtgtgcccggagttcagggcgggcatggatgcttaaatgaaccgcgagtctgtctggaatattgaaccggtaactcacgatgagaaacccaacaatcccaccgggtgtgacggtggagaacctgagcgccagtgacctgcggcatgcccgcagggtgatgtaacccgctgacaacggggattgaggcga

SEQ ID NO: 135750 - DNA, 446 bp, Homo sapiens
catcattacgaattcaatctcgcgacccggagatcctcctatgtcggacccgcatagctgaagcccgcttggaccacgtctccagcttcttcctctgcaaagacagaaacaaagtcactctttaatgcgtttctggtgtagactgcagtcattccctgcacatcttcaaaaccctccacactcaacagttcaaacatgacagacacctttgtatttcttcaaacgtcaccgctcagagcccagcattttgtgccaataacctcaggaacaaccagtgttttctgtaaagcagcattgtgaccacagatgcacgtatttctcccacctagacacggacataggcagtgagtcccaatgattctcagctttaactctggcctaacttcaaatttattaggccttatttgcattggaacagacttgaataaaaaccagcccactctgat

SEQ ID NO: 135751 - DNA, 4086 bp, Homo sapiens
atgacagatttggaatgtgagatgctgatgaagaggatacggtcgcctctcagtgatgagtcgtctcaatgtcacaagctgctcacacttcctggaagggagactcgggcagtgcgccttgagaagggaaggaagcaggatgcttcccagaaccggtcctcagaggcccgggcccaggtggctgcatcatcaacaccttccagaaaccctggcacgctggcactggctgtctggtgtcgcttctcctgcaatgggaaggccacaggttcagacccagcacggccaccacacgagcaggcaacttgcctggaagacgacacgatgaacccacaggactccattgaccttgacgctggcccccgtctgatcttggcagggaagggagggcaccaagaccgccaggggctgagctgccacctggtgtcggtcctggcaatgcctcattatggagaattgatgaagaaaaatggcacgtatgaggatttaaagctctccgtggtcgtacacagcccttctccttattggcctcccatgggtagcacacaggtcttcacgcaaaatcggctgcgtcgccatgagcatggagccggggaaggcgccttttcaaccccgcacgtaaggtgcttcgatgtggcaggagcaatcacagctctaattattgctgacacttgttctgggtattgtgcaaatgacttcaggataatggcaccactgcgatctagaaagacacccacagaacaacagtccctcgctcatccactccgccagtcaccggtgccatccacgcatggtgcctcttgcaggagactcacagacagtgaggaagacatgctgccctcagagctgacggtcccattttttccacgaactccaactccacgcatcagaagcacactagtcgcattctcgagcagctcaaacttcagcatggaatgttgtttcccaggcttttacagtccacagggcctctcatcagccacagatcactccctgcaaacgcccagcagcagctcggtgcaccgctgcccttcctgccggcaccgagcgtggtttatctcccaggctgccgcggggctcccttgcgcctctccggccgcgcgcgccggaggctcactcaagccagctccaaggaggaggcagtgccggagggaagaacagcctgatgccccgaacgagggtcccacgcccatccccacatccacgcacggctgcctgcagctcctactctgtgtttggggcggggagacgccgagggctacagctgtggaaggaagcgcatcccaggccgctgaagaaacactggcctgctggctgctgtcccagcgttgcccccctgcctgggctcaccctgctccaccctcagaggcctttgtgctctcagctggtgctatgcaactggaagcaggtgcctactcattggtcataatcaaagaatcaaaaaataatgttggcgtggacgtgataaaaaggaaacacttctgcactgctggtgggaatgtaaaccagtacaaccactatggaaaacactgcgtcctctcctgctccggccctgcatctggtgcacagccgctctaccgcatggctcaacccccctcccctcccaacatggcggcaggcatccctcctgctgcaaggatttcctccagcatcacctccccactcctgaagccctcgtggctgcacctgctcgcccaccccgtgctccaggcccatctgacggaggagggcctgggccgctcacaccatgttcaacgtggccagtgcctggtcagcaagtctgttttcacgaatgcttgctgggaaatgcaaaacgtgaaaaggtttactgacttcattccattacataaaaacacccgaggtcccgaacctctgtgtagaaggaggaaccaggctccaaatatggcctgcatgcagcagcactggcagcggcggaacatgctggaaagctccgcctcagccaccgaggccgcccacctcgtcttcaccctcacagctccgcctcagccaccgaggccgcccacctcgtcttcaccctcacagctccgcctcagccaccgaggcggcccacctcggtcttcaccctcagagctctgcccgaggcaccagggccgcccacctcgtcttcaccctcagagctccacctcagccacggaggccgcccacctcgtcttcaccctcacacgccgctacagtcacagccaccgaggccgcccacctcgtcttcaccctcacacgtccgcctcagccaccgaagccgcccacctcgtcttcaccctcacagctccgcctcagtcaccgaggccgcccacctcgtcttcaccctcacagctccgcctcagccaccgaggccgcccacctcgtcttcaccctcacagctccgcctcagccaccgaggccgcccacctcgtcttcaccctcacagctccgctacagtcacagccaccgaggccgcccacctcgtcttcacggcagcccagtgcagcacggctccttctctgcggcccttggtgcctctcccattcgcatcctgcatccttacagcaaggcttgtcctggcagctggtgtcatctgcacaccccctgctcccaccttctgctgaagccttgacctttccaagtgtggcccagggaccctcagcctcagcattgcccgttcagaatgcagagtgccaggcccaccctggagctcaggaacggggtctgggtgcagacaggactcagtggctgtggtgcctggaagccagcagcttggctgtgagagcctctgacatcccaggtccatgcccgctggtgccgtcccgtcccactgctcttcccaaaacgctgagctctactcccagctctgtcaaactcgagtccccctggaagctccagccccaagacaactctgagagaattcctgcagctgcctgggctggactaagcatgcctgcccatgccccagtgacccttcactctttagtccatcatggcccgaccctgtctcagaacaattaccccggaatcaccagggtgaggacttcattggtacataataaaatgaaggcagaaataaagatgttctttgaaaccaacgagaacaaagacacaacataccagaatctctgggacacattcaaagcagtgtgtagagggaaatttaccgcactaaatgcccacaaaagaaagcaggaaagatccaaaatcaacaccctaatgtcacaattaaaacaactagaaaagcaagagcgaacacattcaaaagctagcagaaggcaagaaataactaaaatcagagcagaactgaaggaaatagagacacaaaaaacccttcaaaaaattaatgaatccaggagctggttttttgaaaagatcaacaaaatagatagactgctagcaagactaataaagaagaaaagagagaagaatcaaatagatgcaataaaaaaagataaaggggatatcaccaccgatcccacagaaatacaaactaccatcagagaatactacaaacacctctacgtatataaactagaaaatctagaagaaatggataaattcctcaacacatacactgtcccaagactaaaccaggaagaagttgactctctgaatagaccagtaacaggctctgaaattgtggcaataatcaatagcttaccaaccaaaaaaagtccaggaccaaatggattcacagccgaattctaccagaggcacaaggagaagctggtaacattccttctgaaactattccaatcaatagaaaaagatggaatcctcacaaactcattttatgaggccagcatcattctgataccaaagccgggcagagacacaaccgaaaaagagaattttacaccaatatccttgatgagcattgatgcaaaaatcctcaataaaatactggcaaaccgaatccagcagcacatcaaaaagcttatccaccatgatcaagtgggcttcatccctgggatgcaaggatggttcaacatatgcaaatcaataaatgtaatccagcatataaacagaaccaaagacaaaaaccacatgattatctcaatagatgcagaaaaggcctttgacaaaattcaacaaccttcatgctaa

SEQ ID NO: 135752 - DNA, 507 bp, Homo sapiens
ctgattacgagattctatcgtccgtcccgtacatcgttttgtctgggctgaccacggggagaccctgcttattacccctgcgactcaactcgcattcagcttaaataatccgcactgttaccttctgcacatggtccaacttctttaaggaagcaaggtgtcaccctgttcagattcttcctccagagttgcttttctagatgcccaagaaaatatgtcctcctctgtgttacctgtggactgtaaaagcctgggaaacaacattccatgctgaagtttgagctgctcgagaatgcgactagtgtgcttctgatgcgtggagttggagttcgtggaaaaaatgggaccgtcagctctgagggcagcatgtcttcctcactgtctgtgagtctcctgcaagaagcaccatgcgtggatggcaccggtgtctggcggagtgaataagcgaggtacgcagtgtctgtgggcgtccttgtcgatctccgggtcgcgacatggagttgtaga

SEQ ID NO: 135753 - DNA, 1840 bp, Homo sapiens
atggtcttcaagatctctgctcgcgtcccgtgctctgccaaaatgctgcatggacatgtttctcacctcatcttcagaaccacccttggcacaaacagcatgatgaccatcctacagataaggaaaccaaggctttcattacttgccccagatcataagagccagagcctggacttgagcaagtcaagcctgcatattacggcagatggaaagctgtgcagtctgcgtgttcaaagagcatttgcaaaaggcagccaagacaggcagctgcagtcagtgactatgatgtccagagatcaccccaggctgactcttgtcctgcaaatagtggggcatgcagggggcatcaaaggggacctggattcagggtggcctgggaaacaacattccatgctgaagtttgagctgctcgagaatgcgactagtgtgcttctgatgcgtggagttggagttcgtggaaaaaatgggaccgtcagctctgagggcagcatgtcttcctcactgtctaggcttcgggccgctccccctgaccccggaggcttcgggccgctccccctgacctcggaggcttcaggctgctcccccgatcccggaggcttccggctgctccccctgatctcagaggctgtttcagaaagcaccttccccggctccatgctcatggcgacgcagccgattttgcgtgaagacctgtgtgctacccatgggaggccaataaggagaagggctgtgtacgaccacggagagctgcgggacatgcatccctggatgagaatgaagcaacggaatgggacagttagagggacggaccccagggaagacccagagacacacctgaacgtgtgtgggagccgcgagggtcctggtgaagtttcccagattctgaacgttggtttaatggtgaaggcttcacattctaatcctcctgtaagcaaaggtgtccatcagctaggaaaacgtcctatcggcaatgaaaagaagatgcagattgcagacgctcatcgtctcgcaggcagctccagctcgagtggtggccgtgctgggtctgtgcccggggccttccccccgcgtgtccatctgcaaagcacacgacagcccctgcggccactgggtgccggcgcccagcctgtcccgagagcctctgacagccaaggattggcccaggtgtggctgatggatgaaacaagactgccactccccacaccactcactgtggctggtgtcgggcagagcctccctgagatccagctgtgtctacactgcctctgcagccaggtagaaaccaaggcagcctggagagtcggcacctggtttcctgggcaaagcctccctgagatccagctgtgtctgcactgcctctgcagccagggaatgactgcagtctacaccagaaacgcattaaagagtgactttgtttctgtctttgcagaggaagaagctggagacttggtccagccgggcatcagctttccggggccggcagaggaggatctagggccctgcgagaggctgccacgacacactttccccgatgctggttcaaatcacgtggaaatttcatttctgagctgccaccagcacagcaaagctggtgccatatttgccatcagtcttttgacatggagctatgcttacaagaacaaggcccaatgcttctgttaaagatgtgaaatgttgaatacatctgacatcaaactgttgaataaaatcaacgtcaaaccacagctgaagacggaagccccatcagtggctctgtctgtggttattctctaacctaaaagaggtttgatgctgtctgtggttattctctaacctaaaagattgtcagcctctttgtcca

SEQ ID NO: 135754 - DNA, 929 bp, Homo sapiens
atctaacacttgggtggggggggtgggggcaaatgtgagatgtgcctcaaagcctgtccatgaatattggaaacccacatatgtgtgtgaatacatgcctagagtctgaacatgcaatcatatttatatttggggcatatatgccaaaatggtgacaaagatgtgtgtacgcacatgtgtcatcattctgataccccataaataacatgtttacatgcacatgtaacgtggtgccaaattctcccttatctgatgctccctgcccccctcctcaggccactccccacaccactcactgtggctggtgtcgggcagagcctccctgagatccagctgagtgtgacactgcctctgcagccaggtagaaaccaaggcagcctggagagtcggcacctggtttcctgggcagagcctccctgagatccagctgtgtgtgcactgcctctgcagccaggtataaaccataggcagcctggagagtcggcacctggtttcctgggcagagcctccctgagatccagctgtgtctgcactgcctctgcagcctggtagaaaccaaggcagcctggagagtcggcacctggtttcctgggcagagcctccctgagatccagctgtgtctgcactgcctctgcagcctggtagaaaccaaggcagcctggagagtcggcacctggtttcctgggcagagcccactgggaggagagctacgggatgatgctcagtccagctcctcagggaccagttaaatcaagtgacaagcttgtctgtctccccagttccctgttgccccacacatggagggaagacagtgctcagtgaccccaagaccttttacagccacatgctgatgtcattctaagaaagtgatgtctgcttttgtgttagcacagatcgaccaatggagaatcaatgccagtgccttgggt

SEQ ID NO: 135755 - DNA, 1170 bp, Homo sapiens
atgccatggctttccacaggcgctgctgcgttaatcacggccttagccgtagtggaactaaacgacgatgatgatcatcatcatcgcaacaattctccactcccaccgacaccccctgatgatgaatcagacgacactccagttcccccaactcctggcggagatgagataataccggacgatccggatgatacgcctacacctcccaaaccggtttcgtttaataatgacgttattctcgataaaacagaaaaaacgttaactattcgcgattcagtttttacttataccgagaatgctgacgggactatatctctgcaagatagcaatggtcgtaaggcaacgattaatctttggcagattgatgaagcgaataacactgttgcccttgaagggggcaacacctcagcctgcaggcaggcactgaagataccaaagggtagttcagattacacggtcacctggaaagggggccattttactttttatcgccgctggcggtgcaaagttcacaaagttgtcttcgaaggttcaccacccgttaccatctgccggtatgtacttaaccgcaagaatagctggcatgtcgcgcatatttttcgtcgccatgcgaagccggaagaacaggctcccatttattcccatatccatttcaccagcgatctcgacgaagtactaaacgatcccgatgttaagctggttgttgtctgcacccacgcggacagccatttcgagtacgcgaaacgcgcgctggaagccgggaaaaatgtgctggtcgaaaaaccgttcactccgacacttgcgcaggcgaaagagctgtttgcgttggcgaaaagcaaagggctgaccgtcacgccgtatcagaatcgtcgctttgactcctgcttcctgacagcgaaaaaagcgattgaaagtggcaagttgggagagattgttgaagtggaaagccattttgactattaccgcccggtggcagaaaccaaacctgggctgccgcaggatggcgcgttttatggccttggcgcactgtttaccaaccagcagggcttttttaaatcatctttgctgtcgatatttgcggattccagcagcagcgttgccggacgatccccacacaatctggtgaaaaagcgcggtgggattgtcgcgataagcgccttcgcaggttag

SEQ ID NO: 135756 - DNA, 1118 bp, Homo sapiens
atgccgggcgaaccgggattcgcagcggatgattcggtcggtgtgctggagtatgtcaatgacgagggcgtgacggtcagagaagagatgaagccggagatgggcgattacgggcgcgtttatgatgcgttgtatcaaaccatcacccacggtgcgccaaattacgtcaaggaatctgaagttcttaccaatctggaaatccttgaacgcggatttgagcaagcctctccctccacagtaactctcgctaagcagatcgggtccacactaagcccatcgaaatcattcagggggcgaatacaaatgatctacttacgcaaagcaaatgaacgtggtcatgcaaatcatggctggctggactcctggcatactttctcttttgccaactattacgatccgaactttatgggcttctccgcgctgcgcgtgattaacgacgacgtgattgaagcagggcagggcttcggcactcacccgcataaagatatggaaattttgacctacgtgctggaaggtactgttgagcatcaggacagcatgggcaataaagagcaggttccggcgggtgagttccagattatgagtgcggtcggctatcgtcctcaagtaaaccaggcgaccggcgttgcttgttcattcgaaagggtggtatcgcgctgggtttattaggcggtatcggtctggtcattctggtcttcgtcttccaccttcagccaggtaaaccaccagttgatgtcatgctggttatcattgcggtggtggcggcatcggcgaccttgcaagcttcgggcggtcttgatgtcatgctgcaaattgccgagaagctgctgcgccgcaacccgaaatatgtctcaattgtcgcgccgtttgtgacctgtacactgaccattctttgcggtacgggtcatgtggtttacaccattctgccgatcatctacgacgtcgccattaagaacaacatccgtccggaacgtccgatggcggcaagttctatcggtgcacagatggggattatcgccagtccggtgtcggttgcggtcgtgtctctggttgcgatgctggccagggagttcttgtcagagctatcagctctgatttctaagcagaagtttctgtag

SEQ ID NO: 135757 - DNA, 1519 bp, Homo sapiens
atgcgtgtatatatggacgggcggttaattgtttcgacccgacaacgcaaagtgctggctgctggtccgatgttgtatgctgctacacgtgcacctgcgtttaccatgtctggtgacaacctagtacgtagccatgctagcatatacatgacatcgtgccacacgctgctgggtgagcaggctggttatgctgtatttggtgcgctacttcctgctatcactctgctacacttgaactctgcttgctgcatcgtgtacgtatcgtgcttgctggctgatgctggtcatcgagactcacttcaacaggctggcgataaatggaccacaacggactcttattctagcagctgtacttcagagacgctcgggagtgcttgtgttcgttatgcgcactccagtaggaaccacgtccgctttgcgctaagcgatctcgacgaagtactaaacgatcccgatgttaagctggttgttgtctgcacccacgcggacagccatttcgagtacgcgaaacgcgcgctggaagccgggaaaaatgtgctggtcgaaaaaccgttcactccgacacttgcgcaggcgaaagagctgtttgcgttggcgaaaagcaaagggctgaccgtcacgccgtatcagaatcgtcgctttgactcctgcttcctgacagcgaaaaaagcgattgaaagtggcaagttgggagagattgttgaagtggaaagccattttgactattaccgcccggtggcagaaaccaaacctgggctgccgcaggatggcgcgttttatggccttggtgtgcatacgatggaccagattatttctctgttcggtcgcccggatcacgttcgtttatgacatcccggagccctgcgtaataaaagcccaatctggacgaacccctttgaagcgcaactggttttatggggaacctgaaagccatcgtcaaaaccagccatctggtgaaaatcgattatccgaaatttatcgttcacggtaagaaaggttcgtttattaaatacggtatcgaccagcaggaaaccagcctgaaggctaatattatgccgggcgaaccgggattcgcagcggatgattcggtcggtgtgctggagtatgtcaatgacgagggcgtgacggtcagagaagagatgaagccggagatgggcgattacgggcgcgtttatgatgcgttgtatcaaaccatcacccacggtgcgccaaattacgtcaaggaatctgaagttcttaccaatctggaaatccttgaacgcggatttgagcaagcctctccctccacagtaactctcgctaagtaagtttgatggcccctcgaatagttcaatttttttgaacagaggggtcaattttcaccctctatcatcccaggcagatcgggtccacactaagcccatcgaaatcattcagggggcgaatacaaatgatctacttacgcaaagcaaatgaacgtggtcatgcaaatcatggctggctggactcctggcatactttctcttttgccaactattac

SEQ ID NO: 135758 - DNA, 706 bp, Homo sapiens
ttataagaacccgtacatcgcggcgaagatccagccgaagacgcacgatacgctcacaccaatcaaccccggcagaataaagctgtggttgatgacgaagcgaccgatgtgggtggtgccggaacggtcaaactgaatcgctgccagatcgctcggataagtcggcaggatgtaataaccgtagcaagccggtgctgaagccacgatgtatgccggatcaacgccgatcgccagcgcgaccggaacaatcgccgccagcgccgcagcctgagagtttacaaacttggaaaccagcagcagaacaatggcataggcccacggatactctttcaccatttcacccagtacgccctgaatttcagacatatgcgcaccgaacatggtttctgccatccatgcgataccgtacaccgccacgatggcgatcataccggaacggaagacttcgttttttgagatagacgcgggattggttttggtcaggataataatcagcgccccggtcagcagcataaacatctgaataaccagtaccatcgacagcggtttgccgccgaaggatggacgcaggtccgaatcagcaccaagaagggcgactacagcgattgccccgaggaaaatccacattgccagccagttgctggtcgttatcattattcgctcgttggtcgggtgtcgaatgcgacgctggcgcgtcttatccgac

SEQ ID NO: 135759 - DNA, 1335 bp, Homo sapiens
ctaccaataagccagcaccggcagcgtgatatgccacagataatcggtgattatctgataccacggcagcgaatcaaaggactctagcggatccagggtaccgagcgagatcaacaggatgagtaacatggcgacattttccagacggttgatgccgacatcaatcacaattgcgccttctttgatccagtcaccgggaataaagcctggcttgccaacggcaacgatcaatagatcggcattttctacgtgatgacgcagatttttagtgaagcggtgagtcactgtagtggtgcaacccggtagcgtttcttcatcaccgccgccggtccacacgcgctggccgacgatgatcgcgtgcggtatgctggcaggtcgggacacgcctttgggcgattttcggagtttcttaagaattgcagcgccacgtacttgtcgttttcgctggcttctggatcgtgaagaatagccgcaacctgtttctggtgtgccgggcggagcataaaagaagcgtcgtgaaaggcttgctgcgccagcagggcgcagggcttctggttccactttcatgatggtttcgccgtcgaagtcggcaacgatcgcggcgaagatccagccgaagacgcacgatacgctcacaccaatcaaccccggcagaataaagctgtggttgatgacgaagcgaccgatgtgggtggtgccggaacggtcaaactgaatcgctgccagatcgctcggataagtcggcaggatgtaataacggcggaagcatggacctgcggcgatcatattaataatagtattcatcagatccaaagatgactctagagatccacggctaccgatctgcatttcctccctgtaggtcctatccagtctcactttgtttatggtcatgcgggtaagagtgcggcacagtttccgtttcgccgcagattcaggaactatatatgcatcccactcaacgtaagctgatgaagagaataattctgtttctgtcattactgttttgcatcgcctgtccagccattgctggacagatattgaccttgttgccaatgtaaaaaacagcacctggctgcacgtttcggcaaatctggtttcatcaacaaagaaggtacccgtcctgcggtggttatcccaaccaacgaagaactggttatcgcgcaagacgcgagccgcctgactgcctgatttgccgaaacgtgcagccaggttgcgttcatgatcaacttcaaagccaagcacgcccagtttgcccagagacagttcacgaaccattgcggcattttcaccgataccaccagtgaatacaacagcgtccagacgaccatccat

SEQ ID NO: 135760 - DNA, 516 bp, Homo sapiens
ttaggtaatcgtcacctccacaaagagcgactcgctgtataccgttggcatgctagctttatctgttcgggcaatacgatgcccattgtacttgttgtctttcacgccgtgtgctgctttgattttacgcagcaggtcagacgcgtcacggccaatgccttcagcggtaacttcgattgcctggatcctcccaacttcccgcaggggcgcgttaccgatcaccgcatcaacctgacgctctaccgcctggatgaagtgatggaaggtaagctggatatgctgattgaaccgattatccaggaacatcaggccgaccaactggcggcgttgtccgagcaggaataatggaatatcaacacgtgcaggcgataggtgagcaactgtttttatcctgaccagttcatccggcatttccccagctggaggccctggccccaggaactgtacctggcccaggacaggtaggacatcggagtccgagaacgaccagaaaatgtagggggttgcaaaggccat

SEQ ID NO: 135761 - DNA, 1293 bp, Homo sapiens; identical to SEQ ID NO: 132227

SEQ ID NO: 135762 - DNA, 1371 bp, Homo sapiens; identical to SEQ ID NO: 127850

SEQ ID NO: 135763 - DNA, 1116 bp, Homo sapiens
ttagcaaagatggccgcatttcatcgcgcaagttgtatgcattgaccgggccatctggcaggaatcattctggtgctgacgctgatggtgacctcgaaagggattgctggcgtgcctggcgtgtcgtttgtggtgttgctggcaacgctgggtagcgtaggtattccgctggaaggtctggcgtttattgctggtgttgaccgtatcctcgacatggcgcgtactgcgctgaacgtggtgggtaatgcgctggcggtgctggtgattgccaagtgggaacacaaatttgaccgtaagaaagcgctggcttatgagcgtgaagtgctgggcaaatttgataaaactgcggatcaataattgaagattgccggggatatccacccggcaatgtgtgaatgcctgatgcgacgcttgccgcgtcttatcaggcgccgcatccgacatcaacgcctgatgcgacgcttgccgcgtcttatcaggcctacgccagacagcgcaatagcctgatttagcgtgattttgtaggtcggataaggcgtttatgccgcatccgacatcaacgcctgatgcgacgcgtaacgcatctattatgagaccctgattcatggaaggaacagcttgacgcagatgcatactttccgtggtgatcggcagttcgccgcaaatgtggctgaatctgcaaaacgcctggagtctggcagaggcagaaaaaacagtggatgtgtcgcgattacgccgtccgtgacggcgctgaagacgcacaagacgatctggtgccgtcaatccaggacgatggctgcgaaagcggcgcatgtaagatctgatattgagatgccggatgcggcgtaaacgccttatccggcctacggctcggtttgtaggcctgataagacgcgccagcgtcgcatcaggctccgggccggatgcagcgaccttatccggcctacggctcggatttagcataagacgcgccagcgtcatcagacaggatgcggcgtaaaatgccttatccgcattaaactcccacaggacacactcggcatataccacgtgacgatcagcaaaacattcgaagcgatcgacgctcttttctggcgtccgagaagtatccggcat

SEQ ID NO: 135764 - DNA, 2186 bp, Homo sapiens; identical to SEQ ID NO: 127320

SEQ ID NO: 135765 - DNA, 1851 bp, Homo sapiens
tcaagaaccacccagttccctttcagcaacgtcaacgccgtcgaggtaatctttaaccagacgaaccgggttagacagtttgtctttcaggtagttaacaaccggcagcagagagaattcttcgttgtactcgccttcggtaggacgacccaggtgggaagttaccatcacttttgcgccttgtttcagggccagttcgatggtcggcagagaagcacggatacgcgcgtcgctggttactttcccgtcttttactggtacgttcagatccgcacggataaatacacgtttcccagcaagatccagatcggtcatcttaattacagacatggtgaatcctctcgttgattctaaaagttttgcagacgctgcttgcgtcttaccttgtgctgctttttgcagcaacaggttgacttcattggcttttacaggtttcttcaccgtcacgcttaaatcgattgccgtcacatttatggttggcacacgtaccgcaatcgcttcaaagcgatcgttaaattgcggaaaaaatcgtgtgataccggcggccagtttagtatcgaccggaatgatcgactggctggctgcccggttgcgacgcaggtcaggatggtatgcatcaataacctgttgatcgtgcatggcggagtgaattgtggtcacagtgccggactcaataccgtacgcatcatctaacaatttgatgacgggaattatgcaattcgtggtacaggaagcgttagaaacgatgcggtgttccgcacgaagttgatcctgattgacgccgtaaacaacggtcgcgtcgagatcgttactgccaggatgtgaaaagagcacttttttggccccggcggcaatatgcgcttcgccatgctcgcgggagccatatacgccggtgcagtcgaggactacatcaacgccaagttcacgccaggggagcgattgcagtgaacgttcatgcaatacgcggatggcgtcatcaccaacaaaaagttgatcgcgttcctgtcgtacttcccatgcaaatcggccatgggtcgtgtcagatccctgacgttttttcagctccatagaccccgcctggtcgcggtcaatcacgcggccctgacgttcactggtggtggaaaccagcatctcttcgatgatttccggcagtgtttgtgcatttgactccaccgcaccggtcagcggccagcagcccagcgtacggaaacgcaccatccgttttttaatcacttcgcccggttgcaggtcgatacggttgtcatcaatcatcatcaacataccgtcgcgttccagaaccggacgttccgcagcgagatatagcggaacaatgtcgatattttccagccagatgtattgccagatatcctgctcggtccagttagagagcgggaagacgcggatgctttcgcctttgttaatttgcccgttgtagttgtgccacagctccgggcgctgatttttcggatcccagcgatggaagcggtcacggaaagagtaaattcgctctttagcgcgggatttctcttcgtcacggcgcgcaccaccgaaggcggcatcaaaaccgtatttgttcagcgcctgtttcaggccttcagttttcataatatcggtatgtttcgcgctgccgtgcacgaatggattaatccccatcgccacgccttccgggtttttatgcaccagcagttcgcagccgtaggctttagcagtacgatcgcggaactcatacatctcgcggaatttccagccggtatcgacatgcagcaacgggaaaggcagcgtacctggataaaacgccttgcgcgccagatgcagcatgacgctggaatctttaccgatagagtagagcat

SEQ ID NO: 135766 - DNA, 3496 bp, Homo sapiens
atgctggcggcttacgtcttcccaggcagaaatttatcgttaacagtagacgcagacccacaggcggaaattagcagcaaagaaacgctggcggagaatctgacatcattaacactttccaatggtgccagggttattctggcaaaatccgcgggtgaagagcaaaagctacaaattattgccgtatcgaataaaggcgatttaagtttccctgcgcagcaaaaatcacttatcgcgctggcaaataaagcagttagcggaagcggcgttggcgaactctcctcttccagcctgaaacgctggagtgcggaaaattcggtaaccatgagcagtaaagtcagtggcatgaatacgttgctctccgttagcgcgcggactaataaccctgaacctggttttcagttgattaaccagcgaatcacccacagcacgattaacgataatatttgggcatcgctacaaaatgctcaaattcaggcgttgaaaacgctcgaccagcgtccagcggagaaattcgcccagcagatgtatgagacgcgctatgctgatgaccgcacgaaattactgcaagaaaatcagattgcacagtttactgccgcagaggaaagcacaatggaagcattaggaatgatcgaaacccggggcctggttgcactgattgaggcttctgacgcgatggtgaaagctgcgcgcgtcaagctggttggtgttaagcagattggcggcggcctgtgtactgccatggttcgtggtgatgttgcagcctgtaaagccgcgaccgatgcaggtgccgcagcggcacagcgtatcggcgagctggtatctgtacacgttatcccgcgtccgcacggcgacctggaagaagtcttcccgatcggcctgaaaggcgatagcagcaacctggggagcttttacctgaaatacgccacggaggcgggtatgaaactggcagtcgtcactggacaaattgtttgtaccgtacgccatcacggactggcgcatgacaaattgctgatggtggaaatgattgatccacaaggtaatcctgacgggcaatgcgccgtcgccatcgacaatattggcgcgggaaccggggagtgggtgttactggtgagtggcagttccgcccgccaggcgcataaaagcgaaacgtcaccggtcgatctgtgcgtgattggcattgtcgatgaggtggtgtctggcggtcaggatattgaacaggtggtgaaagcggtactgctgaaaatgcaaagcagtgacacgccgtccgccgccgttcatgagatgggcgttttcgcgtccctggatgacgccgttgcggcagccaaagtcgcccagcaagggttaaaaagcgtggcaatgcgccagttagccattgctgccattcgtgaagcaggcgaaaaacacgccagagatttagcggaacttgccgtcagtgaaaccggcatggggcgcgttgaagataaatttgcaaaaaacgtcgctcaggcgcgcggcacaccaggcgttgagtgcctctctccgcaagtgctgactggcgacaacggcctgaccctaattgaaaacgcaccgtggggcgtggtggcttcggtgacgccttccactaacccggcggcaaccgtaattaacaacggtaccgagctacagaattcgtatcattgcgaatacatgccaggcgtgatgcgcattccagagaaacatctggcacgcgaaattgaacgcatcgccaacgccggtattcgttccgtgatgacttttggcatctctcaccataccgatgaaaccggcagcgatgcctggcgggaagatggactggtggcgcgtatgtcgcgcatctgcaagcagaccgtgccagaaatgatcgttatgtcagacacctgcttctgtgaatacacttctcacggtcactgcggtgtgctgtgcgagcatggcgtcgacaacgacgcgactctggaaaatttaggcaagcaagccgtggttgcagctgctgcaggtgcagacttcatcgccccttccgccgcgatggacggccaggtacaggcgattcgtcaggcgctggacgctgcgggatttaaagatacggcgattatgtcgtattcgaccaagttcgcctcctccttttatggcccgttccgtgaagctgccggaagcgcattaaaaggcgaccgcaaaagctatcagatgaacccaatgaaccgtcgtgaggcgattcgtgaatcactgctggatgaagcccagggcgcagactgcctgatggttaaacctgctggagcgtacctcgacatcgtgcgtgagctgcgtgaacgtactgaattgccgattggcgcgtatcaggtgagcggtgagtatgcgatgattaagttcgccgcgctggcgggtgctatagatgaagagaaagtcgtgctcgaaagcttaggttcgattaagcgtgcggggggcgaggggaccgtccactctcgtattaccccgcccgataaaacggtttatccccaaggatcgtcgcccgatgcattatccgtcgctgtggcagtcttcagacaatatgcgctacgcggtaaaaccgctgctcgcctgtttgatctgttacaccttttacagcggcgtggactgggaaggcattcacacctgtatgctgacatgcgtgatcgtcgctaacccaaatgtggggttgccgtacctagaacatggccgctgcgtttcgacggggccttttgcggagcgactctggcgctgcaatttacgctactggacatgccctggctggacaatattgtcgaattgctgtttgtgctggcaccgattttcctgttgggcgcatggattgccaccagctctgaacgctcttcttatatcggcacacagatggtggtcaccttcgcgctcgccacgctcgaaaacgtttttggcccagtgtacgacctggtggaaattcgcgatcgcgccctgggtatcatcattggtaccgtggtgtccgcggtgatttacacctttgtctggcctgaaagtgaagcgcgcacactgccgcaaaaactggctggcacgctgggtatgttaagtaaagtaatgcggatcccacgccagcaggaagtcacggctctgcgcacttatctgcaaattcgtatcggtctgcatgcggcgtttaatgcctgtgaagagatgtgccaacgcgtggcgctggagcgtcaactggacagcgaagaacgcgcattactgattgaacgttcgcaaacggttattcgtcagggccgcgatcttcttcacgcctgggattgccacctggaactcggcgcaggcgctgataaggtaccgagcagaattgtatcactatatggtgccggtgaaagaactgacgggaacggtcactttccgccatttgctgcgcttctcgcaaaaagggcaattcgttctgcctcctgctcgttatgtgcgttcctatgcacctgcgcagcaaagtgttgcggcagggagtgcatggaccgggatgcaggtgaaataa

SEQ ID NO: 135767 - DNA, 3202 bp, Homo sapiens
ttatatgtctttcttccgctctctgggcgagtctgaaaaggtaaatgtcgaagtactgacagaattctctttatgaatggcgtactcttccggcacatcgtggatcaatgctttacccagcaatgccatatcgcgcgcggtgctgaactgccccggcgcatccaggccgtgcaccgtctggaaggtagtgttggtcagacccagttttttggcataaccattcatcagaccaataaatgactcctggctcccggcaacgtaatcagccagcgcaatacaggcgtcattaccggactggataatcacacctttgttcaagtctgccaccgaaacctgatcgcccggtttgaggaacattaccgatgaaccacgcagtgccggatttcccgtcgcccaggcatctttaccgaccgtcaccatatcggtgagtttaatcttatcggccttaagcgcctgcccaaccacatagctggtcatgattttagtcaggctcgcgggatccagtttctcatccgcattgccttctgccagcactttaccgctggcgtaatccattaaaatccatgcacgcgcatccacgctcggcgcttcaacggtttgttccgccgcgaatgccgttggggcaaaaaggactacaaatgcagaacccgctttcaaaaaccaggcattcaaaaacggcgaattcatcgaaatcaccgaaaaagataccgaaggccgctggagcgtcttcttcttctacccggctgactttactttcgtatgcccgaccgaactgggtgacgttgctgaccactacgaagaactgcagaaactgggcgtagacgtatacgcagtatctaccgatactcacttcacccacaaagcatggcacagcagctctgaaaccatcgctaaaatcaaatatgcgatgatcggcgacccgactggcgccctgacccgtaacttcgacaacatgcgtgaagatgaaggtctggctgaccgtgcgaccttcgttgttgacccgcagggtatcatccaggcaatcgaagttaccgctgaaggcattggccgtgacgcgtctgacctgctgcgtaaaatcaaagcagcacagtacgtagcttctcacccaggtgaagtttgcccggctaaatggaaagaaggtgaagcaactctggctccgtctctggacctggttggtaaaatctaaatttccttcgtcttcgccagtggcgatgatgatctgcttgtacggaaccgtcgtacagtcacccgctgcgaacacgcctttcacgttggtttcgcatttcgcatcaatgataatctcgcccatgcggttacgttcgactgcgccttcgagccagttggtgttcggcagcagaccaatctggacgaaaataccggccagttcgatgttgtgaatatcgccgctgacacgatctcgatattccagaccaacgactttgctgccgtcgcctttcacttccgtggtttgcgcattcagaataatgtcgacgtttttcaggctgcgcagtttgtcctgcagaacctggtcggctttcatttctggcgcaaattccagcagcgttacgtgctcaacgatacccgccaggtcaattgccgcttccacgccggagttaccgccgccgataaccgctacgcgtttacctttaaacagcgggccgtcgcagtgcgggcagtaggtcacgcctttggtgcgatactgatcttcgcccggaacgttcatgttgcgccattttgcaccggtcgccacgataatgctgcgtgctttcagtaccgcgccagaagctgacttttcttcacttaaatcataggtcattgcatgccccccgattgtgaaaacgcctgggatattaatctcatcagctacagaatggataagatcactttcggggtataaatttatatcaaccaaaccttgcggatctacatttatgaccggattcaacggatactgataaaaattccatccccccttcagtccaatcggatcctgagtgatataccgccccagcagcgggtcataatagcggtggcggttgtaatacaggccggactcctcatcatactgctgacccggcaggcgaatgagctgctgcagatgatgcgggttctcatcactcagcaggttgccccattcatcatattctgcgcaccacgctgttgccccttccgtgctgatgagcgccagcggcaggccgcgatggtcgcagtggtacaggtggatttttcgcgccggcgtgtacaccgggtccatctggtttatcatctgctccacggtcaggccgcacgatgccagccagcggcggctttcctcactcacccggtcagccaggatttcactttccagccggtcgagcatctgcaccgtgccggcgggaatcccccactggtggtcctcatcagacaggagcgtaaagttaagcagctctttttccgcaaaacgggagagtttttcgggtttatcggtgctgatacccagcacatcaacgcccgcttttttcaactcatccatgttatcgcgtaagccgcaggcctgtacggtacagccgggggtcatggctttcgggtagaaataaaccagaacacgctgtccctggaagtcggtcaaattaacttgttctccgtcttgatccggcaagttaactccatcctgttcatcatgttgggaataattgacgacgttaatactgccttgtgcattgagttctgtacatagggctttgaacgcttgctcaatatttgctgcgtccgcagatgcggggctgtgggcggttatctgaatatgcaactgcgcagcccgttcattttcagcaggttgcgtgcgcgacaccagctccgcaatgttcatatgatgcgcgtcgaaaagtgctgtgaagcgttcaattaaatgcggggagtctgccacatcgacctgaacccagacagatgctggcattggcggacgcggacgcgccgtcgtgcgcttcatcacgattaaaagatccagttcggcacctttcaacggtaacgttgattcaatcagagtaatggcattccatgaaccggaaagcagcataataaagcgtgactcttctcccagcatatcgcccgctgtggtggagcacactgggccagtcactgatgaagcacggagaatggcaggaagcatcgctcgccttccgcgcagcgctgaaacaacgtccggacgcctacgattacgcat

SEQ ID NO: 135768 - DNA, 2964 bp, Homo sapiens
atgcacgatcaacaggttattgatgcataccatcctgacctgcgtcgcacccgggcagccagccagtcgatcattccggtcgatactaaactggccgccggtatcacacgattttttccgcaatttaacgatcgctttgaagcgattgcggtacgtgtgccaaccataaatgtgacggcaatcgatttaagcgtgacggtgaagaaacctgtaaaaaccgatgtgggtggtgccggaacggtcaaactgaatcgctgccagatcgctcggataagtcggcaggatgtaataaccccacctggctgcgttttcgagaaggcgctgacgttattgatcgccagcggaagaaatgatacactagcacgtcaaaacaatcacacaaaagagtcgctagtggaaaagccatttcgaaaaatcctggtcataaagatgcgatatcatggggatatgttattaactactcctgtcatcagtacgctcaagcagaattatcctgatgcaaaaatcgatatgctgctttatcaggacaccatccctattttgtctgaaaacccggaaattaatgcgctctatgggataagcaataaaggtgcgggaactttcgataaaattaaaaatgtgctttcgttgataaaaactctgcgtgcgaataattatgacctggtcattaatcttacggatcagtggatggtggcgctgctggtacgttgtttacctgcacggatgaaaatatcgcaactttatggtcatcggcagcatggtatttggaaaaaaagcttcacacacttagcgccaatacacggtacacatattgttgagcgtaatttatcggtccttgagccattaggtattaccgatttctacaccgacacaacaatgagttacgccgaagattgctggaagaagatgcgccgggaattagatgccctgggcgtaaaagatcattatgtggtcatccaaccgacagcgcgtcagatatttaagtgtcgggataacgacataatttctaaggttatctgtatgatcagaggatcccctaccgaaggccgctggagcgtcttcttcttctacccggctgactttactttcgtatgcccgaccgaactgggtgacgttgctgaccactacgaagaactgcagaaactgggcgtagacgtatacgcagtatctaccgatactcacttcacccacaaagcatggcacagcagctctgaaaccatcgctaaaatcaaatatgcgatgatcggcgacccgactggcgccctgacccgtaacttcgacaacatgcgtgaagatgaaggtctggctgaccgtgcgaccttcgttgttgacccgcagggtatcatccaggcaatcgaagttaccgctgaaggcattggccgtgacgcgtctgacctgctgcgtaaaatcaaagcagcacagtacgtagcttctcacccaggtgaagtttgcccggctaaatggaaagaaggtgaagcaactctggctccgtctctggacctggtagccgcagaggccgcttgcatgatgatgtttaaagcccaggagataaacatgctcgacacaaatatgaaaactcaactcaaggcttaccttgagaaattgaccaagcctgttgagttaattgccacgctggatgacagcgctaaatcggacgaatccacggacctgctgggaattgtggcgcgcctgtgcgggttaagcgtctggatcctgattcgtattctgaaagatgagctgattctggcgtactccactgccagctctgaaagcgtgctgccgcgaattattgagaagatggaagcctacggagcaccggtgtcgatcaccagtttcgtggtgccgaccggttactcttttaaccttgatggttcgacgctgtatcaaagtattgccgctatcttcatcgcgcagttgtatggcattgacctgtccatctggcaggaaatcattctggtgctgacgctgatggtgacctcgaaagggattgctggcgtgcctggcgtgtcgtttgtggtgttgctggcaacgctgggtagcgtaggtattccgctggaaggtctggcgtttattgctggtgttgaccgtatcctcgacatggcgcgtactgcgctgaacgtggtgggtaatgcgctggcggtgctggtgattgccaagtgggaacacaaatttgaccgtcggataaggcgtttacgccgcatccgacatcaacgcctatgcacgctcccctttctttcggttgcggatcgcgcgccagcaccagcatatacgggtactctttcgcaccggttttttgtccgagattttactgcacgctactgcgatgcgtggcatgaagagcataaaagctggccgttaagtgaggaactgtacggtgttccttcaccgtgcattatttcaactaccgaagatgccgtatactggcaaccccagccgtttaccggggaacaaaatgtaaacgcggttgaacgcgcttttgatattgtgatacaacccacaattcataccttttatacgactcagtttgccggggatatgcacgcgcagtttggcgatatcaaactgacattgctgcaaacctggagtgaagacgacttccgtcgggtgcaggaaaatctgattggtcatctggtgactcagaaaaggctaaaactgccgcccacactatttatcgcgacgctggaagaagagttagaggtcatctcgggtaatattgtcgaattgctgtttgtgctggcaccgattttcctgttgggcgcatggattgccaccagctctgaacgctcttcttatatcggcacacagatggtggtcaccttcgcgctcgccacgctcgaaaacgtttttggcccagtgtacgacctggtggaaattcgcgatcgcgccctgggtatcatcatttatagagcagcggcgttaacggataacgtctggcggtggcaagcagtagctgcacgacaataa

SEQ ID NO: 135769 - DNA, 1272 bp, Homo sapiens; identical to SEQ ID NO: 134354

SEQ ID NO: 135770 - DNA, 1116 bp, Homo sapiens
atgaacatgaacatcaaaaaaattgtaaaacaagccacagttctgacttttacgactgcacttctggcaggaggagcgactcaagccttcgcgaaggaaaatacccaaaaggcatccaaagaaccctggccgctgctaaacgctgtcggaacagtatctgaatactacggctatcacgttgtgtatgctcttgcgggaagcccgaaagacgctgatgtcacatcattctacatgttttatcaaaaggtcggcgacaactcaatcgacagctggaaaaacgcgggccgtgtctttaaagacagcgataagttcgacgccaacgatccgatcctgaaagatcagacgcaagaatggtccggttctgcaacctttacatctgacggaaaaatccgtttattctacactgactattccggtaaacattacggcaaacaaagcctgacaacagcgcagacaaaggccataaataccttgtattcgaagccaacacgggaacagaaaacggataccaaggcgaagaatctttatttaacaaagcgtactacggcggccggcacgaacttcttccgtaaagaaagccagaagcttcagcagagcgctaaaaaacgcgatgctgagttagcgaacggcgccctcggtatcatagagttaaataatgattacacattgaaaaaagtaatgaagccgctgatcacttcaaacacggtaactgatgaaatcgagcgcgcgaatgttttcaaaatgaacggcaaatggtacttgttcactgattcacgcggttcaaaaatgacgatcgatggtattaactcaaacgatatttacatgcttggttatgtatcaaactctttaaccggcccttacaagccgctgaacaaaacagggcttgtgctgcaaatgggtcttgatccaaacgatgtgacattcacttactctcacttcgcagtgccgcaagccaaaggcaacaatgtggttatcacaagctacatgacaaacagaggcttcttcgaggataaaaaggcaacatttgcgccaagcttcttaatgaacatcaaaggcaataaaacatccgttgtcaaaaacagcatcctggagcaaggacagctgacagtcaactaa

SEQ ID NO: 135771 - DNA, 927 bp, Homo sapiens; identical to SEQ ID NO: 133327

SEQ ID NO: 135772 - DNA, 2079 bp, Homo sapiens
atgaacatgaacatcaaaaaaattgtaaaacaagccacagttctgacttttacgactgcacttctggcaggaggagcgactcaagccttcgcgaaagaaaataaccaaaaagcatacaaagaaacatccctaaacagcagcaaaacgaaaaataccaagtgcctcaattcgatcaatcaacgattaaaaatattgagtctgcaaaaggacttgatgtgtgggacagctggcgctgaaaacgctgacggaacagtagctgaatacaacggctatcacgttgtgtttgctcttgcgggaacccgaaagacgctgatgacacatcaatctacatgttttatcaaaagctggaaaaacgcgggccgtgtctttaaagacagcgataagttcgacgccaacgatccgatcctgaaagatcagacgcaagaatggtccggttctgcaacctttacatctgacggaaaaatccgtttattctacactgactattccggtaaacattacggcaaacaaagcctgacaacagcgcaggtaaatgtgtcaaaatctgatgacacactcaaaatcaacggagtggaagatcacaaaacgatttttgacggagacggaaaaacatatcagaacgttcagcagtttatcgatgaaggcaattatacatccggcgacaaccatacgctgagagaccctcactacgttgaagacaaaggccataaataccttgtattcgaagccaacacgggaacagaaaacggataccaaggcgaagaatctttatttaacaaagcgtactacggcggcggcacgaacttcttccgtaaagaaagccagaagcttcagcagagcgctaaaaaacgcgatgctgagttagcgaacggcgccctcggtatcatagagttaaataatgattacacattgaaaaaagtaatgaagccgctgatcacttcaaacacggtaactgatgaaatcgagcgcgcgaatgttttcaaaatgaacggcaaatggtacttgttcactgattcacgcggttcaaaaatgacgatcgatggtattaactcaaacgatatttacatgcttggttatgtatcaaactctttaaccggcccttacaagccgctgaacaaaacagggcttgtgctgcaaatgggtcttgatccaaacgatgtgacattcacttactctcacttcgcagtgccgcaagccaaaggcaacaatgtggttatcacaagctacatgacaaacagaggcttcttcgaggataaaaaggcaacatttgcgccaagcttcttaatgaacatcaaaggcaataaaacatccgttgtcaaaaacagcatcctggagcaaggacagctgacatggctccaagtagcgaagcgagcaggactgggcggcggccaaagcggtcggacagtgctccgagaacgggtgcgcatagaaattgcatcaacgcatatagcgctagctgtggaatgtgtgtcagttagggtgtggaaagtccccaggctccccagcaggcagaagtatgcaaagcatgcatctcaattagtcagcaaccagaaatcggaggaagaagaatatatgaaaacatttaacatttctcaacaagatctagaattagtagaagtagcgacagagaagattacaatgctttatgaggataataaacatcatgtgggagcggcaattcgtacgaaaacaggagaaatcatttcggcagtacatattgaagcgtatataggacgagtaactgtttgtgcagaagccattgcgattggtagtgcagtttcgaatggacaaaaggattttgacacgattgtagctgttagacacccttattctgacgaagtagatagaagtattcgagtgattccaacctatggaactgatgaatgggagcagtggtggaatgcctttaatgaggaaaacctgttttgctcagaagaaatgccatctagtgatgatgaggctactgctgactctcaacattctactcctccaaaaaagaagagaaagtacatctacgtattagtcatcgctattaccatggtgatgcggttttggcagtacatcaatgggcgtggatag

SEQ ID NO: 135773 - DNA, 3963 bp, Homo sapiens
tactctatagctacggttctggcagcggaggaaaagctagatcccagaagagatgaggcaaaacgcctgaggccgcagcgcaacttcaatatcacattcacccacgggacggtttttcgccctttgacgttggagtccacgttctttaatagtgcactcttgttcaccaccatcaaacaggaccttcccccactgcccaagaccatcatcactaacgcatttcaccgatttcggaaccaccatcaaacaggatttaagctgtctgcggcaaaccagcgtggaccgcttgctgcaactctctcagggccaggcggtgaaggacaatcagctgttgcccgtctcactggtgaaaagaaaaaccaccctggcgcccaatacgcaaaccgcctctccccgcgcgttggccgattcattaatgcagctggaacgacaggtttcccgactggaaagcgcgcaaggagcgactcaagcctcgcgaaagaaaataaccaaaaagcatacaaagaaacgtacggcgtctctcatattacacgccatgatatgctgcagatccctaaacagcagcaaaacgaaaaataccaagtgcctcaattcgatcaatcaacgattaaaaatattgagtctgcaaaaggacttgatgtgtgggacagctggccgctgcaaaacgctgacggaacagtagctgaatacaacggctatcacgttgtgtttgctcttgcgggaagcccgaaagacgctgatgacacatcaatctacatgttttatcaaaaggtcggcgacaactcaatcgacagctggaaaaacgcgggccgtgtctttaaagacagcgataagttcgacgccaacgatccgatcctgaaagatcagacgcaagaatggtccggttctgcaacctttacatctgacggaaaaatccgtttattctacactgactattccggtaaacattacggcaaacaaagcctgacaacagcgcaggtacacaataagccttccgaagatctccaaacttgttccctcaatcttggacacattctgcccattatcaagtttaatgatgacagcccggaagcgaggaaaataacccggcgctggagaataggtgaagcagcggatttagttggggtttcttctcaggctatcagagatgccgagaaagcagggcgactaccgcacccggatatggaaattcgaggacgggttgagcaacgtgttggttatacaattgaacaaattaatcatatgcgtgatgtgtttggtacgcgattgcgacgtgctgaagacgtatttccaccgtttaatgatgacagcccggaagcgaggaaaataacccgccgctggagaataggtgaagcagcggatttagttggggtttcttctcaggctatcagagatgccgagaaagcagggcgatctaccgccacccggatattggaaattcgaggacgggttgagcaacgtgttggttatacaattgaacaaattaatcatatgcgtgatgtgtttggtacgcgattgcgacgtgctgaagacgtatttccaccggtgatcggggttgctgcccataaggagttaaataatgattacacatcgaaaaaagtaatgaagccgctgatcacttcaaacacggtaactgatgaaatcgagcgcgcgaatgttctcaaaatgaacggcaaatggtacttgttcactgattcacgcggttcaaaaatgacgatcgatggtattaactcaaacgatatttacatgcttggttatgtatcaaactctttaaccggcccttacaagccgctgaacaaaacagggcttgtgctgcaaatggctcttgatccaaacgatgtgacattcacttactctcacttcgcagtgccgcagaccaaaggcaacaatgtggttatcacaagctacatgacaaacagaggcttcttcgaggataaaaaggcaacatttgcgccaagcttcttaatgaacatcaaaggcaataaaacatccgttgtcaaaaacagcatcctggagcaaggacagctgacatggctccaagtagcgaagcgagcaggactgggcggcggccaaagcggtcggacagtgctccgagaacgggtgcgcatagaaattgcatcaacgcatatagcgctagcagcacgccatagtgactggcgatgctgtcggaatggacgatatcccgcaagaggcccggcggtagcatgccagttccctgagaaaaacgactttcgcttctctggttttctgtctacgaagagtgactgccacatagtaggccctcaaccaatatttgctgaacataatcaagcagagggatgtagacttgaacacttttgctccacccccacccttgtgtccatgctcaattttcttggacgcaggacaaagaagccaggtactagttcagagaacaagaaactgctacattacggtgcattggcaaaactacaaccatatttcggtgcaggaagaagggatcatcagaagggtggacgcggatctgtcaacatgggtaaaggagaccccaacaagccgcggggcaaaatgtcctcgtacgccttcttcgtgcagacctgccgggaagagcacaagaagaaacacccggactcttccgtcaatttcgcggaattctccaagaagtgttcggagagatggaaggtattggagaaaagtaaatcccaaatgtcagtggacaatttttctctagttggaagactcctttgcaatcctagaagtaggtatggacagagggcactgggaatgccagtagggccaggcggtgaagggcaatcagctgttgcccgtctcactggtgaaaagaaaaaccaccctggcgcccaatacgcaaaccgcctctccccgcgcgttggccgattcattaatgcagctggcacgacaggtttcccgactggaaaagcgggcagtgagcgcaacgcaattaatggccaaggcggtgaaagggcaatcaagtcttttgcccgtttcattggtgaaaaagaaaaaccaccctggcgccctaatacgcaaaccgcctctccccgcgcgttggccgattctattaattcagctggcacgacaggtttcccgactggaaaccggtcagtgagcccaacgcaattaatgtttgtgtggaattggggagcggataaccaatttcacacaggaatcggctatgaccatgtttacgaatttcgagctcggtacccattcttatttggtctaagacaaggattttgccgatttcggaaccaccatcaaacaggattttcgcctgctggggcaaaccagcgtggaccgcttgctgcaactctctcagggccaggcggtgaagggcaatcagctgttgcccgtctcactggtgaaaagaaaaaccaccctggcgcccaatacgcaaaccgcctctccccgcgcgttggccgattcattaatgcagctggcacgacaggtttcccgactggaaagcgggcagtgagcgcaacgcaattaatggattttgccgatttcggaaccaccatcaaacaggattttcgcctgctggggcaaaccagcgtggaccgcttgctgcaactctctcagggccaggcggtgaagggcaatcagctgttgcccgtctcactggtgaaaagaaaaaccaccctggcgcccaatacgcaaaccgcctctccccgcgcgttggccgattcattaatgcagctggcacgacaggtttcccgactggaaagcgggcaacgacgggatttagtaccgcctggggccaaacaccagcttgggcagcaaaacaaaggcgcctccattccagaagagctgccgggctgcaagaaaactactctgggccctcagtgcgacggtcccctttgtttcgtgtcccggtcgcagaggagaaggaagagggaagactgcgcgggagagacgcaggcagcggggggatcctctagagtcgacctgcaggcatgcaagtaa

SEQ ID NO: 135774 - DNA, 1611 bp, Homo sapiens; identical to SEQ ID NO: 116326

SEQ ID NO: 135775 - DNA, 3288 bp, Homo sapiens
atggggcgggggccgcccgcagggccgggcggggctgtgctgccatctggagccgctgccgccggcggccactgtcagggcgcgagcggctggagcgcacgcagggctggagcgagtgcagccgccgccgccgccgacaccgcggcacatgggccggccccgccgctgccgtcgcccctagccccagcagccctggtctcgcagcctcctgcggctctggtcgcccgaccagccatgtctctcggcggagcctccgagcgcagcgtcccggccaccaagattgaaattaccgtgtcctgccggaacctgctagaccttgataccttctccaagtccgaccccatggtggtgctttacacgcagagccgggccagccatgagtggcgggagttcggacggaccgaggtgattgataacacgctgaacccagacttcgtgcgcaaattcgtcctcgactatttctttgaggaaaagcaaaatctgcgcttcgatgtgtacaacgtggactccaaaaccaacatctccaaaccggctttgcagaactttcagcggtataccggcatacagcatgtgcatcgcataggaatggcggaacgtatgtggtgtgaccggaacagagaacgtcacaccgtcagcagcagcggcggcaaccgcctccccaatccagaacattttgaggcatttcagtcagttgctcaatgtacctataaccagaccgttcagctggatattacggcctttttaaagaccgtaaagaaaaataagcacaagttttatccggcctttattcacattcttgcccgcctgatgaatgctcatccggagttccgtatggcaatgaaagacgtttctacacaatatattcgcaagaatgtgggcgtggtacgggtgaaaaacctggcctatttccctaaagggtttattgagaatatgtttttcgtctcagccaatccctgggttgagcgcattgagaagagatgtctggagctgtttggccgagactactgtttcagcgtgattccaaacacgaatggggatatctgtggccactatccccggcacatcgtgttcctggagtatgagagttctgagaaggagaaagacacgacacagctgaacttcacagtagccattgacttcacggcttccaatggtgagacacggatgagtgaaaaagtcggagggaatcctctgcagcctacctccctgcactacatgagtccctaccagctcagcgtctatgccatggccctcaaggcaaacaacaatgatgaggaccccaactgtgcgggcatcgagggtgtgctggagagctatttccagagcctgcgcacagtgcagctctatgggcccacctactttgctcctgtcatcaaccaagtggccagcaattcctggagctctgtgactctaggtactgactcagagcctgctgtggaggtgcctcaatatgtgggcatccggctcctggtagagggcttcaccatcaagaagcccatggcgatgtgtcatcggcggatgggggtccgcccagcagtccctctgctgacccagcgaggctctggggaaggcaaggactcggggacccctacccacagcctccacaccaaggcccagctgccttctccccatgtactccgacaccagggccaggtcctcagacgacagcacagcaagctggtgggcactaaggccctgtcgaccacaggcaaggccttgaggactctacccacggctaaggtcttcatttccctcccaccgaaccttgatttcaaggtggcacccagcatcctgaagccaagaaagtcaattcgggaggatcgaaacggcagatcgcaaaaaacagtacatacagaaggagacatgaacatgaacatcaaaaaaattgtaaaacaagccacagttctgacttttacgactgcacttctggcaggaggagcgactcaagccttcgcgaaagaaaataaccaaaaagcatacaaagaaacgtacggcgtctctcatattacacgccatgatatgctgcagatccctaaacagcagcaaaacgaaaaataccaagtgcctcaattcgatcaatcaacgattaaaaatattgagtctgcaaaaggacttgatgtgtgggacagctggccgctgcaaaacgctgacggaacagtagctgaatacaacggctatcacgttgtgtttgctcttgcgggaagcccgaaagacgctgatgacacatcaatctacatgttttatcaaaaggtcggcgacaactcaatcgacagctggaaaaacgcgggccgtgtctttaaagacagcgataagttcgacgccaacgatccgatcctgaaagatcagacgcaagaatggtccggttctgcaacctttacatctgacggaaaaatccgtttattctacactgactattccggtaaacattacggcaaacaaagcctgacaacagcgcaggtaaatgtgtcaaaatctgatgacacactcaaaatcaaccgagtggaagatcacaaaacgatttttgacggagacggaaaaacatatcagaacgttcagcagtttatcgatgaaggcaattatacatccggcgacaaccatacgctgagagaccctcactacgttgaagacaaaggccataaataccttgtattcgaagccaacacgggaacagaaaacggataccaaggcgaagaatctttatttaacaaagcgtactacggcggcggcacgaacttcttccgtaaagaaagccagaagcttcagcagagcgctaaaaaacgcgatgctgagttagcgaacggcgccctcggtatcatagagttaaataatgattacacattgaaaaaagtaatgaagccgctgatcacttcaaacacggtaactgatgaaatcgagcgcgcgaatgttttcaaaatgaacggcaaatggtacttgttcactgattcacgcggttcaaaaatgacgatcgatggtattaactcaaacgatatttacatgcttggttatgtatcaaactctttaaccggcccttacaagccgctgaacaaaacagggcttgtgctgcaaatgggtcttgatccaaacgatgtgacattcacttactctcacttcgcagtgccgcaagccaaaggcaacaatgtggttatcacaagctacatgacaaacagaggcttcttcgaggataaaaaggcaacatttgcgccaagcttcttaatgaacatcaaaggcaataaaacatccgttgtcaaaaacagcatcctggagccaggacagttggcagtcaactaa

SEQ ID NO: 135776 - DNA, 1477 bp, Homo sapiens
  misc_feature (1)...(1477): n = a,t,c or g
acaggaagctacagacgtagaaaccaaggcagtgagtgaagtctgtctggtggcagaggaggaggaaggaggcagcccgaaagacgctgatgacacatcaatctacatgttttatcaaaaggtcggcgacaactcaatcgacagctggaaaaacgcgggccgtgtctttaaagacagcgataagttcgacgccaacgatccggggctgaaagatcagacgcaagaatggtccggttctgcaacctttacatctgacggaaaaatccgtttattctacactgactattccggtaaacattacggcaaacaaagcctgacaacagcgcaggaggctaggcagaaaatacttgacccaatcttggctaaatctctgattgggactctagaggatccccggccgctgcaaaacgctgacggaacagtagctgaatacaacggctatcacgttgtgtttgctcttgcgggaagcccgaaagacgctgatgacacatcaatctacatgttttatcaaaaggtcggcgacaactcaatcgacagctggaaaaacgcgggccgtgtctttaaagacagcgataagttcgacgccaacgatccgatcctgaaagatcagacgcaagaatggtccggttctgcaacctttacatctgacggaaaaatccgtttattctacactgactattccggtaaacattacggcaaacaaagcctgacaacagcgcaggtaaatgtgtcaaaatctgatgacacactcaaaatcaacggagtggaagatcacaaaacgatttttgacggagacggaaaaacatatcagaacgttcagcagtttatcgatgaaggcaattatacatccggcgacaaccatacgctgagagaccctcactacgttgaagacaaaggccataaataccttgtattcgaagccaacacgggaacagaaaacggataccaaggcgaagaatctttatttaacaaagcgtactacggcggcggcacgaacttcttccgtaaagaaagccagaagcttcagcagagcgctanaaaacgcgatgctgagttagcgaacggcgccctcggtatcatagagttaaatatgattaccattgaaaaagtatttattcgcgataagctcatggagcggcgtaaccgtcgcacaggaaggacagagaaagcgcggatctgggaagtgacggacagaacggtcaggacctggattggggaggcggttgccgccgctgctgctgacggtgtgacgttctctgttccggtcacaccacatacgttccgccattcctatgcgatgcacatgctgtatgccggtataccgctgaaagttctgcaaagcctgatgggacataagtccatcagttcaacggaagtctacacgaaggtttttgcgctggatgtggctgcccggcaccgggtgcagtttgcgatgccggagtctgatgcggttgcgatgctgaaacaattatcctga

SEQ ID NO: 135777 - DNA, 1266 bp, Homo sapiens
  misc_feature (1)...(1266): n = a,t,c or g
atgaacatcaaaaaatttgtaaacgcagccccagttctgatttnacgactgcacttcgggcagaaggagcgactcaagcccttcgggaaagaaaatacccaaaaagcagacaaagaaacgtacggcgtctctcaaataacacgccatgataggcagcagacccctaaacagcagcaaaacgaaaaacaccaagacggcgacaactcaatcgacagctggaaaaacgcgggccgtgtctttaaagacagcgataagttcgacgccaacgatccgatcctgaaagatcagacgcaagaatggtccggttctgcccccttacatctgacggaaaaatccgtttattctacactgactattccgaaccggtttacgcagtttcggcttagtgaaacaaaagaaatccccaatccgtatgccatgcgtttatacgaatccctgtgtcagtatcgtaagccggatggctcaggcatcgtctctctgaaaatcgactggatcatagagcgttaccagctgcctcaaagttaccagcgtatgcctgacttccgccgccgcttcctgcagttctncgccaaccatacgctgagagaccctcactacgttgaagacaaaggccataaatactttgtattcgaagccaacacgggaacagaaaacggataccaaggcgaagaatctttatttaacaaagcgtactacggcggcggcacgaacttcttccgtaaagaaagccagaagcttcagcagagcgctaaaaaacgcgatgctgagttagcgaacggcgccctcggtatcatagagttaaataatgattacacattgaaaaaagtaatgaagccgctgatcacttcaaacacggtaactgatgaaatcgagcgcgcgaatgttttcaaaatgaacggcaaatggtacttgttcactgattcacgcggttcaaaaatgacgatcgatggtattaactcaaacgatatttacatgcttggttatgtatcaaactctttaaccggcccttacaagccgctgaacaaaacagggcttgtgctgcaaatgggtcttgatccaaacgatgtgacattcacttactctcacttcgcagtgccgcaagccaaaggcaacaatgtggttatcacaagctacatgacaaacagaggcttcttcgaggataaaaaggcaacatttgcgccaagcttcttaatgaacatcaaaggcaataaaacatccgttgtcaaaaacagcatcctggagcaaggacagctgacagtcaactaa

SEQ ID NO: 135778 - DNA, 1690 bp, Homo sapiens
cctccacaccaaggcccagctgccttctccccatgtactccgacaccagggccaggtcctcagacgacagcacagcaagctggtgggcactaaggccctgtcgaccacaggcaaggccttgaggactctacccacggctaaggtcttcatttccctcccaccgaaccttgatttcaaggtggcacccagcatcctgaagccaagaaagtcaattcgggaggatcgaaacggcagatcgcaaaaaacagtacatacagaaggagacatgaacatgaacatcaaaaaaattgtaaaacaagccacagttctgacttttacgactgcacttctggcaggaggagcgactcaagccttcgcgaaagaaaataaccaaaaagcatacaaagaaacgtacggcgtctctcatattacacgccatgatatgctgcagatccctaaacagcagcaaaacgaaaaataccaagtgcctcaattcgatcaatcaacgattaaaaatattgagtctgcaaaaggacttgatgtgtgggacagctggccgctgcaaaacgctgacggaacagtagctgaatacaacggctatcacgttgtgtttgctcttgcgggaagcccgaaagacgctgatgacacatcaatctacatgttttatcaaaaggtcggcgacaactcaatcgacagctggaaaaacgcgggccgtgtctttaaagacagcgataagttcgacgccaacgatccgatcctgaaagatcagacgcaagaatggtccggttctgcaacctttacatctgacggaaaaatccgtttattctacactgactattccggtaaacattacggcaaacaaagcctgacaacagcgcaggtaaatgtgtcaaaatctgatgacacactcaaaatcaaccgagtggaagatcacaaaacgatttttgacggagacggaaaaacatatcagaacgttcagcagtttatcgatgaaggcaattatacatccggcgacaaccatacgctgagagaccctcactacgttgaagacaaaggccataaataccttgtattcgaagccaacacgggaacagaaaacggataccaaggcgaagaatctttatttaacaaagcgtactacggcggcggcacgaacttcttccgtaaagaaagccagaagcttcagcagagcgctaaaaaacgcgatgctgagttagcgaacggcgccctcggtatcatagagttaaataatgattacacattgaaaaaagtaatgaagccgctgatcacttcaaacacggtaactgatgaaatcgagcgcgcgaatgttttcaaaatgaacggcaaatggtacttgttcactgattcacgcggttcaaaaatgacgatcgatggtattaactcaaacgatatttacatgcttggttatgtatcaaactctttaaccggcccttacaagccgctgaacaaaacagggcttgtgctgcaaatgggtcttgatccaaacgatgtgacattcacttactctcacttcgcagtgccgcaagccaaaggcaacaatgtggttatcacaagctacatgacaaacagaggcttcttcgaggataaaaaggcaacatttgcgccaagcttcttaatgaacatcaaaggcaataaaacatccgttgtcaaaaacagcatcctggagccaggacagttggcagtcaactaa

SEQ ID NO: 135779 - DNA, 3267 bp, Homo sapiens
ttagttgactgtcagctgtccttgctccaggatgctgtttttgacaacggatgttttattgcctttgatgttcattaagaagcttggcgcaaatgttgcctttttatcctcgaagaagcctctgtttgtcatgtagcttgtgataaccacattgttgcctttggcttgcggcactgcgaagtgagagtaagtgaatgtcacatcgtttggatcaagacccatttgcagcacaagccctgttttgttcagcggcttgtaagggccggttaaagagtttgatacataaccaagcatgtaaatatcgtttgagttaataccatcgatcgtcatttttgaaccgcgtgaatcagtgaacaagtaccatttgccgttcattttgaaaacattcgcgcgctcgatttcatcagttaccgtgtttgaagtgatcagcggcttcattacttttttcaatgtgtaatcattatttaactctatgataccgagggcgccgttcgctaactcagcatcgcgttttttagcgctctgctgaagcttctggctttctttacggaagaagttcgtgccgccgccgtagtacgctttgttaaataaagattcttcgccttggtatccgttttctgttcccgtgttggcttcgaatacaaggtatttatggcctttgtcttcaacgtagtgagggtctctcagcgtatggttgtcgccggatgtataattgccttcatcgataaactgctgaacgttctgatatgtttttccgtctccgtcaaaaatcgttttgtgatcttccactccgttgattttgagtgtgtcatcagattttgacacatttacctgcgctgttgtcaggctttgtttgccgtaatgtttaccggaatagtcagtgtagaataaacggatttttccgtcagatgtaaaggttgcagaaccggaccattcttgcgtctgatctttcaggatcggatcgttggcgtcgaacttatcgctgtctttaaagacacggcccgcgtttttccagctgtcgattgagttgtcgccgaccttttgataaaacatgtagattgatgtgtcatcagcgtctttcgggcttcccgcaagagcaaacacaacgtgatagccgttgtattcagctactgttccgtcagcgttttgcagcggccagctgtcccacacatcaagtccttttgcagactcaatatttttaatcgttgattgatcgaattgaggcacttggtatttttcgttttgctgctgtttagggatctgcagcatatcatggcgtgtaatatgagagacgccgtacgtttctttgtatgctttttggttattttctttcgcgaaggcttgagtcgctcctcctgtgatgattgccaatgtgacagtggcattgagctgctgttcctgcagatggatatggcaggtgtaggtcccagcctgggcctggctcacatcctctagtcgaagggtaaagtcgccattgtctccagtcaccaggaggtcagggcctcccccaggaggagtccacttggcagtgaggaaagaccgggtccccacaccagcaggcaggcggcagggcagccccaccctggaacctgctccagcgtacactgtcaagggagttgggggctccagacccagaacagtgaggttatacatgatggagacgttgaagccatctctgtaggtgaggatgcagccccagggcccagagtccatggggctgacttggggcaggaagaggaagctttccgctaagtggtgatggggggactcccggacagggactcggccctggccccggttccggaaccaatgcacagaggctgggcggtcagggcggctgaaggagcagttcaaaatgacccagtcggaggctctgagagatcctggggggctggcagtcactcccagcccttctcccatcgtcccgccccacatactcgaggcctggcccaggcgcagacggaggcggcaggagagggcgcggtccctgaggtgcaccgcggcgcggtactcgccggcgtccgcgcgccgggctgggcgcagccatagcgagaagtccccgcgctgccggccgcgctcatccagctggacgcggggctgcaggggcagcctcccgctgcgcaggcctccgggacccacgctcagcaccgtgtagcggcggggcctgggcccccaggaggagggcgccgccgggtgagggccgggggccaggggatggccgggggcggcagcgggcgggccactgggcgggaaagagaatggagttgagaagctccaggggtaggaagcccgggaggatgcaggcagccacccgttgaggatgagaaagcccgccccaagagttctcttgaccaccaaccgtcccctcacgcccgacccctctgttggactggccgcatccacttctgtctggctgatgctgccaagtgacccctgctcttcgcagaaggctgagatcgccgatgccccattttctgtcttctgccgtttgggatccgcttcatcctcctcttcggcagctctcttcagcgcgggcccttcatcatcctcttcttcttcttcctcatcttcttcttccccttcatcttcctcctctccatcctcggcagtttcttcttcttcctcctcagccccgttctcctcctcctccaccacttctttctttcgctctttccggcttgccttctcctccaccttctccttcttctccttcaggtccttggcgctcaactcggccgctgcctccacgcttttctccgacatggtgccggggccggggccggggctggcggggagccggggtcccggggccgagacggaggggccctggacggcggagggtggccgcggccggaacctggcgcggtggcggcggcggcggcgacagcggcagcggcggccgctcggcaagctgggtctctggaagaggcggcagaggcgcgcggggtggggcgggggtgggtctggagcggagacccgcagggctgcggccgtccggagggcgggcggaagggcggtgcaggcggtggccggcgcgctcggccgcggtagctcgatcccgggctcgccgcccccgcaccagcagagtgccgccgaccagccgtgccgcccccgggaagggaacccgcttataaggcggcgccttccataagggacctggcctcccacttctctaactgggaccaccagggttagcgtgggctgtgggccggactgtgggctgggcctcagggctggccggatcatgattgagtgtgttacctccat

SEQ ID NO: 135780 - DNA, 918 bp, Homo sapiens
cttcattctgcggaggaggaaactgaggatcagagagaaaatgtgtttgcctgagcctcgatgtccaataagcaaaagagccaggactccctttctaatctttgattcctggtccagctcagtgaccaaaacactgtgtccttttttagagatcattaaagccacggtgtttcgatttctgactgtgttagcctggaagtgcttgtcccaaccttgtttctgagcatgaacgcccgcaagccaacatgttagttgaagcatcagggcgattagcagcatgatatcaaaacgctctgagctgctcgttcggctatggcgtaggcctagtccgtaggcaggacttttcaagtctcggaaggtttcttcaatctgcattcgcttcgaatagatattaacaagttgtttgggtgttcgaatttcaacaggtaagttagttgctagaatccatggctcctttgccgacgctgagtagattttatgtgacgggtggtgacaatgagtccgtgtcgagcgctgattttttcggcctttagagcgagatttatacaatagaatttggcatgagattggattgcttttagtcagcctcttatagcctaaagtctttgagtgactagatgacatatcatgtaagttgctgataggtttccagttttccgctcctaggtctgcatattgtacttttcctcttactcgacttaaccagtaccaacccagcttctcaacggatttataccatggcactttaaagccagcatcactgacaatgagcggtgtggtgttactcggtagaatgctcgcaaggtcggctagaaattggtcatgagctttctttgaacattgctctgaaagcgggaacgctttctcataaagagtaacagaacgaccgtgtagtgcgactgaagctcgcaataccat

SEQ ID NO: 135781 - DNA, 1174 bp, Homo sapiens; identical to SEQ ID NO: 133330

SEQ ID NO: 135782 - DNA, 1284 bp, Homo sapiens
  misc_feature (1)...(1284): n = a,t,c or g
atgaggacaccactggaggagacagggctgcacatggtggcactgatgacagtcacggctgtggctgatcagaactttcagcggtataccggcatacagcatgtgcatcgcataggaatggcggaacgtatgtggtgtgaccggaacagagaacgtcacaccgtcagcagcagcggcgcaaccgcctccccaatccaggtcctgaccgttctgtccgtcacttcccagatccgcgctttctctgtccttcctgtcggcgacaactcaatcgacagctggaaaaacgcgggccgtgtctttaaagacagcgataagttcgacgccaacgatccgatcctgaaagatcagacgcaagaatggtccggttctgcaacctttacatctgacgtaaaaatccgtttattctacactgactattccggtaaacattactgcaaacaaagcctgacaacagcgcaggtaaatgtgtcaaaatctgatgacacactcaaaatcaacggagtggaagatcacaaaacgatttttgacggagacggaaaaacatatcagaacgttcagcagtttatcgatgaaggcaattatacatccggcgacaaccatacgctgagagaccctcactnacacaaaggccataaataccttgtattcgaagccaacacgggaacagaaaacggataccaaggcgaagaatctttatttaacaaagcgtactacggcggcggcacgaacttcttccgtaaagaaagccagaagcttcagcagagcgctaaaaaacgcgatgctgagttagcgaacggcgccctcggtatcatagagttaaataatgattacacattgaaaaaagtaatgaagccgctgatcacttcaaacacggtaactgatgaaatcgagcgcgcgaatgttttcaaaatgaacggcaaatggtacttgttcactgattcacgcggttcaaaaatgacgatcgatggtattaactcaaacgatatttacatgcttggttatgtatcaaactctttaaccggcccttacaagccgctgaacaaaacagggcttgtgctgcaaatgggtcttgatccaaacgatgtgacattcacttactctcacttcgcagtgccgcaagccaaaggcaacaatgtggttatcacaagctacatgacaaacagaggcttcttcgaggataaaaaggcaacatttgcgccaagcttcttaatgaacatcaaaggcaataaaacatccgttgtcaaaaacagcatcctggagcaaggacagctgacagtcaactaa

SEQ ID NO: 135783 - DNA, 1827 bp, Homo sapiens; identical to SEQ ID NO: 134481
  misc_feature (1)...(1827): n = a,t,c or g

SEQ ID NO: 135784 - DNA, 1329 bp, Homo sapiens
atgggcaaatttgatgaaggtaaactgcccaccgatccacacctgattcttcgactggccattgaaactgttgctcatgactatgatgtcatagttattgacagcgcgcctaacctgggtatcggcacgattaatgtcgtatgtgctgctgatgtgctgattgttcccacgcctgctgagttgtttgactacacctccgcactgcagtttttcgatatgcttcgtgatctgctcaagaacgttgatcttaaagggttcgagcctgatgtacgtattttgcttaccaaatacagcaatagtaatggctctcagtccccgtggatggaggagcaaattcgggatgcctggggaagcatggttctaaaaaatgttgtacgtgaaacggatgaagttggtaaaggtcagatccggatgagaactgtttttgaacaggccattgatcaacgctcttcaactgaaagcattatccctaatgatggtaagaaattgtcattttctgtgtcaggaaaaatgaggaaagggcactacttttcgtctgaagagagtcatgttagaacagacatcctggcggatacaaaaatgcaatctgcaaacggacttgatgtgtgggacagctggccgctgcaaaacgctgacggaacagtagctgaatacaacggctatcacgttgtgtttgctcttgcgggaagcccgaaagacgctgatgacacatcaatctacatgttttatcaaatggtcggcgacaactcaatcgacagctggaaaaacgcgggccgtgtctttaaagacagcgataagttcgacgcccacgatccgatcctgaaagatcagacgcaagaatggtccggttctgcaacctttacatctgacggaaaaatccgtttattctacactgactattccggtaaacattacggcaaacaaagcctgacaacagcgcaggtaaatgtgtcaaaatctgatgacacactcaaaatcaacggagtggaagatcacaaaacgatttttgacggagacggaaaaacatatcagaacgttcagcagtttatcgatgaaggcaattatacatccggcgacaaccatacgctgagagaccctcactacgttgaagacaaaggccataaataccttgtattcgaagccaacacgggaacagaaaacggataccaaagcgaagaatctttatttaacaaagcgtactacggcggcggcacgaacttcttccgtaaagaaagccagaagcttcagcagagcgctaaaaaacgcgatgctgaattaacgaacggcgccccttcgtatcatagagttaaattattgattacccattga

SEQ ID NO: 135785 - DNA, 1974 bp, Homo sapiens
atgcgctgggattgcaggcctccagcggccccgcccgccgcctccgccctcccgctcctgagctgccaatccagcgggttctgccggtcctcggccgtgcgtctggggtctggattcccggctccactcgccgtgagcgcgcgtgtcagccgactcgccccggaccgcatggtgcagctcccgcagggccgcagccgcgggtcgtcgctgattgccagctccgcgcccactgcaccgctgcgcggccgcctagggctcattgcgcggaagtcggcctgttgcgcccataacgggccatgtttaaaggttatcttattcccttccccggcatcgggcgtggatccaatcaaggttcaaaacgcccagctccccgggggtgggaaaattttttttccttacggaaaattctttaaattttcacggcgcaaccaaagtttccgcctgcaatcggagaacttcaagcttgggggttacgtccttctggacatcctcgccagccgaaatttaatgcgctttgtgaaaaggccttgtgaagtgcgtcaacctgtccgggtcaacaacgcacccgcggataaagcacgtgccacgtcgtcgacaggacctgaatgtggtgatggggatggaaaagcagaggtcaatgggacaggtggtatgcaagccagtgccaggggatatgggtgtggctcctttaatcacgtggggaagcccactcaggtcttcaccacgcggctggaaggatccgcgctggcgcaaggcgaggatatcaccgaccgccttacactataccgtccgatcatggacacctcgcatcgctggccgctgcaaaacgctgacggaacagtagctgaatacaacggctatcacgttgtgtttgctcttgcgggaagcccgaaagacgctgatgacacatcaatctacatgttttatcaaaaggtcggcgacaactcaatcgacagctggaaaaacgcgggccgtgtctttaaagacagcgataagttcgacgccaacgatccgatcctgaaagatcagacgcaagaatggtccggttctgcaacctttacatctgacggaaaaatccgtttattctacactgactattccggtaaacattacggcaaacaaagcctgacaacagcgcaggtaaatgtgtcaaaatctgatgacacactcaaaatcaacggagtggaagatcacaaaacgatttttgacggagacggaaaaacatatcagaacgttcagcagtttatcgatgaaggcaattatacatccggcgacaaccatacgctgagagaccctcactacgttgaagacaaaggccataaataccttgtattcgaagccaacacgggaacagaaaacggataccaaggcgaagaatctttatttaacaaagcgtactacggcggcggcacgaacttcttccgtaaagaaagccagaagcttcagcagagcgctaaaaaacgcgatgctgagttagcgaacggcgccctcggtatcatagagttaaataatgattacacattgaaaaaagtaatgaagccgctgatcacttcaaacacggtaactgatgaaatcgagcgcgcgaatgttttcaaaatgaacggcaaatggtacttgttcactgattcacgcggttcaaaaatgacgatcgatggtattaactcaaacgatatttacatgcttggttatgtatcaaactctttaaccggcccttacaagccgctgaacaaaacagggcttgtgctgcaaatgggtcttgatccaaacgatgtgacattcacttactctcacttcgcagtgccgcaagccaaaggcaacaatgtggttatcacaagctacatgacaaacagaggcttcttcgaggataaaaaggcaacatttgcgccaagcttcttaatgaacatcaaaggcaataaaacatccgttgtcaaaaacagcatcctggagcaaggacagctgacgtcttcaaaatag

SEQ ID NO: 135786 - DNA, 1629 bp, Homo sapiens
atgattccgttccaggaaacctttataatcaaacgcgggggaataactgggtttctggttagctttatggtggacgcgagagggggctccatgagaggaagccgtcatcacgggatgagaatcatcattcctccacgcaagtgtacggcccccactcgaatcacctgccgtttggtaaagagacataaactggccaacccaccccccatggtggaaggagagggattagccagtaggctggtagaaatgggtcctgcaggggcacaatttttagggaggagcgactcaagccttcgcgaaagaaaatatccaaaagcgatcaaagaaacgtacggggtctctcatattacacgccatgatatgctgcagatccgtaaacagcagcaaaacgaaaaataccaagtgcctcaattcgatcaatcaacgattaaaaatattgagtctgcaaaaggacttgatgtgtgggacagctggccgctgcaaaacgctgacggaacagtagctgaatacacgtgctatcacgttgtgtttgctcatgcgggaagcccgaaagacgctgatgacacatcaatctacatgttttatcaaaaggtcggcgacaactcaatcgacagctggaaaaacgcgggccgtgtctttaaagacagcgataagttcgacgccaacgatccgatcctgaaagatcagacgcaagaatggtccggttctgcaacctttacatctgacggaaaaatccgtttattatacactgactattccggtaaacattacggcaaacaaagcctgacaacagcgcaggtaaatgtgtcaaaatctgatgacacactcaaaatcaacggagtggaagatcacaaaacgatttttgacggagacggaaaaacatatcagaacgttcagcagtttatcgatgaaggcaattatacatccggcgacaaccatacgctgagagaccctcactacgttgaagacaaaggccataaataccttgtattcgaagccaacacgggaacagaaaacggataccaaggcgaagaatctttatttaacaaagcgtactacggcggcggcacgaacttcttccgtaaagaaagccagaagcttcagcagagcgctaaaaaacgcgatgctgagttagcgaacggcgccctcggtatcatagagttaaataatgattacacattgaaaaaagtaatgaagccgctgatcacttcaaacacggtaactgatgaaatcgagcgcgcgaatgttttcaaaatgaacggcaaatggtacttgttcactgattcacgcggttcaaaaatgacgatcgatggtattaactcaaacgatatttacatgcttggttatgtatcaaactctttaaccggcccttacaagccgctgaacaaaacagggcttgtgctgcaaatgggtcttgatccaaacgatgtgacattcacttactctcacttcgcagtgccgcaagccaaaggcaacaatgtggttatcacaagctacatgacaaacagaggcttcttcgaggataaaaaggcaacatttgcgccaagcttcttaatgaacatcaaaggcaataaaacatccgttgtcaaaaacagcatcctggagcaaggacagctgacagtcaactaa

SEQ ID NO: 135787 - DNA, 1810 bp, Homo sapiens
atgaacatgaacatcaaaaaaattgtaaaacaagccacagttctgacttttacgactgcacttctggcaggaggagcgactcaagccttcgcgaaagaaaataaccaaaaagcatacaaagaaacgtacggcgtctctcatattacacgccatgatatgctgcagatccctaaacagcagcaaaacgaaaaataccaagtgcctcaattcgatcaatcaacgattaaaaatattgagtctgcaaaaggacttgatgtgtgggacagctggccgctgcaaaacgctgacggaacagtagctgaatacaacggctatcacgttgtgtttgctcttgcgggaagcccgaaagacgctgatgacacatcaatctacatgttttatcaaaaggtcggcgacaactcaatcgacagctggaaaaacgcgggccgtgtctttaaagacagcgataagttcgacgccaacgatccgatcctgaaagatcagacgcaagaatggtccggttctgcaacctttacatctgacggaaaaatccgtttattctacactgactattccggtaaacattacggcaaacaaagcctgacaacagcgcaggtaaatgtgtcaaaatctgatgacacactcaaaatcaacggagtggaagatcacaaaacgatttttgacggagacggaaaaacatatcagaacgttcagcagtttatcgatgaaggcaattatacatccggcgacaaccatacgctgagagaccctcactacgttgaagacaaaggccataaataccttgtattcgaagccaacacgggaacagaaaacggataccaaggcgaagaatctttatttaacaaagcgtactacggcggcggcacgaacttcttccgtaaagaaagccagaagcttcagcagagcgctaaaaaacgcgatgctgagttagcgaacggcgccctcggtatcatagagttaaataatgattacacattgaaaaaagtaatgaagccgctgatcacttcaaacacggtaactgatgaaatcgagcgcgcgaatgttttcaaaatgaacggcaaatggcagtacccccttagacccaaggctcaacaaggactccaaaagattgttaaggacctaaaagcccaaggcctagtgaaatcatgcaatagcccctgcaatactccaattttaggagtacagaaacccagcagacagtggaggttagtgcaagaactcaggattatcaatgaggccgttgtccctctagacccagctgtacctaaccctcatactctgctttcccaaataccagaggaagcagtgtggtttacagtcctggaccttaaggatgcctttttcagcatccctgtacatcctgactctcaattcttgtttgcctttgaagatccttcaaacccaacgtctcaactcacctggactgttttaccccaagggttcagggatagcccccatctatttggccaggcattagcccaagacttgagccaattctcatacctggacactcttgtccttcggtacatggatgatttacttttagctgccagttcagaaaccttgtgccatcaagccacccaagcgctcttaaatttccttgctacctgtggctacaaggtttccaaaccaaacgctcagcactgctcacagcaggttaaatacttagggctaaaattatccaaaggtaccaaggcccttggtgaggaacgtatccagcctatactggcttaccctcatcccaaaaccctaaagcaactaagagggttccttggcataacaggtttctgccaaatatggatattcccag

SEQ ID NO: 135788 - DNA, 2415 bp, Homo sapiens; identical to SEQ ID NO: 133331

SEQ ID NO: 135789 - DNA, 1938 bp, Homo sapiens
atgaaaaacaccgaactggaacaactgattaacggaaaactgaacagcgcggcgattagtgattacgcgccgaatggttctgtaattgcgccagttgtccgtctcgttctgctgctcgaggcttgtctttctcgcttaatggcactgccgccaacagacggtaactttgcatgcgcacgatcccgctttgttgatcgcatgggcgctgcctggaacgccttgcaccagccagccagaaaccgccatccctgccagtccaatagcagtagaaagcaacacaataagcgcaacctgattaaccagggtgagcggagagagacaacgtttaagcatctttctttactggatcgtgtttaccagacggcacctcccgaagaaggtgccgaagaaaaaacgattcgatgcactcgtagattccccagagcggaatcatttgtgaatgaagctggagctagtaggcctagcctcgtagccacgacttttcaagtctcggaaggcttcttcaatctgcattcgcttcgaatagatattaacaagttcgtctgggagttcgaatttcaacaggtcacaacacagccaagacgccaaagcaaaaccacaacaaggaccggagacacacaagagaagcagcgaggaaaggaacgaaagagaagacgccaaagggcccaaaggcaccgcagccaggaaggcacgagcgcacggaaagcgaacaaagccgcaacccagcgacgacacaaaccacgcacagcccggcccaaccgagccaccaaaaggaaggcgacccacggagcagcaaaaggaggaagaagacaccccccaaagagcaacagaacgacgcacaaagacaacacaacggagaccgcgcacccagaaagacagcacccaaaagggaagaacacgcaacagaaagaggaaacgagaggcgagaagcccagaacaagggacccaggggaagaacggaaagccagggccagaaaaggcacacgcgagaaccaagggccagaccagggcagggaaccaaaggcccgaggaagggcaccagaaagggaggggacaaacccggaccgcccagcaaagacaaggggacccaaaaaacaccaggggccacaaaacagagctcccgagccgttagatgccggcgaattaagctggcgcactgacgatcatatcagtattgcgccgggtaaaatgttttctaccggtgaaaactggtcacgttttttccgttttaataccgcgtggcagtggggagagcgtgaagaacaggcgataaaccgggagggcgactggataatatcgcctggccgggatacatcgaacgcggacaaacttgataacaatacggctggggctgaaaaccagattaaggaggtcgaagcaacgctgatggagctacgtgcgcagcggcagcaggcggaagcggagctgaaactggcgcgggtgacgtattcccgtcagcaacgtctggcacaaacgaaggctgtttcacagcaggatctcgacaccgccgcgacggagatggctgtgaaacaggcgcaaattggcaccattgacgcgcaaatcaagcgcaatcaggcttctctcgatacggctaaaaccaatctcgattacactcgcatcgttgccccgatggccggggaagtcacgcaaatcaccactctgcaaggccagacggtgattgccgcacaacaagcaccgaacattctgacgctggcagatatgagcgccatgctggtaaaagcgcaggtttctgaagcggatgtaatccacctgaagccggggcaaaaagcctggtttacggtgcttggcgatccactgacgcgctacgatgggcaaatcaaggatgtactaccgacgccggaaaaggttaacgacgctattttctattacgcccgttttgaagtccccaaccccaatgtttgctgcggctggatatga

SEQ ID NO: 135790 - DNA, 1435 bp, Homo sapiens; identical to SEQ ID NO: 133333

SEQ ID NO: 135791 - DNA, 1177 bp, Homo sapiens; identical to SEQ ID NO: 133334

SEQ ID NO: 135792 - DNA, 456 bp, Homo sapiens; identical to SEQ ID NO: 133335

SEQ ID NO: 135793 - DNA, 1218 bp, Homo sapiens; identical to SEQ ID NO: 133337

SEQ ID NO: 135794 - DNA, 2217 bp, Homo sapiens; identical to SEQ ID NO: 133338

SEQ ID NO: 135795 - DNA, 1210 bp, Homo sapiens; identical to SEQ ID NO: 133340

SEQ ID NO: 135796 - DNA, 1089 bp, Homo sapiens; identical to SEQ ID NO: 133341

SEQ ID NO: 135797 - DNA, 1135 bp, Homo sapiens
atgaacatgaacatcaaaaaaattgtaaaacaagccacagttctgacttttacgactgcacttctggcaggaggagcgactcaagccttcgcgaaagaaaataaccaaaaagcatacaaagaaacgtacggcgtctctcatattacacgccatgatatgctgcagatccctaaacagcagcaaaacgaaaaataccaagtgcctcaattcgatcaatcaacgattaaaaatattgagtctgcaaaaggacttgatgtgtgggacagctggccgctgcaaaacgctgacggaacagtagctgaatacacgggctatcacgttgtgtttgctcttgcgggaagccggaaagacgctgatgacacatcaatctacatgttttatcaaaaggtcggcgacaactcaatcgacagctggaaaaacgcgggccgtgtctttaaagacagcgataagttcgacgccaacgatccgatcctgaaagatcagacgcaagaatggtccggttctgcaacctttacatctgacggaaaaatccgtttattctacactgactattccggtaaacattacggcaaacaaagcctgacaacagcgcaggtaaatgtgtcaaaatctgatgacacactcaaaatcaacggagtggaagatcacaaaacgatttttgacggagacggaaaaacatatcagaacgttcagcagtttatcgatgaaggcaattatacatccggcgacaaccatacgctgagagaccctcactacgttgaagacaaaggccataaataccttgtattcgaagcccaacacggggaacagaaaacggattcccaaggcgaagaatctttatttaacaaagcaagttttcttattgtcctcttggcatatgcttctggaataatattcaccatggttttggatgaccttccaaacttagaagacatctatacttccttgtgttcatcaacaatggaagactcagagatggattttgactctggactagaagatgatgacacaaaaagtgatagtattttggaggattccacaatttttgtggccttcaaaggaaatatagatgataaagacttcaaatggaaattagatgcaatattgaaaaacgtgcccaatttgttacacatgg

SEQ ID NO: 135798 - DNA, 1200 bp, Homo sapiens; identical to SEQ ID NO: 133343

SEQ ID NO: 135799 - DNA, 888 bp, Homo sapiens; identical to SEQ ID NO: 133344

SEQ ID NO: 135800 - DNA, 1527 bp, Homo sapiens; identical to SEQ ID NO: 133345

SEQ ID NO: 135801 - DNA, 1295 bp, Homo sapiens; identical to SEQ ID NO: 133332

SEQ ID NO: 135802 - DNA, 1488 bp, Homo sapiens
ctaataacagccatgccggaagcatgacgatacagagcagcggtacaatgtggtattgggtacaacgactgccgccataaaaagacttaaccagccatcgcgtgttaccaccagcacgatgccgagaatagcgcaagaaacggttattgccgctggtacggcgggaacgtgctcatgcagcatcaaccctaatgccacgccgacaaacactgccaggaagattcgcccaccgcgaaaaccacgccagcaaaaagtaatcgctggtgctgaaacctgatttgccaccatctgctgcatctcatccagccctttaaacagcgaaactggtccaccaataacccccagaataccgagaataaatccgccaatacccagcacgagcaccggatttcccatttgatgcatcatcgcgtgcatacgtggtaagcaccatacggcgaccatccctgctgcgatggcaatcgccgcgacaattgcaccgctgagaatatcggtcatttccatgtttcgatttctgactgtgttagcctggaagtgcttgtcccaaccttgtttctgagcatgaacgcccgcaagccaacatgttagttgaagcatcagggcgattagcagcatgatatcaaaacgctctgagctgctcgttcggctatggcgtaggcctagtccgtaggcaggacttttcaagtctcggaaggtttcttcaatctgcattcgcttcgaatagatattaacaagttgtttgggtgttcgaatttcaacaggtaagttagttgctagaacccatggctcctttgccgacgctgagtagattttaggtgacgggtggtgacaatgagtccgtgtcgagcgctgattttttcggcctttagagcgagatttatacaataggattttggcctgcccccttattaacacgtagcccactccggttgtgcggctgaaaccctgaactgtgtggtccatgggtcccgttgtggggacaccagcccgtccaatccgtacgtctggtgcgtgttggtggtgctggtaggttacggtgttattggctttgttgatgattatcgcaaagtggtgcgtaaagacaccaaagggttgatcgctcgttggaagtatttctggatgtcggtcattgcgctgggtgtcgccttcgccctgtaccttgccggcaaagacacgcccgcaacgcagctggtggtcccattctttaaagatgtgatgccgcagctggggctgttctacattctgctggcttacttcgtcattgtgggtactggcaacgcggtaaaaagctttcgtgcctgcaggtccatgacagatatcatcaccttcgccacgcaccatcatgttgccttcgtaagcctgaaggaatttcgtacgggctttttgcaacgtggaatcgtcatccagcatggcatcgttttgcgcgtcataacaggtttttagccacgcgccgccactttcaggtaacaccagcaatggcgcggacat

SEQ ID NO: 135803 - DNA, 735 bp, Homo sapiens; identical to SEQ ID NO: 133347

SEQ ID NO: 135804 - DNA, 2187 bp, Homo sapiens; identical to SEQ ID NO: 133351

SEQ ID NO: 135805 - DNA, 780 bp, Homo sapiens; identical to SEQ ID NO: 133352

SEQ ID NO: 135806 - DNA, 1459 bp, Homo sapiens
atgtctggtgcttggctgccagttaggtggagcgatgaaggctattgggctgagtgtctcctgtcatccatcagagagggagtctgcacggggtcccacacatcccctgagactcaagcaggggcaggacagcaccattttgagagcctagccttcaccaggctacatcctgcccagaggcccaacagcacctgcatctccatatttccggagccccataacattctcctgtatctacctgtcaggacccttagctgcaggtctgttggagtttgcctgggtatcagtggtggaggctgcagaactgtgaatattgctgaacaggaaatgttgctgtctgatcattcctctggaggtttcgtctcagaggggggagtgaacgtttctgtcttgctggcattcctagtgcctctggggtatgaaatataccaagtgcctcaattcgatcaatcaacgattaaaaatattgagtctgcaaaaggacttgatgtgtgggacagctggccgctgcaaaacgctgacggaacagtagctgaatacaacggctatcacgttgtgtttgctcttgcgggaagcccgaaagacgctgatgacacatcaatctacatgttttatcaaaaggtcggcgacaactcaatcgacagctggaaaaacgcgggccgtgtctttaaagacagcgataagttcgacgccaacgatccgatcctgaaagatcagacgcaagaatggtccggttctgcaacctttacatctgacggaaaaatccgtttattctacactgactattccggtaaacattacggcaaacaaagcctgacaacagcgcaggtaaatgtgtcaaaatctgatgacacactcaaaatcaacggagtggaagatcacaaaacgatttttgacggagacggaaaaacatatcagaacgttcagcagtttatcgatgaaggcaattatacatccggcgacaaccatacgctgagagaccctcactacgttgaagacaaaggccataaataccttgtattcgaagccaacacgggaacagaaaacggataccaaggcgaagaatctttatttaacaaagcgtactacggcggcggcacgaacttcttccgtaaagaaagccagaagcttcagcagagcgctaaaaaacgcgatgctgagttagcgaacggcgccctcggtatcatagagttaaataatgattacacattgaaaaaagtaatgaagccgctgatcacttcaaacacggtaactgatgaaatcgagcgcgcgaatgttttcaaaatgaacggcaaatggtacttgttcactgattcacgcggttcaaaaatgacgatcgatgccaagtccacacttcttgaatcaacagaagggagtatgactcctccaatgacagccacagagccttttctcaggttcctcaaaggggagattgcccaacccaagccacatccccttg

SEQ ID NO: 135807 - DNA, 3003 bp, Homo sapiens
atgaatgaaatgaagcgtgaagagaagtttagagaaaaaagaagagaaagaaacgaacaaatcctccaagaaatacgggactatgtgaaaagatcaaatctacatctaattggtgtatctaaaagtgatggggagaatggaaccgagttggaaaacactctgcaggatattatccaggagaacttccccaatctagcaaggcaggccaacattcaaattcaggaaatacagagaatgctacaaagatactcctcgagaagaacaactccaagacacataattgtcagattcaccaaagttgaaatgaaggaaaaaatgttaagggcagccagagagaaaggtcgggttacccacaaagggaagcccatcagactaacagctgatctctcggcagaaactctacaagccacaaaagagtggaggccaatattcaacattcttaaagaaaagaattttcaacccagaatttcatatccagccaaactaagcttcataagtgaaggagaaacaaaatactttacagacaagcaaatgctgagagattttgtcaccaccaggcctgccctaaaagagctcctgaaggaagcactaaacatggaaaggaacaaccggttggttaaatccctcgcttgggcaagccagaacggcttccggtccccggccttgttgccactgtccctaatgctttgtgctcccctacaagaggcagatggaacaaatctgggatggctggctcactgtggcctgctgtgcactggtgaccaccctagtggccttggcaaacctggccggcacggcgctgaccgtcaccatccagagggactggatcgtgagctgacgggtgacaacagaggccagctggttggaggagcgactcaagccttcgcgaaagaaaataaccaaaaagcatacaaagaaacgtacggcgtctctcatattacacgccatgatatgctgcagatccctaaacagcagcaaaacgaaaaataccaagtgcctcaattcgatcaatcaacgattaaaaatattgagtctgcaaaaggacttgatgtgtgggacagctggccgctgcaaaacgctgacggaacagtagctgaatacaacggctatcacgttgtgtttgctcttgcgggaagcccgaaagacgctgatgacacatcaatctacatgttttatcaaaaggtcggcgacaactcaatcgacagctggaaaaacgcgggccgtgtctttaaagacagcgataagttcgacgccaacgatccgatcctgaaagatcagacgcaagaatggtccggttctgcaacctttacatctgacggaaaaatccgtttattctacactgactattccggtaaacattacggcaaacaaagcctgacaacagcgcaggtaaatgtgtcaaaatctgatgacacactcaaaatcaacggagtggaagatcacaaaacgatttttgacggagacggaaaaacatatcagaacgttcagcagtttatcgatgaaggcaattatacatccggcgacaaccatacgctgagagaccctcactacgttgaagacaaaggccataaataccttgtattcgaagccaacacgggaacagaaaacggataccaaggcgaagaatctttatttaacaaagcgtactacggcggcggcacgaacttcttccgtaaagaaagccagaagcttcagcagagcgctaaaaaacgcgatgctgagttagcgaacggcgccctcggtatcatagagttaaataatgattacacattgaaaaaagtaatgaagccgctgatcacttcaaacacggtaactgatgaaatcgagcgcgcgaatgttttcaaaatgaacggcaaatggtacttgttcactgattcacgcggttcaaaaatgacgatcgatggtattaactcaaacgttattcacatgaatggttatgtatcaggatcaactaagttaccgctgatggccactggggtcagtccttctggggaccttatgagagactgtgtaggacatacttcagaactgtcccaccaaggcccaaggaaactaggatgtttatccagcaactcttgtctgtccttggttgagagctgttctcagggcaacttacagcccacccctcatgttcctatggctggagagggatcttcaggcaaagagacacagtgccctcccttttcggccgcggcgcgtgactggtgtgacaatctaaaaacttgtcacacttcacatggatctgtcatggcggaaacagcggttatcaatcacaagaaacgtaaaaatagcccgcgaatcgtccagtcaaacgacctcactgaggcggcatatagtctctcccgggatcaaaaacgtatgctgtatctgttcgttgaccagatcagaaaatctgatggcaccctacaggaacatgacggtatctgcgagatccatgttgctaaatatgctgaaatattcggattgacctctgcggaagccagtaaggatatacggcaggcattgaagagtttcgcggggaaggaagtggttttttatcgccctgaagaggatgccggcgatgaaaaaggctatgaatcttttccttggtttatcaaacgtgcgcacagtccatccagagggctttacagtgtacatatcaacccatatctcattcccttctttatcgggttacagaaccggtttacgcagtttcggcttagtgaaacaaaagaaatcaccaatccgtatgccatgcgtttatacgaatccctgtgtcagtatcgtaagccggatggctcaggcatcgtctctctgaaaatcgactggatcatagagcgttaccagctgcctcaaagttaccagcgtatgcctgacttccgccgccgcttcctgcaggtctgtgttaatgagatcaacagcagaactccaatgcgcctctcatacattgagaaaaagaaaggccgccagacgactcatatcgtattttccttccgcgatatcacttccatgacgacaggatag

SEQ ID NO: 135808 - DNA, 1083 bp, Homo sapiens
atggcagaggtttcagagcaatgttcaaagaaagctcatgaccaatttctagccgaccttgcgagcattctaccgagtaacaccacaccgctcattgtcagtgatgctggctttaaagtgccatggtataaatccgttgagaagctgggttggtactggttaagtcgagtaagaggaaaagtacaatatgcagacctaggagcggaaaactggaaacctatcagcaacttacatgatatgtcatctagtcactcaaagactttaggctataagaggctgactaaaagcaatccaatctcatgccaaattctattgtataaatctcgctctaaaggccgaaaaaatcagcgctcgacacggactcattgtcaccacccgtcacctaaaatctactcagcgtcggcaaaggagccatgggttctagcaactaacttacctgttgaaattcgaacacccaaacaacttgttaatatctattcgaagcgaatgcagattgaagaaaccttccgagacttgaaaagtcctgcctacggactaggcctacgccatagccgaacgagcagctcagagcgttttgatatcatgctgctaatcgccctgatgcttcaactaacatgttggcttgcgggcgttcatgctcagaaacaagagcaccctttgtggtcgctggcgctggttaggaggagatcccctgcccagagccctcatgtggggacaggatcttccggcagcactgggtgttcaagtcaggcaccgtgtatgaaatctaacaatgcgctcatcgtcatcctcggcaccgtcaccctggatgctgtaggcataggcttggttatgccggtactgccgggcctcttgcgggatatcgtccattccgacagcatcgccagtcactatggcgtgctgctagcgctatatgcgttgatgcaatttctatgcgcacccgttctcggagcactgtccgaccgctttggccgccgcccagtcctgctcgcttcgctacttggagccactatcgactacgcgatcatggcgaccacacccgtcctgtggatctacccactagtcaattcaccatcttgttga

SEQ ID NO: 135809 - DNA, 2361 bp, Homo sapiens
atgtgcgaactcgatattttacacgactctctttaccaattctgccccgaattacacttaaaacgactcaacagcttaacgttggcttgccacgcattacttgactgtaaaactctcactcttaccgaacttggccgtaacctgccaaccaaagcgagaacaaaacataacatcaaacgaatcgaccgattgttaggtaatcgtcacctccacaaagagcgactcgctgtataccgttggcatgctagctttatctgttcgggcaatacgatgcccattgtacttgttgactggtctgatattcgtgagcaaaaacgacttatggtattgcgagcttcagtcgcactacacggtcgttctgttactctttatgagaaagcgttcccgctttcagagcaatgttcaaagaaagctcatgaccaatttctagccgaccttgcgagcattctaccgagtaacaccacaccgctcattgtcagtgatgctggctttaaagtgccatggtataaatccgttgagaagctgggttggtactggttaagtcgagtaagaggaaaagtacaatatgcagacctaggagcggaaaactggaaacctatcagcaacttacatgatatgtcatctagtcactcaaagactttaggctataagaggctgactaaaagcaatccaatctcatgccaaattctattgtataaatctcgctctaaaggccgaaaaaatcagcgctcgacacggactcattgtcaccacccgtcacctaaaatctactcagcgtcggcaaaggagccatgggttctagcaactaacttacctgttgaaattcgaacacccaaacaacttgttaatatctattcgaagcgaatgcagattgaagaaaccttccgagacttgaaaagtcctgcctacggactaggcctacgccatagccgaacgagcagctcagagcgttttgatatcatgctgctaatcgccctgatgcttcaactaacatgttggcttgcgggcgttcatgctcagaaacaaggttgggacaagcacttccaggctaacacagtcagaaatcgaaacctcaaaatttattcacacatggttacgctttggggaaattatgaggggatctctcagtaccaagtgcctcaattcgatcaatcaacgattaaaaatattgagtctgcaaaaggacttgatgtgtgggacagctggccgctgcaaaacgctgacggaacagtagctgaatacaacggctatcacgttgtgtttgctcttgcgggaagcccgaaagacgctgatgacacatcaatctacatgttttatcaaaaggtcggcgacaactcaatcgacagctggaaaaacgcgggccgtgtctttaaagacagcgataagttcgacgccaacgatccgatcctgaaagatcagacgcaagaatggtccggttctgcaacctttacatctgacggaaaaatccgtttattctacactgactattccggtaaacattacggcaaacaaagcctggcagcagcgcaggtaaatgtgtcaaaatctgatgacacactcaaaatcaacggagtggaagatcacaaaacgatttttgacggagacggaaaaacatatcagaacgttcagcagtttatcgatgaaggcaattatacatccggcgacaaccatacgctgagagaccctcactacgttgaagacaaaggccataaataccttgtattcgaagccaacacgggaacagaaaacggataccaaggcgaagaatctttatttaacaaagcgtactacggcggcggcacgaacttcttccgtaaagaaagccagaagcttcagcagagcgctaaaaaacgcgatgctgagttagcgaacggcgccctcggtatcatagagttaaataatgattacacattgaaaaaagtaatgaagccgctgatcacttcaaacacggtaactgatgaaatcgagcgcgcgaatgttttcaaaatgaacggcaaatggtacttgttcactgattcacgcggttcaaaaatgacgatcgatggtattaactcaaacgatatttacatgcttggttatgtatcaaactctttaaccggcccttacaagccgctgaacaaaacagggcttgtgctgcaaatgggtcttgatccaaacgatgtgacattcacttactctcacttcgcagtgccgcaagccaaaggcaacaatgtggttatcacaagctacatgacaaacagaggcttcttcgaggataaaaaggcaacatttgcgccaagcttcttaatgaacatcaaaggcaataaaacatccgttgtcaaaaacagcatcctggagcaaggacagctgacagtcaactaa

SEQ ID NO: 135810 - DNA, 731 bp, Homo sapiens
atgggagtgaatgacttgtggcaaattttggagcctgttaagcaacacatccccttgcgtaatcttggtgggaaaaccattgcagttgatctgagtctctgggtgtgtgaggcacacccagtcaaaaaaatgatgggcagcgtcatgaagaaacacctcagggattttgccgatttcggaaccaccatcaaacaggattttcgcctgctggggcaaaccagcgtggaccgcttgctgcaactctctcagggccaggcggcctaccccatacccgacgaccaggttcagagcgttttgatatccatgctgctaatcgccctgatgcttcacctaacatgtgggcttgcgggcgttcatgctcagaaacaaggttgggacaagcacttccaggctaacacagtcagaaatcgaaacgtactctcaacagttcgcttaggcatggaagttttgcggcattctggctacacaataacaagggaagactcactcgtggctgcaaccctgcttactcaaaatctattcacacatggttacgttttggggaaattatgaggggatctctcagtgctaagcctccacattctagaatactgagttctaattacctagaaaagaataaaactgtccaggtgaggtgacacttttgaggaatcccaggaagaggtgtcggcactgtgttacctcaggtgggaatggcctctgaactgatctccctgacagctctgtgaaaa

SEQ ID NO: 135811 - DNA, 1314 bp, Homo sapiens; identical to SEQ ID NO: 133353

SEQ ID NO: 135812 - DNA, 1017 bp, Homo sapiens
tcatgggttgcgggtcatgatagcgactttttcatgttcgataagtgctttttgcaacgcgttgtcgtcaatattcaacggacgtaaatcaagccatgccagataagtggattgtgggatctgccagttgagttcaggaaacgcggcgttcattttatctgcgatatacgtcaggttatctttcagatagatgcgtaaggcatccagccacggcgcgccttgctgataggcggcgatatgggcagttaacgccagtaccgaaggggaagaaagcccatcacggcctttcagtgccgataaataggcatcgcggctactgctattttctataatcccgtaagcaccggtcagggcgggaatattgaaacttttcgagcccgacgttagcaacgcccagtctccgcgagccacattactccagggaatatgcggctgctcgccccaaaccatatccatatggatttcatcggaaataacccgcacaccatgacgctcgcacaggtcagccatgatctccagctcatcgcacgtccacactttcccggtaagattgtttcgatttctgactgtgttagcctggaagtgcttgtcccaaccttgtttctgagcatgaacgcccgcaagccaacatgttagttgaagcatcagggcgattagcagcatgatatcaaaacgctctgagctgctcgttcggctatggcgtaggcctagtccgtaggcaggacttttcaagtctcggaaggtttcttcaatctgcattcgcttcgaatagatattaacaagttgtttgggtgttcgaattttcaacaggtaaggtagttgctgctcccagtccgctttggggattggctccagatatttttccagctggcggaagtcatgattaatcgctttatcgcgacgcaagcggcgacgacttttctccaggtcaagaaaaccagcttctgcattaccttctgttttcacatagatatggcgaacataacaacagccatgctgacgattaatgctatgcat

SEQ ID NO: 135813 - DNA, 2475 bp, Homo sapiens
  misc_feature (1)...(2475): n = a,t,c or g
atgagactgggatttgaatcaaggggtgagatagcaaaagatcaagctaaacttgatctagcagggcaaaaagaaagggataaccaaagctcaacattgggggaagcagaaaccccattgattatttgctggtcgactctagaggatccccactatgatgtcatagttattgacagcgcgcctaacctgggtatcggcacgattaatgtcgtatgtgctgctgatgtgctgattgttcccacgcctgctgagttgtttgactacacctccgcactgcagtttttcgatatgcttcgtgatctgctcaagaacgttgatcttaaagggttcgagcctgatgtacgtattttgcttaccaaatacagcaatagtaatggctctcagtccccgtggatggaggagcaaattcgggatgcctggggaagcatggttctaaaaaatgttgtacgtgaaacggatgaagttggtaaaggtcagatccggatgagaactgtttttgaacaggccattgatcaacgctcttcaactgatacttcgttatcgacaccagctgccccgatggtggattcgttaattgcgcgcgtaggagtaatggctcgcggtaatgccattactttgcctgtatgtggtcgggatgtgaagtttactcttgaagtgctccggggtgatagtgttgagaagacctctcgggtatggtcaggtaatgaacgtgaccaggagctgcttactgaggacgcactggatgatctcatcccttcttttctactgactggtcaacagacaccggcgttcggtcgaagagtttccttgtaccctctggcaggaggagcgactcaagccttcgcgaaagaaaataaccaaaaagcatacaaagaaacgtacggcgtctctcatattacacgccatgatatgctgcagatccctaaacagcagcaaaacgaaaaataccaagtgcctcaattcgatcaatcaacgattaaaaatattgagtctgcaaaaggacttgatgtgtgggacagctggccgctgcaaaacgctgacggaacagtagctgaatacaacggctatcacgttgtgtttgctcttgcgggaagcccgaaagacgctgatgacacatcaatctacatgttttatcaaaaggtcggcgacaactcaatcgacagctggaaaaacgcgggccgtgtctttaaagacagcgataagttcgacgccaacgatccgatcctgaaagatcagacgcaagaatggtccggttctgcaacctttacatctgacggaaaaatccgtttattctacactgactattccggtaaacattacggcaaacaaagcctgacaacagcgcaggtaaatgtgtcaaaatctgatgacacactcaaaatcaacggagtggaagatcacaaaacgatttttgacggagacggaaaaacatatcagaacgttcagcagtttatcgatgaaggcaattatacatccggcgacaaccatacgctgagagaccctcactacgttgaagacaaaggccataaataccttgtattcgaagccaacacgggaacagaaaacggataccaaggcgaagaatctttatttaccnagcgtgggcacactttgtcaactcgcgggtcactttgggagaactcaaaggtcggcgacaactcaatcgacagttggaaaaacgcgggccgcgtctttaaagacagcgataagttcgacgccaacgatccgatcctgaaagatcagacgcaagaatggtccggttctgcaacctttacatctgacggaaaaatccgtttattctacactgactattccggaaacattacgtctataaagcctgacaacagcgcagtggaagatcacaaaacgatttttgacggagacggaaaaacatatcagaacgttcagcagtttatcgatgaaggcaattatacatccggcgacaaccatacgctgagagaccctcactacgttgaagacaaaggccataaataccttgtattcgaagccaacacgggaacagaaaacggataccaaggcgaagaatctttatttaacaaagcgtactacggcggcggcacgaacttcttccgtaaagaaagccagaagcttcagcagagcgctaaaaaacgcgatgctgagttagcgaacggcgccctcggtatcatagagttaaataatgattacacattgaaaaaagtaatgaagccgctgatcacttcaaacacggtaactgatgaaatcgagcgcgcgaatgttttcaaaatgaacggcaaatggtacttgttcactgattcacgcggttcaaaaatgacgatcgatggtattaactcaaacgatatttacatgcttggttatgtatcaaactctttaaccggcccttacaagccgctgaacaaaacagggcttgggctgcanatgggcaacttggtatctgcgggctacttagagtatccctggcgtgcattggtgtga

SEQ ID NO: 135814 - DNA, 1983 bp, Homo sapiens
atgtgcgaactcgatattttacacgactctctttaccaattctgccccgaattacacttaaaacgactcaacagcttaacgttggcttgccacgcattacttgactgtaaaactctcactcttaccgaacttggccgtaacctgccaaccaaagcgagaacaaaacataacatcaaacgaatcgaccgattgttaggtaatcgtcacctccacaaagagcgactcgctgtataccgttggcatgctagctttatctgttcgggcaatacgatgcccattgtacttgttgactggtctgatattcgtgagcaaaaacgacttatggtattgcgagcttcagtcgcactacacggtcgttctgttactctttatgagaaagcgttcccgctttcagagcaatgttcaaagaaagctcatgaccaatttctagccgaccttgcgagcattctaccgagtaacaccacaccgctcattgtcagtgatgctggctttaaagtgccatggtataaatccgttgagaagctgggttggtactggttaagtcgagtaagaggaaaagtacaatatgcagacctaggagcggaaaactggaaacctatcagcaacttacatgatatgtcatctagtcactcaaagactttaggctataagaggctgactaaaagcaatccaatctcatgccaaattctattgtataaatctcgcactaaaggccgaaaaaatcagcgctcgacacggacacattgtcaccacccgtcacctaaaatctactcagcgtcggcaaaggagccatgggttctagcaactaacttacctgttgaaattcgaacacccaaacaacttgttaatatctattcgaagcgaatgcagattgaagaaaccttccgagacttgaaaagtcctgcctacggactaggcctacgccatagccgaacgagcagctcagagcgttttgatatcatgctgctaatcgccctgatgcttcaactaacatgttggcttgcgggcgttcatgctcagaaacaaggacttgatgtgtgggacagctggccgctgcaaaacgctgacggaacagtagctgaatacaacggctatcacgttgtgtttgctcttgcgggaagcccgaaagacgctgatgacacatcaatctacatgttttatcaaaagatcagacgcaagaatggtccaggttctgcaacctttacatctgacggaaaaatccgtttattctacactgactattccggtaaacattacggcaaacaaagcctgacaacagcgcaggtaaatgtgtcaaaatctgatgacacactcaaaatcaacggagtggaagatcacaaaacgatttttgacggagacggaaaaacatatcagaacgttcagcagtttatcgatgaaggcaattatacatccggcgacaaccatacgctgagagaccctcactacgttgaagacaaaggccataaataccttgtattcgaagccaacacgggaacagaaaacggataccatgagttaaataatgattacacattgaaaaaagtaatgaagccgctgatcacttcaaacacggtaactgatgaaatcgagcgcgcgaatgttttcaaaatgaacggcaaatggtacttgttcactgattcacgcggttcaaaaatgacgatcgatggtattaactcaaacgatatttacatgcttggttatgtatcaaactctttaaccggcccttacaagccgctgaacaaaacagggcttgtgctgcaaatgggtcttgatccaaacgatgtgacattcacttactctcacttcgcagtgccgcaagccaaaggcaacaatgtggttatcacaagctacatgacaaacagaggcttcttcgaggataaaaaggcaacatttgcgccaagcttcttaatgaacatcaaaggcaataaaacatccgttgtcaaaaacagcatcctggagcaaggacagctgacagtcaactaa

SEQ ID NO: 135815 - DNA, 2133 bp, Homo sapiens
ttagttgactgtcagctgtccttgctccaggatgctgtttttgacaacggatgttttattgcctttgatgttcattaagaagcttggcgcaaatgttgcctttttatcctcgaagaagcctctgtttgtcatgtagcttgtgataaccacattgttgcctttggcttgcggcactgcgaagtgagagtaagtgaatgtcacatcgtttggatcaagacccatttgcagcacaagccctgttttgttcagcggcttgtaagggccggttaaagagtttgatacataaccaagcatgtaaatatcgtttgagttaataccatcgatcgtcatttttgaaccgcgtgaatcagtgaacaagtaccatttgccgttcattttgaaaacattcgcgcgctcgatttcatcagttaccgtgtttgaagtgatcagcggcttcattacttttttcaatgtgtaatcattatttaactctatgataccgagggcgccgttcgctaactcagcatcgcgttttttagcgctctgctgaagcttctggctttctttacggaagaagttcgtgccggccgccgtagtacgctttgttaaataaagattcttcgccttggtatccgttttctgttcccgtgttggcttcgaatacaaggtatttatggcctttgtctgcgctgttgtcaggctttgtttgccgtaatgtttaccggaatagtcagtgtagaataaacggatttttccgtcagatgtaaaggttgcagaaccggaccattcttgcgtctgatctttcaggatcggatcgttggcgtcgaacttatcgctgtctttaaagacacggcccgcgtttttccagctgtcgattgagttgtcgccgaccttttgataaaacatgtagattgatgtgtcatcagcgtctttcgggcttcccgcaagagcaaacacaacgtgatagccgttgtattcagctactgttccgtcagcgttttgcagcggccagctgtcccacacatcaagtccttttgcagactcaatatttttaatcgttgattgatcgaattgaggcacttggtatttttcgttttgctgctgtttactgagagatcccctcataatttccccaaagcgtaaccatgtgtgaataaattttgagctagtagggttgcagccacgagtaagtcttccgtttcgatttctgactgtgttagcctggaagtgcttgtcccaaccttgtttctgagcatgaacgcccgcaagccaacatgttagttgaagcatcagggcgattagcagcatgatatcaaaacgctctgagctgctcgttcggctatggcgtaggcctagtccgtaggcaggacttttcaagtctcggaaggtttcttcaatctgcattcgcttcgaatagatattaacaagttgtttgggtgttcgaatttcaacaggtaagttagttgctagaacccatggctcctttgccgacgctgagtagattttaggtgacgggtggtgacaatgagtccgtgtcgagcgctgattttttcggcctttagagcgagatttatacaatagaatttggcatgagattggattgcttttagtcagcctcttatagcctaaagtctttgagtgactagatgacatatcatgtaagttgctgataggtttccagttttccgctcctaggtctgcatattgtacttttcctcttactcgacttaaccagtaccaacccagcttctcaacggatttataccatggcactttaaagccagcatcactgacaatgagcggtgtggtgttactcggtagaatgctcgcaaggtcggctagaaattggtcatgagctttctttgaacattgctctgaaagcgggaacgctttctcataaagagtaacagaacgaccgtgtagtgcgactgaagctcgcaataccataagtcgttttggctcacgaatatcagaccagtcaacaagtacaatgggcatcgtattgcccgaacagataaagctagcatgccaccggtatacagccgagtcgctctttgtggaggtgacgattaccctaagatcccctgcttggagtgggacagtggtcaagacatatacaaccacaaacacccaaacattaacatcaacaagcat

SEQ ID NO: 135816 - DNA, 1872 bp, Homo sapiens
atggccgtcctgcagggagccctggcccgatgcctgcggaggttggagctgtgtctgcaggggatgccttggagatgcctgtgtaggagaagggctcaggcaaggttgcctgctaaaggccagtgccacattggtacaaggtgtgccttgaggaaggacgaggaaaagcagcggaagatagggactgggctgtttgcccatgaacaaggctgccgatggaccagcatcgtggtggtggtgggctctcagctcttccttcacctggctgagttcactattgtgtctgagcccgggaccatgggaggctctgatgccagtttcctgaggctgggacccaaccgaagcctccacttagggatcaatcagggagggcttcctgtaggagttgatgccagagtgggccctggaggagcgactcaagccttcgcgaaagaaaataaccaaaaagcatacaaagaaacgtacggcgtctctcatattacacgccatgatatgctgcagatccctaaacagcagcaaaacgaaaaataccaagtgcctcaattcgatcaatcaacgattaaaaatattgagtctgcaaaaggacttgatgtgtgggacagctggccgctgcaaaacgctgacggaacagtagctgaatacaacggctatcacgttgtgtttgctcttgcgggaagcccgaaagacgctgatgacacatcaatctacatgttttatcaaaaggtcggcgacaactcaatcgacagctggaaaaacgcgggccgtgtctttaaagacagcgataagttcgacgccaacgatccgatcctgaaagatcagacgcaagaatggtccggttctgcaacctttacatctgacggaaaaatccgtttattctacactgactattccggtaaacattacggcaaacaaagcctgacaacagcgcaggtaaatgtgtcaaaatctgatgacacactcaaaatcaacggagtggaagatcacaaaacgatttttgacggagacggaaaaacatatcagaacgttcagcagtttatcgatgaaggcaattatacatccggcgacaaccatacgctgagagaccctcactacgttgaagacaaaggccataaataccttgtattcgaagccaacacgggaacagaaaacggataccaaggcgaagaatctttatttaacaaagcgtactacggcggcggcacgaacttcttccgtaaagaaagccagaagcttcagcagagcgctaaaaaacgcgatgctgagttagcgaacggcgccctcggtatcatagagttaaataatgattacacattgaaaaaagtaatgaagccgctgatcacttcaaacacggtaactgatgaaatcgagcgcgcgaatgttttcaaaatgaacggcaaatggtacttgttcactgattcacgcggttcaaaaatgacgatcgatgagggagggagagagggggaccagccggtccagccccctgcgccagccccgtgggggaaagaggccgcagatgacctcatggaagcaacggtggtgaatcatggcccagaccacattcacatttccccgggggtgggcaagcgtgttgatcaccggaggggcagcttcaacacccagagagatggggggcagggccaggtgattcagaaactgatcgcatgccagagaaccaacgacccactgcccttcagcctcttcacaggggcatttgcaagagaaggagtttttcttttcaccagcgtcattcggaattgccaggacaaggctggtggctggccactactggaagacttccaggcgctctcccctctccagtccctgaaacattttggaagaagggagaggccgggaactttgggtccaacatga

SEQ ID NO: 135817 - DNA, 1516 bp, Homo sapiens; identical to SEQ ID NO: 133356

SEQ ID NO: 135818 - DNA, 3084 bp, Homo sapiens
atgaacatgaacatcaaaaaaattgtaaaacaagccacagttctgacttttacgactgcacttctggcaggaggagcgactcaagccttcgcgaaagaaaataaccaaaaagcatacaaagaaacgtacggcgtctctcatattacacgccatgatatgctgcagatccctaaacagcagcaaaacgaaaaataccaactgcatggtcttctctctccacaacacgcagacactattagaggtaaaagccacgtgtcctcaagagggcaaggcaaagcatcttcagatgtctctgcccttaaagcacacgcgttctgctctgcgacgaagcaggacaaggaggacagggacctgcacctccggaggcccgcacctacgaagatagcgggctcgggaccttcggtggaccggcagggttccagaggcccgcgcgccgccgccccgccctcattgctgagcctgccagcaccggaagtgacgcgttacgtgcccgcgtattcctaccggcgtattcccgccctgcttttcgcccgccgttccgtggcgggaactgaggcgactgtggggacatcagtgatccatccacccaacccaccagtatcaccaggaaaaactgtaaatgatgtcaacagcaataataacatgtcttacagaaatgcaggcacagtgagacagatgctggagtccaaaagaaatgtaagcgagagtgcaccaccatcctttcaaactcctgtgaatacagtatcttcaaccaatcttgtcactcctccagcagttgtcagtagtcaacctaaattgcagactccagtgacttcgggttccctcacagcaacgtcagttcttcctgcacccaatacagctactgtagttgctactactcagtcaattcgggaggatcgaaacggcagatcgcaaaaaacagtacatacagaaggagacatgaacatgaacatcaaaaaaattgtaaaacaagccacagttctgacttttacgactgcacttctggcaggaggagcgactcaagccttcgcgaaagaaaataaccaaaaagcatacaaagaaacgtacggcgtctctcatattacacgccatgatatgctgcagatccctaaacagcagcaaaacgaaaaataccaagtgcctcaattcgatcaatcaacgattaaaaatattgagtctgcaaaaggacttgatgtgtgggacagctggccgctgcaaaacgctgacggaacagtagctgaatacaacggctatcacgttgtgtttgctcttgcgggaagcccgaaagacgctgatgacacatcaatctacatgttttatcaaaaggtcggcgacaactcaatcgacagctggaaaaacgcgggccgtgtctttaaagacagcgataagttcgacgccaacgatccgatcctgaaagatcagacgcaagaatggtccggttctgcaacctttacatctgacggaaaaatccgtttattctacactgactattccggtaaacattacggcaaacaaagcctgacaacagcgcaggtaaatgtgtcaaaatctgatgacacactcaaaatcaacggagtggaagatcacaaaacgatttttgacggagacggaaaaacatatcagaacgttcagcagtttatcgatgaaggcaattatacatccggcgacaaccatacgctgagagaccctcactacgttgaagacaaaggccataaataccttgtattcgaagccaacacgggaacagaaaacggataccaaggcgaagaatctttatttaacaaagcgtactacggcggcggcacgaacttcttccgtaaagaaagccagaagcttcagcagagcgctaaaaaacgcgatgctgagttagcgaacggcgccctcggtatcatagagttaaataatgattacacattgaaaaaagtaatgaagccgctgatcacttcaaacacggtaactgatgaaatcgagcgcgcgaatgttttcaaaatgaacggcaaatggtacttgttcactgattcacgcggttcaaaaatgacgatcgatggtattaactcaaacgatatttacatgcttggttatgtatcaaactctttaaccggcccttacaagccgctgaacaaaacagggcttgtgctgcaaatgggtcttgatccaaacgatgtgacattcacttactctcacttcgcagtgccgcaagccaaaggcaacaatgtggttatcacaagctacatgacaaacagaggcttcttcgaggataaaaaggcaacatttgcgccaagcttcttaatgaacatcaaaggcaataaaacatccgttgtcaaaaacagcatcctggagcaaggacagctgacatggctccaagtagcgaagcgagcaggactgggcggcggccaaagcggtcggacagtgctccgagaacgggtgcgcatagaaattgcatcaacgcatatagcgctagctgtggaatgtgtgtcagttagggtgtggaaagtccccaggctccccagcaggcagaagtatgcaaagcatgcatctcaattagtcagcaaccagaaatcggaggaagaagaatatatgaaaacatttaacatttctcaacaagatctagaattagtagaagtagcgacagagaagattacaatgctttatgaggataataaacatcatgtgggagcggcaattcgtacgaaaacaggagaaatcatttcggcagtacatattgaagcgtatataggacgagtaactgtttgtgcagaagccattgcgattggtagtgcagtttcgaatggacaaaaggattttgacacgattgtagctgttagacacccttattctgacgaagtagatagaagtattcgagtgattccaacctatggaactgatgaatgggagcagtggtggaatgcctttaatgaggaaaacctgttttgctcagaagaaatgccatctagtgatgatgaggctactgctgactctcaacattctactcctccaaaaaagaagagaaagtacatctacgtattagtcatcgctattaccatggtgatgcggttttggcagtacatcaatgggcgtggatag

SEQ ID NO: 135819 - DNA, 1353 bp, Homo sapiens
ctcccttcctgcctcctttaggagtccgcagtatctattgtttctatctccatgttcatgagtacccagtgtgccagtctcacttatacgtgagaaaatgcggtatttgattttccgtttccccattaattcatttaggataatggcctccagttgcatccatgtttcatgtgtgaataaattttgagctagtagggttccagccacgagtaagtcttcccttgttattgtgtagccagaatgccgcaaaacttccatgcctaagcgaactgttgagagtacgtttcgatttctgactgtgttagcctggaagtgcttgtcccaaccttgtttctgagcatgaacgcccgcaagccaacatgttagttgaagcatcagggcgattagcagcatgatatcaaaacgctctgagctgctcgttcggctatggcgtaggcctagtccgtaggcaggacttttcaagtctcggaaggtttcttcaatctgcattcgcttcgaatagatattaacaagttgtttgggtgttcgaatttcaacaggtaagttagttgctagaacccatggctcctttgccgacgctgagtagattttaggtgacgggtggtgacaatgagtccgtgtcgagcgctgattttttcggcctttagagcgagatttatacaatagaatttggcatgagattggattgcttttagtcagcctcttatagcctaaagtctttgagtgactagatgacatatcatgtaagttgctgataggtttccagttttccgctcctaggtctgcatattgtacttttcctcttactcgacttaaccagtaccaacccagcttctcaacggatttataccatggcactttaaagccagcatcactgacaatgagcggtgtggtgttactcggtagaatgctcgcaaggtcggctagaaattggtcatgagctttctttgaacattgctctgaaagcgggaacgctttctcataaagagtaacagaacgaccgtgtagtgcgactgaagctcgcaataccataagtcgtttttgctcacgaatatcagaccagtcaacaagtacaatgggcatcgtattgcccgaacagataaagctagcatgccaacggtatacagcgagtcgctctttgtggaggtgacgattacctaacaatcggtcgattcgtttgatgttatgttttgttctcgctttggttggcaggttacggccaagttcggtaagagtgagagttttacagtcaagtaatgcgtggcaagccaacgttaagctgttgagtcgttttaagtgtaattcggggcagaattggtaaagagagtcgtgtaaaatatcgagttcgcacat

SEQ ID NO: 135820 - DNA, 2044 bp, Homo sapiens
atggaagccacagggtatacagagatacaagaaggcatcaaagatggatctttgcagaacctctgcctgaaggagacagaaggggcatctggaaagaaaggaggagacctcagaacacagttgccttggctacagcagcagcagttcctttcgatcatagcactcttacgccagtgtggcattgctgacaacttcaccacctgcccctacacttctacaccagcagagacacaccttcctctcccctcagcagcacagaaagccaaagccacagccctctgccatttctgtgactccccaaagcactgggtggaaagaacactatgtaggcattattctgaggtcacacgtgtttaccttaaccccagaatttgtgcagatctttctgcctttgctgatttgcctggtgtgacctggggcacaacccactctcatccgaagtcataccagggctctacggcggtcaccatgactgtagaaactacccctcaagagcatccacttccacacacactgtcacctaaatgtcgacggccaggcggccgccaggcctacccactagtcaattcgggaggatcgaaacggcagatcgcaaaaaacagtacatacagaaggagacatgaacatgaacatcaaaaaaattgtaaaacaagccacagttctgacttttacgactgcacttctggcaggaggagcgactcaagccttcgcgaaagaaaataaccaaaaagcatacaaagaaacgtacggcgtctctcatattacacgccatgatatgctgcagatccctaaacagcagcaaaacgaaaaataccaagtgcctcaattcgatcaatcaacgattaaaaatattgagtctgcaaaaggacttgatgtgtgggacagctggccgctgcaaaacgctgacggaacagtagctgaatacaacggctatcacgttgtgtttgctcttgcgggaagcccgaaagacgctgatgacacatcaatctacatgttttatcaaaaggtcggcgacaactcaatcgacagctggaaaaacgcgggccgtgtctttaaagacagcgataagttcgacgccaacgatccgatcctgaaagatcagacgcaagaatggtccggttctgcaacctttacatctgacggaaaaatccgtttattctacactgactattccggtaaacattacggcaaacaaagcctgacaacagcgcaggtaaatgtgtcaaaatctgatgacacactcaaaatcaacggagtggaagatcacaaaacgatttttgacggagacggaaaaacatatcagaacgttcagcagtttatcgatgaaggcaattatacatccggcgacaaccatacgctgagagaccctcactacgttgaagacaaaggccataaataccttgtattcgaagccaacacgggaacagaaaacggataccaaggcgaagaatctttatttaacaaagcgtactacggcggcggcacgaacttcttccgtaaagaaagccagaagcttcagcagagcgctaaaaaacgcgatgctgagttagcgaacggcgccctcggtatcatagagttaaataatgattacacattgaaaaaagtaatgaagccgctgatcacttcaaacacggtaactgatgaaatcgagcgcgcgaatgttttcaaaatgaacggcaaatggtacttgttcactgattcacgcggttcaaaaatgacgatcgatggtattaactcaaacgatatttacatgcttggttatgtatcacactctttaaccggcccttacaagccgctgaacaaaacagggcttgtgctgcaaatgggtcttgatccaaacgatgtgacattcacttactctcacttcgcagtgccgcaagccaaaggcaacaatgtggttatcacaagctacatgacaaacagaggcttcttcgaggataaaaaggcaacatttgcgccaagcttcttaatgaacatcaaaggcaataaaacatccgttgtcaaaaacagcatcctggagcaaggacagctgacagtcaactaa

SEQ ID NO: 135821 - DNA, 2814 bp, Homo sapiens
atgaacatgaacatcaaaaaaattgtaaaacaagccacagttctgacttttacgactgcacttctggcaggaggagcgactcaagccttcgcgaaagaaaataaccaaaaagcatacaaagaaacgtacggcgtctctcatattacacgccatgatatgctgcagatccctaaacagcagcaaaacgaaaaataccaagtgcctcaattcgatcaatcaacgattaaaaatattgagtctgcaaaaggacttgatgtgtgggacagctggccgctgcaaaacgctgacggaacagtagctgaatacaacggctatcacgttgtgtttgctcttgcgggaagcccgaaagacgctgatgacacatcaatctacatgttttatcaaaaggtcggcgacaactcaatcgacagctggaaaaacgcgggccgtgtctttaaagacagcgataagttcgacgccaacgatccgatcctgaaagatcagacgcaagaatggtccggttctgcaacctttacatctgacggaaaaatccgtttattctacactgactattccggtaaacattacggcaaacaaagcctgacaacagcgcaggtaaatgtgtcaaaatctgatgacacactcaaaatcaacggagtggaagatcacaaaacgatttttgacggagacggaaaaacatatcagaacgttcagcagtttatcgatgaaggcaattatacatccggcgacaaccatacgctgagagaccctcactacgttgaagacaaaggccataaataccttgtattcgaagccaacacgggaacagaaaacggataccaaggcgaagaatctttatttaacaaagcgtactacggcggcggcacgaacttcttccgtaaagaaagccagaagcttcagcagagcgctaaaaaacgcgatgctgagttagcgaacggcgccctcggtatcatagagttaaataatgattacacattgaaaaaagtaatgaagccgctgatcacttcaaacacggtatttattcgcgataagctcatggagcggcgtaaccgtcgcacaggaaggacagagaaagcgcggatctgggaagtgacggacagaacggtcaggacctggattggggaggcggttgccgccgctgctgctgacggtgtgacgttctctgttccggtcacaccacatacgttccgccattcctatgcgatgcacatgctgtatgccggtataccgctgaaagttctgcaaagcctgatgggacataagtccatcagttcaacggaagtctacacgaaggtttttgcgctggatgtggctgcccggcaccggtgtgacaatctaaaaacttgtcacacttcacatggatctgtcatggcggaaacagcggttatcaatcacaagaaacgtaaaaatagcccgcgaatcgtccagtcaaacgacctcactgaggcggcatatagtctctcccgggatcaaaaacgtatgctgtatctgttcgttgaccagatcagaaaatctgatggcaccctacaggaacatgacggtatctgcgagatccatgttgctaaatatgctgaaatattcggattgacctctgcggaagccagtaaggatatacggcaggcattgaagagtttcgcggggaaggaagtggttttttatcgccctgaagaggatgccggcgatgaaaaaggctatgaatcttttccttggtttatcaaacgtgcgcacagtccatccagagggctttacagtgtacatatcaacccatatctcattcccttctttatcgggttacagaaccggtttacgcagtttcggcttagtgaaacaaaagaaatcaccaatccgtatgccatgcgtttatacgaatccctgtgtcagtatcaaacgtacggcgtctctcaaatatacaaaaatgatatactgcagatccctaaacagcagcaaaacgaaaaataccaagtgcctcaattcgatcaatcaacgattaaaaatattgagtctgcaaaaggacttgatgtgtgggacagctggccgctgcaaaacgctgacggaacagtagctgaatacaacggctatcacgttgtgtttgctcttgcgggaagcccgaaagacgctgatgacacatcaatctacatgttttatcaaaaggtcggcgacaactcaatcgacagctggaaaaacgcgggccgtgtctttaaagacagcgataagttcgacgccaacgatccgatcctgaaagatcagacgcaagaatggtccggttctgcaacctttacatctgacggaaaaatccgtttattctacactgactattccggtaaacattacggcaaacaaagcctgacaacagcgcaggtaaatgtgtcaaaatctgatgacacactcaaaatcaacggagtggaagatcacaaaacgatttttgacggagacggaaaaacatatcagaacgttcagcagtttatcgatgaaggcaattatacatccggcgacaaccatacgctgagagaccctcactacgttgaagacaaaggccataaataccttgtattcgaagccaacacgggaacagaaaacggataccaaggcgaagaatctttatttaacaaagcgtactacggcggcggcacgaacttcttcctgccgcaagccaaaggcaacaatgtggttatcacaagctacatgacaaacagaggcttcttcgaggataaaaaggcaacatttgcgccaagcttcttaatgaacatcaaaggcaataaaacatccgttgtcaaaaacagcatcctggagcaaggacagctgacagtcaactaa

SEQ ID NO: 135822 - DNA, 2499 bp, Homo sapiens
atgagccgcctgctctggaggaaggtggccggcgccaccgtcgggccagggccggttccagctccggggcgctgggtctccagctccgtccccgcgtccgaccccagcgacgggcagcggcggcggcagcagcagcagcagcagcagcagcagcagcaacagcagcctcagcagccgcaagtgctatcctcggagggcgggcagctgcggcacaacccattggacatccagatgctctcgagagggctgcacgagcaaatcttcgggcaaggaggggagatgcctggcgaggccgcggtgcgccgcagcgtcgagcacctgcagaagcacgggctctgggggcagccagccgtgcccttgcccgacgtggagctgcgcctgccgcccctctacggggacaacctggaccagcacttccgcctcctggcccagaagcagagcctgccctacctggaggcggccaacttgctgttgcaggcccagctgcccccgaagcccccggcttgggcctgggcggagggctggacccggtacggccccgagggggaggccgtacccgtggccatccccgaggagcgggccctggtgttcgacgtggaggtctgcttggcagagggaacttgccccacattggcggtggccatatccccctcggcctgcttaacgttggcttgccacgcattacttgactgtaaaactctcactcttaccgaacttggccgtaacctgccaaccaaagcgagaacaaaacataacatcaaacgaatcgaccgattgttaggtaatcgtcacctccacaaagagcgactcgctgtataccgttggcatgctagctttatctgttcgggcaatacgatgcccattgtacttgttgactggtctgatatccgtgagcaaaaacggcttatggtattgcgagcttcagtcgcactacacggtcgttctgttactctttatgagaaagcgttcccgctttcagagcaatgttcaaagaaagctcatgaccaatttctagccgaccttgcgagcattctaccgagtaacaccacaccgctcattgtcagtgatgctggctttaaagtgccatggtataaatccgttgagaagctgggttggtactggttaagtcgagtaagaggaaaagtacaatatgcagacctaggagcggaaaactggaaacctatcagcaacttacatgatatgtcatctagtcactcaaagactttaggctataagaggctgactaaaagcaatccaatctcatgccaaattctattgtataaatctcgctctaaaggccgaaaaaatcagcgctcgacacggactcattgtcaccacccgtcacctaaaatctactcagcgtcggcaaaggagccatgggttctagcaactaacttacctgttgaaattcgaacacccaaacaacttgttaatatctattcgaagcgaatgcagattgaagaaaccttccgagacttgaaaagtcctgcctacggactaggcctacgccatagccgaacgagcagctcagagcgttttgatatcatgctgctaatcgccctgatgcttcaactaacatgttggcttgcgggcgttcatgctcagaaacaagtggtacagacctgcgcccctgtgctccaggaagcgccttctgaggctgagtttggaggaagtgaagccacctcagaactgaacccctcctcagtggagcccccgggggtgaccccagcgcttccttctgcagcctgtggcttatgcatgagtgtgacagaagctccttctgcttcttgccaccagatgaacttcctgctgagtaattggagctggagaaatggtgcatccatccagctgctgcgcttggagactttgattaagggtcagcaggttaacttgttgccattcagcatgcaggcgggctcctcatcctgtcctgaggagtccctggccaccaccctgggttcagcaggagcagggcacaccactgtagcactatttcaagacttcctgttccgaggagagattttaattatccctggagacatgtctgaattacaaacccccacgggcccatggcacacactgtttatgttcttccaaagggatgttgtttgtgatctggagcgtgggctcaagaggcttgctgctttctcgtttgccatcttggggcactgttgtgaggctgccatgcaagtccagctactgcagggtgagaagcctcgaggaggaggaggacagagccttccccggccaacagcctgcaccacctgccgaacagtggagaagggagtttcattctccatcaccatcaccatcaacaacatcatcatcatcatcaccatcaccatcatcattaccatcattattatcaacatcatcctcaccatcatcattatcatcatcaccatcattaccatcaccatcatcatcttaaccattgttatcatcatcactgtcatcaccatcattatcatcatcaccatcactatcatttgcttctga

SEQ ID NO: 135823 - DNA, 3723 bp, Homo sapiens
  misc_feature (1)...(3723): n = a,t,c or g
atgccaccactcggccaagaaggcgtgtttggctacgacagcccagagtccagagccacggcacttccggttgctgtccacgcggcttctgctgacaatccaggcctgctctgcaacaagaatagattcttctggaatgttttccccatggctcaccctcatggaagcacaaaggccatcccacagaggggcacaaaggaaacagctatgacgagcaaggccaacacaacacaaaacaacacccacaagtaccacagctggccgctgcaaaacgctgacggaacagtagctgaatacaacggctatcacgttgtgtttgctcttgcgggaagcccgaaagacgctgatgacacatcaatctacatgttttatcaaaaggtcggcgacaactcaatcgacagctggaaaaacgcgggccgtgtctttaaagacagcgataagttcgacgccaacgatccgatcctgaaagatcagacgcaagaatggtccggttctgcaacctttacatctgacggaaaaatccgtttattctacactgactattccggtaaacattacggcaaacaaagcctgacaacagcgcaggtaaatgtgtcaaaatctgatgacacactcaaaatcaacggagtggaagatcacaaaacgatttttgacggagacggaaaaacatatcagaacgttcagcagtttatcgatgaaggcaattatacatccggcgacaaccatacgctgagagaccctcactacgttgaagacaaaggccataaataccttgtattcgaagccaacacgggaacagaaaacggataccaaggcgaagaatctttatttaacaaagcgtactacggcggcggcacgaacttcttccgtaaagaaagccagaagcttcagcagagcgctaaaaaacgcgatgctgagttagcgaacggcgccctcggtatcatagagttaaataatgattacacattgaaaaaagtaatgaagccgctgatcacttcaaacacggtaactgatgaaatcgagcgcgcgaatgttttcaaaatgaacggcaaatgnaggaaccccctgcagatccctaaacagcagcaaaacgaaaaataccaagtgcctcaattcgatcaatcaacgattaaaaatattgagtctgcaaaaggacttgatgtgtgggacagctggccgctgcaaaacgctgacggaacagtagctgaatacaacggctatcacgttgtgtttgctcttgcgggaagcccgaaagacgctgatgacacatcaatctacatgttttatcaaaaggtcggcgacaactcaatcgacagctggaaaaacgcgggccgtgtctttaaagacagcgataagttcgacgccaacgatccgatcctgaaagatcagacgcaagaatggtccggttctgcaacctttacatctgacggaaaaatccgtttattctacactgactattccggtaaacattacggcaaacaaagcctgacaacagcgcagatattccagatgattacagtttttattaccagcctctgcaacactacctccagccacatctgtctccacatcagctgggtcaccacaatgcacggcgccatgcctcatcccggccacatccccacagcccctgcttctttacctgccaaggtgaaaggttccgggaaggtctgctggctggccttccctttatcagaactcaccccccccagtgccttacaggtaaatgtgtcaaaatctgatgacacactcaaaatcaacggagtggaagatcacaaaacgatttttgacggagacggaaaaacatatcagaacgttcagcattttatcgatgaaggcaattatacatgcggcgacaaccatacgctgagagaccctcactacgttgaagacaaaggccataaataccttgtattcgaagccaacacgggaacagaaaacggataccaaggcgaagaatctttatttaacaaagcgtactacggcggcggcacgaacttcttccgtaaagaaagccagaagcttcagcagagcgctaaaaaacgcgatgctgagttagcgaacggcgccctcggtatcatagagttaaataatgattacacattgaaaaaagtaatgaagccgctgatcacttcaaacacggtaactgatgaaatcgagcgcgcgaatgttttcaaaatgaacggcaaatggtacttgttcactgattcacgcggttcaaaaatgacgatcgatggtattaactcaaacgatatttacatgcttggttatgtatcaaactctttaaccggcccttacaagccgctgaacaaaacagggcttgtgctgcaaatgggtcttgatccaaacgatgtgacattcacttactctcacttcgcagtgccgcaagccaaaggcaacaatgtggttatcacaagctacatgacaaacagaggcttcttcgaggataaaaaggcaacatttgcgccaagctctgatgaatcccctaatgattttggtaatcgtcacctccacaaagagcgactcgctgtataccgttggcatgctagctttatctgttcgggcaatacgatgcccattgtacttgttgactggtctgatattcgtgagcaaaaacgacttatggtattgcgagcttcagtcgcactacacggtcgttctgttactctttatgagaaagcgttcccgctttcagagcaatgttcaaagaaagctcatgaccaatttctagccgaccttgcgagcattctaccgagtaacaccacaccgctcattgtcagtgatgctggctttaaagtgccatggtataaatccgttgagaagctgggttggtactggttaagtcgagtaagaggaaaagtacaatatgcagacctaggagcggaaaactggaaacctatcagcaacttacatgatatgtcatctagtcactcaaagactttaggctataagaggctgactaaaagcaatccaatctcatgccaaattctattgtataaatctcgctctaaaggccgaaaaaatcagcgctcgacacggactcattgtcaccacccgtcacctaaaatctactcagcgtcggcaaaggagccatgggttctagcaactaacttacctgttgaaattcgaacacccaaacaacttgttaatatctattcgaagcgaatgcagattgaagaaaccttccgagacttgaaaagtcctgcctacggactaggcctacgccatagccgaacgagcagctcagagcgttttgatatcatgctgctaatcgccctgatgcttcaactaacatgttggcttgcgggcgttcatgctcagaaacaaggttgggacaagcacttccaggctaacacagtcagaaatcgaaacgtactctcaacagttcgcttaggcatggaagttttgcggcattctggctacacaataacaagggaagacttactcgtggctgcaaccctactagctcaaaatttattcacacatggtctcttcggccccagcgtcgacgcaccgcctccaaaacggggcttcaaacgtcctaaactcccagaacttcgtttacagcgcttcttcggtggggtgatcacccctccgctggaatcctattcgctcccatccgatcctgttcacctcttccccccccgccgaccccctcggcagcttactgcttctccgcttcgcgcccgagctccgtatgaatgttcatcatgcaaagatgct

SEQ ID NO: 135824 - DNA, 3505 bp, Homo sapiens
atgcgtatgttgcaggaagagaatatctggatcgtcggtacggcaggcgaggcggatcatacactctatcagagcaaaatgaccggacgcctggcgctggtgataatgcaccacattatgggaaaactctttttcacagtatttgcatttgagcgcgatatcattgataccttaaaagtggtgctgatcccggtgctgatcgccggagcaactgcgctattactgagtcgcgcgctgaacagtttgagcctcggcagcgacaccgcgacggcgctgggcagtcgcgtggcgcgcacacagttgattggtctgctggcgattaccgtgctttgtggtagtgcgacggcaatagttggcccgattgcctttattggcctgatgatgccgcatatggcgcgttggctggtgggtgccgatcatcgctggtcgctgcccgtcacgctacttgctacccctgttgtcaccaccccgtcggcaaaggagccatggattctagcaactaacttacctgttgaaattcgaacacccaaacaacttgttaatatctattcgaagcgaatgcagattgaagaaaccttccgagacttgaaaagtcctgcctacggactaggcctacgccatagccgaacgagcagctcagagcgttttgatatcatgctgctaatcgccctgatgcttcaactaacatgttggcttgcgggcgttcatgctcagaaacaaggttgggacaagcacttccaggctaacacagtcagaaatcgaaacgtactctcaacagttcgcttaggcatggaagttttgcggcattctggctacacaataacaagggaagacttactcgtggctgcaaccctactagctcaaaatttattcacacatggctatcgccattgcacagtttaatgatgacagcccggaagcgaggaaaataacccggcgctggagaataggtgaagcagcggatttagttggggtttcttctcaggctatcagagatgccgagaaagcagggcgactaccgcacccggatatggaaattcgaggacgggttgagcaacgtgttggttatacaattgaacaaattaatcatatgcgtgatgtgtttggtacgcgattgcgacgtgctgaagacgtatttccaccggtgatcggggttgctgcccataaaggtggcgtttacaaaacctcagtttctgttcatcttgctcaggatctggctctgaaggggctacgtgttttgctcgtggaaggtaacgacccccagggaacagcctcaatgtatcacggatgggtaccagatcttcatattcatgcagaagacactctcctgcctttctatcttggggaaaaggacgatgtcacttatgcaataaagcccacttgctggccggggcttgacattattccttcctgtctggctctgcaccgtattgaaactgagttaatgggcaaatttgatgaaggtaaactgcccaccgatccacacctgatgctccgactggccattgaaactgttgctcatgactatgatgtcatagttattgacagcgcgcctaacctgggtatcggcacgattaatgtcgtatgtgctgctgatgtgctgattgttcccacgcctgctgagttgtttgactacacctccgcactgcagtttttcgatatgcttcgtgatctgctcaagaacgttgatcttaaagggttcgagcctgatgctgaaacaagccagggagctctgggcacactggcaaatgtagtgacctcccttgccaacctaagtgaatctttgaacaacggtgacacttcagaaatccagccagaggaccagtctgcaagtgagataactcgggcatttgataccttagctaaagcacttaataccacagacagctcctcttctccaagcttggcagatgggatagacaccagtggaggagggagcatccacgtcatcagcagagaccagtcgacacccatcattgaggttgaaggccccctcctttcagacacacacgtcacatttaagtcaattcgggaggatcgaaacggcagatcgcaaaaaacagtacatacagaaggagacatgaacatgaacatcaaaaaaattgtaaaacaagccacagttctgacttttacgactgcacttctggcaggaggagcgactcaagccttcgcgaaagaaaataaccaaaaagcatacaaagaaacgtacggcgtctctcatattacacgccatgatatgctgcagatccctaaacagcagcaaaacgaaaaataccaagtgcctcaattcgatcaatcaacgattaaaaatattgagtctgcaaaaggacttgatgtgtgggacagctggccgctgcaaaacgctgacggaacagtagctgaatacaacggctatcacgttgtgtttgctcttgcgggaagcccgaaagacgctgatgacacatcaatctacatgttttatcaaaaggtcggcgacaactcaatcgacagctggaaaaacgcgggccgtgtctttaaagacagcgataagttcgacgccaacgatccgatcctgaaagatcagacgcaagaatggtccggttctgcaacctttacatctgacggaaaaatccgtttattctacactgactattccggtaaacattacggcaaacaaagcctgacaacagcgcaggtaaatgtgtcaaaatctgatgacacactcaaaatcaacggagtggaagatcacaaaacgatttttgacggagacggaaaaacatatcagaacgttcagcagtttatcgatgaaggcaattatacatccggcgacaaccatacgctgagagaccctcactacgttgaagacaaaggccataaataccttgtattcgaagccaacacgggaacagaaaacggataccaaggcgaagaatctttatttaacaaagcgtactacggcggcggcacgaacttcttccgtaaagaaagccagaagcttcagcagagcgctaaaaaacgcgatgctgagttagcgaacggcgccctcggtatcatagagttaaataatgattacacattgaaaaaagtaatgaagccgctgatcacttcaaacacggtaactgatgaaatcgagcgcgcgaatgttttcaaaatgaacggcaaatggtacttgttcactgattcacgcggttcaaaaatgacgatcgatggtattaactcaaacgatatttacatgcttggttatgtatcaaactctttaaccggcccttacaagccgctgaacaaaacagggcttgtgctgcaaatgggtcttgatccaaacgatgtgacattcacttactctcacttcgcagtgccgcaagccaaaggcaacaatgtggttatcacaagctacatgacaaacagaggcttcttcgaggataaaaaggcaacatttgcgccaagcttcttaatgaacatcaaaggcaataaaacatccgttgtcaaaaacagcatcctggagcaaggacagctgacagtcaactaa

SEQ ID NO: 135825 - DNA, 6033 bp, Homo sapiens
  misc_feature (1)...(6033): n = a,t,c or g
atgcccttgagagccttcaacccagtcagctccttccggtgggcgcggggcatgactatcgtcgccgcacttatgactgtcttctttatcatgcaactcgtaggacaggtgccggcagcgctctgggtcattttcggcgaggaccgctttcgctggagcgcgacgatgatcggcctgtcgcttgcggtattcggaatcttgcacgccctcgctcaagccttcgtcactggtcccgccaccaaacgtttcggcgagaagcaggccattatcgccggcatggcggccgacgcgctgggctacgtcttgctggcgttcgcgacgcgaggctggatggccttccccattatgattcttctcgcttccggcggcatcgggatgcccgcgttgcaggccatgctgtccaggcagcctaacttcgatcattggaccgctgatcgtcacggcgatttatgccgcctcggcgagcacatggaacgggttggcatggattgtaggcgccgccctataccttgtctgcctccccgcgttgcgtcgcggtgcatggagccgggccacctcgacctgaatggaagccggcggcacctcgctaacggattcaccactccaagaattggagccaatcaattcttgcggagaactgtgaatgcgcaaaccaacccttggcagaacatatccatcgcgtccgccatctccagcagccgcacgcggcgcatctcgggcagcgttgggtcctggccacggtctggaaacgcggaagtcagcgccctgcaccattatgttccggatctgcatcgcaggatgctgctggctaccctgtggaacacctacatctgtattaacgaagcgctggcattgaccctgagtgatttttctctggtcccgccgcatccataccgccagttgtttaccctcacaacgttccataaccgggcatgttcatcatcagtaacccgtatcgtgagcatcctctctcgtttcatcggtatcattacccccatgaacagaaatcccccttacacggaggcatcagtgaccaaacaggaaaaaaccgcccttaacatggcccgctttatcagaagccagacattaacgcttctggagaaactcaacgagctggacgcggatgaacaggcagacatctgtgaatcgcttcacgaccacgctgatgagctttaccgcagctgcctcgcgcgtttcggtgatgacggaggagcgactcaagccttcgcgaaagaaaataaccaaaaagcatacaaagaaacgtacggcgtctctcatattacacgccatgatatgctgcagatccctaaacagcagcaaaacgaaaaataccaaagtgcctcaattcgatcaatcaacgattataaatattgagtctgcaaaaggacttgatgtgtgggacagctggccgctgcaaaacgctgacggaacagtagctgaatacaacggctatcacgttgtgtttgctcttgcgggaagcccgaaagacgctgatgacacatcaatctacatgttttatcaaaaggtcggcgacaactcaatcgacagctggaaaaacgcgggccgtgtctttaaagacagcgataagttcgacgccaacgatccgatcctgaaagatcagacgcaagaatggtccggttctgcaacctttacatctgacggaaaaatccgtttattctacactgactattccggtaaacattacggcaaacaaagcctgacaacagcgcaggtaaatgtgtcaaaatctgatgacacactcaaaatcaacggagtggaagatcacaaaacgatttttgacggagacggaaaaacatatcagaacgttcagcagtttatcgatgaaggcaattatacatccggcgacaaccatacgctgagagaccctcactacgttgaagacaaaggccataaataccttgtattcgaagccaacacgggaacaaaaaaacggataccaaggcgaagaatctttatttaacaaagccgtactacgggcgggcggcacgaacttctttccgtaaagaaagccagaagcttcaagcagagcgctaaaaaacgcgatgctgagttagcgaacggcgccctcggtatcatagagttaaataatgattacacattgaaaaaagtaatgaagccgcttatcactttaaacaccgtaactgatgaaatcgagcgcgcgaatgttttcaaaatgaaacgcaaagggtacttgttcactgattcacgcggttcaaaaatgacgatcgatggtattaactcaaacgatatttacatgcttggttatgtatcaaactctgtaaccggcccttacaagccgctgaacaaaacagggcttgtgctgcaaatgggtcttgatccaaacgatgtgacattcacttactctcacttcgcagtgccgcaagccaaaggcaacaatgtggttatcacaagctacatgacaaacagaggcttcttcgaggataaaaaggcaacatttgcgccaagcttcttaatgaacatcaaaggcaataaaacatccgttgtcaaaaacagcatcctggagcaaggacagctgacagtcgggggccaaccccttcgcccagtgaaaaaccgcggccgggtctttaaaaacagcgatagttcgacgcccaacgatccgatcctgaaagatcagacgcaagaatggtccggttctgcaacctttacctctgagggaaaaatccgtttattctacactgactattccggtaaacattccggcaaacaaagcttgacaacagcgcaggtaaatgtgtcaaaatctgatgacacactcaaaatcaacggagtggaagatcacaaaacgatttttgacggagacggaaaaacatatcagaacgttcagcagtttatcgatgaaggcaattatacatccggcgacaaccatacgctgagagaccctcactacgttgaagacaaaggccataaataccttgtattcgaagccaacacgggaacagaaaacggataccaaggcgaagaatctttatttaacaaagcgtactacggcggcggcacgaacttcttccgtaaagaaagccagaagcttcagcagagcgctaaaaaacgcgatgctgagttagcgaacggcgccctcggtatcatagagttaaataatgattacacattgaaaaaagtaatgaagccgctgatcacttcaaacacggtaactgatgaaatcgagcgcgcgaatgttttcaaaatgaacggcaaatggtacttgttcactgattcacgcgggtcaaaaatgacgatcgatgacatgttagttgttgcaaacgttgtgggaaccggaggtgaatccacggtttatccgttgggtttggtctgcggggaagcccgaaagccggttgattccccaccattctccagttttatcaaagggtggcggccactccaatcgcaagctggaaaacgggggccggttcttaaagacagcgataagttcgacgccacgatcccgatcctgaagatccagacgcaaagaatgtcgggttctgcaacctttacatctgacggaaaaatccgtttattctacactgactattccggtaaacattacggcaaacaaagcctgacaacagcgcaggtaaatgtgtcaaaatctgatgacacactcanaatcaacggagtggaagatcacaaaacgatttttgacggagacggaaaaacatatcagaacgttcagcagtttatcgatgaaggcaattatacatccggcgacaaccatacgctgagagaccctcactacgttgaagacaaaggccataaataccttgtattcgaagccaacacgggaacagaaaacggataccaaggcgaagaatctttatttaacaaagcgtactacggcggcggcacgaacttcttccgtaaagaaagccagaagcttcagcagagcgctaaaaaacgcgatgctgagttagcgaacggcgccctcggtatcatagagttaaataatgattacacattgaaaaaagtaatgaagccgctgatcacttcaaacacggtaactgatgaaatcgagcgcgcgaatgttttcaaaatgaacggcaaatggtacttgttcactgattcacgcggttcaaaaatgacgatcgatgtctcaagccatcgaaaggccacgccgcgcacaccgcccagcgaccggccgccgcccgcgtgcggcagcaaagcaacacaaaaacaggcaccaccgaccaggcgtcccgggaaagacagaaaacccacaacacggcgccgacaactggggaagacacgcaagagggcccgagaacagagcggacgcccccgggcacaagagggaaacgccgaacaggaagacccggcacaacacaaaacgagcaaagggaagagagaaagagccaccaagcacaggaaaaggcgggacaggccaccagcaaacaaggcgagccacaccccccccacaacgaaatacgacctcacactcactagaacgcgacaatgtcctgtgcatgtagccagggtgttactccaactgaagtgggtcactttccatgactccaactccagagtattggtgcagatgttttgtgcaggggaagagcataatgaacgaggactcttagagtccaagaccgttcagctggatattacggcctttttaaagaccgtaaagaaaaattaagcacaagtttttatccggcctttattcacattcttgcccgcctgatgaatgctcatccggagttccgtatggcaatgaaagacggtgagctggtgatatgggatagtgttcacccttgttacaccgttttccatgagcaaactgaaacgttttcatcgctctggagtgaataccacgacgatttccggcagtttctacacatatattcgcaagatgtggcgtgttacggtgaaaacctggcctatttccctaaagggtttattgagaatatgtttttcgtctcagccaatccctgggtgagtttcaccagttttgatttaaacgtggccaatatggacaacttcttcgcccccgttttcaccatgggcaaatattatacgcaaggcgacaaggtgctgatgccgctggcgattcagatcagacgcaagaatggtccggttctgcaacctttacatctgacggaaaaatccgtttattctaccactgactattccggtaaacattacggcaaacaaagcctgacaacagcgcaggtaaatgtgtcaaaatctgatgacacactcaaaatcaacggagtggaagatcacaaaacgatttttgacggagacggaaaaacatatcagaacgttcagcagtttatcgatgaaggcaattatacatccggcgacaaccatacgctgagagaccctcactacgttgaagacaaaggccataaataccttgtattcgaagccaacacgggaacagaaaacggataccaaggcgaagaatctttatttaacaaagcgtactacggcggcggcacgaacttcttccgtaaagaaagccagaagcttcagcagagcgctaaaaaacgcgatgctgagttagcgaacggcgccctcggtatcatagagttaaataatgattacacattgaaaaaagtaatgaagccgctgatcacttcaaacacggtaactgatgaaatcgagcgcgcgaatgttttcaaaatgaacggcaaatggtacttgttcactgattcacgcggttcaaaaatgacgatcgatggtattaactcaaacgatatttacatgcttggttatgtatcaaactctttaaccggcccttacaagccgctgaacaaaacagggcttgtgctgcaaatgggtcttgatccaaacgatgtgacattcacttactctcacttcgcagtgccgcaagccaaaggcaacaatgtggttatcacaagctacatgacaaacagaggcttcttcgaggataaaaaggcaacatttgcgccaagcttcttaatgaacatcaaaggcaataaaacatccgttgtcaaaaacagcatcctggagcaaggacagctgacagtcaactaa

SEQ ID NO: 135826 - DNA, 3894 bp, Homo sapiens
atgcagagtgcctcttctcctccaaaggacctcaatgcctctccagcaagggtgcagaactggacagaggatgagatggacgaactgacagaagtaggcttcagaagatggataataaaaaactccactgagctaaaggagcatgttctaatccaatgcaaagaagctaagaaccttgataaaagccagcatcatcctgttaccaaaacctggcagagacacaacaacaacaaaaaaaacttcaggccaatatccctgatgaacatcgatgcaaaaatcctcgataaaatactgcaaactaaatccagcagcacatcaaaaaacttatccactacgatcaagacagcttcatccctgcgggagtcagaaaaccgagtgcctgagaccgaagtgagacttctaggggctttaggaacaatcggttcccttcacggggccattgcacccatcctgcagatgctgaaggtgtcagctgctaacagctggcacctctaccgttctctgaaggactgttgttggctgaggagtaccaccctggccgaagatgcctggaagtttatgcatgcacctctgggagaggtgactgtgaagtctggagctgaagcagccatcttagatcaggaggtggaagcaatgttggaggacagcagcatagcaacaatatggagggagtccagcttaacgttggcttgccacgcattacttgactgtaaaactctcactcttaccgaacttggccgtaacctgccaaccaaagcgagaacaaaacataacatcaaacgaatcgaccgattgttaggtaatcgtcacctccacaaagagcgactcgctgtataccgttggcatgctagctttatctgttcgggcaatacgatgcccatgccgacttgttgactgggctgatattcctgagcaaaaacaacttatggtcttgcgagcttcagtcgcactacacggtcgttctgtgactctttatgagaaagcgttccccgctttcagagcaatgttcaaacgaagctcatgaccaatttctagccgaccttggcgagcattctaccgagtaacaccacaccgctcattgtcagtgatgctggctttaaagtgccatggtataaatccgttgagaagctgggttggtactggttaagtcgagtaagaggaaaagtacaatatgcagacctaggagcggaaaactggaaacctatcagcaacttacatgatatgtcatctagtcactcaaagactttaggctataagaggctgactaaaagcaatccaatctcatgccaaattctattgtataaatctcgctctaaaggccgaaaaaatcagcgctcgacacggactcattgtcaccacccgtcacctaaaatctactcagcgtcggcaaaggagccatggattctagcaactaacttacctgttgaaattcgaacacccaaacaacttgttaatatctattcgaagcgaatgcagattgaagaaaccttccgagacttgaaaagtcctgcctacggactagggcttacgccataggcgaacgagcagctcagagcgttttgatatcatgctgctaatcgccctgatgcttcaactaacatgttggcttgcgggcgttcatgctcagaaacaaggttggggacaagcacttccaagcctaacacagtcagaaatcgaaacgtactctcaacagttcgcttaggcatggaagttttgcggcattctggctacacaataacaagggaagacttactcgtggctgcaaccctactagctcaaaatttattcacacatggaggagcgactcaagccttcgcgaaagaaaataaccaaaaagcatacaaagaaacgtacggcgtctctcatattacacgccatgatatgctgcagatccctaaacagcagcaaaacgaaaaataccaagtgcctcaattcgatcaatcaacgattaaaaatattgagtctgcaaaaggacttgatgtgtgggacagctggccgctgcaaaacgctgacggaacagtagctgaatacaacggctatcacgttgtgtttgctcttgcgggaagcccgaaagacgctgatgacacatcaatctacatgttttatcaaaaggtcggcgacaactcaatcgacagctggaaaaacgcgggccgtgtctttaaagacagcgataagttcgacgccaacgatccgatcctgaaagatcagacgcaagaatggtccggttctgcaacctttacatctgacggaaaaatccgtttattctacactgactattccggtaaacattacggcaaacaaagcctgacaacagcgcaggtaaatgtgtcaaaatctgatgacacactcaaaatcaacggagtggaagatcacaaaacgatttttgacggagacggaaaaacatatcagaacgttcagcagtttatcgatgaaggcaattatacatccggcgacaaccatacgctgagagaccctcactacgttgaagacaaaggccataaataccttgtattcgaagccaacacgggaacagaaaacggataccaaggcgaagaatctttatttaacaaagcgtactacggcggcggcacgaacttcttccgtaaagaaagccagaagcttcagcagagcgctaaaaaacgcgatgctgagttagcgaacggcgccctcggtatcatagagttaaataatgattacacattgaaaaaagtaatgaagccgctgatcacttcaaacacggtaactgatgaaatcgagcgcgcgaatgttttcaaaatgaacggcaaatggtacttgttcactgattcacgcggttcaaaaatgacgatcgatggtattaactcaaacgatatttacatgcttggttctgatgaatcccctaatgattttggtaatcgtcacctccacaaagagcgactcgctgtataccgttggcatgctagctttatctgttcgggcaatacgatgcccattgtacttgttgactggtctgatattcgtgagcaaaaacgacttatggtattgcgagcttcagtcgcactacacggtcgttctgttactctttatgagaaagcgttcccgctttcagagcaatgttcaaagaaagctcatgaccaatttctagccgaccttgcgagcattctaccgagtaacaccacaccgctcattgtcagtgatgctggctttaaagtgccatggtataaatccgttgagaagctgggttggtactggttaagtcgagtaagaggaaaagtacaatatgcagacctaggagcggaaaactggaaacctatcagcaacttacatgatatgtcatctagtcactcaaagactttaggctataagaggctgactaaaagcaatccaatctcatgccaaattctattgtataaatctcgctctaaaggccgaaaaaatcagcgctcgacacggactcattgtcaccacccgtcacctaaaatctactcagcgtcggcaaaggagccatgggttctagcaactaacttacctgttgaaattcgaacacccaaacaacttgttaatatctattcgaagcgaatgcagattgaagaaaccttccgagacttgaaaagtcctgcctacggactaggcctacgccatagccgaacgagcagctcagagcgttttgatatcatgctgctaatcgccctgatgcttcaactaacatgttggcttgcgggcgttcatgctcagaaacaagtgccgcaagccaaaggcaacaatgtggttatcacaagctacatgacaaacagaggcttcttcgaggataaaaaggcaacatttgcgccaagcttcttaatgaacatcaaaggcaataaaacatccgttgtcaaaaacagcatcctggagcaaggacagctgacagtcaactaa

SEQ ID NO: 135827 - DNA, 5952 bp, Homo sapiens
atgacctgtaagaccccaacacgtaaacgtgctgtatcaccgggtgcgatccggtcgcgggtaacgacagagggtaaggggatgatcgacgacatcaagcgcatcgactcaatgataaatgcgcttcgcaatatgaaacaggacatcaagcgtcagcagaaactaagtgaaataaacagtttagacctgtcgccgaagcaagctcaaaagcgcaatgccgatgctgactggattgcgatggaacagattaagcgtcggcatgagctgcacgctctgtctgttgagcttgggttcgctgagcgccgggaaagttatgctccatttgaattaactgacggtattttattgaggattttgggtattcttctagagctccaagttgcgaaggcatgcaagcccctaggccggactgcattcggcaggaggagcgactcaagccttcgcgaaagaaaataaccaaaaagcatacaaagaaacgtacggcgtctctcatattacacgccatgatatgctgcagatccctaaacagcagcaaaacgaaaaataccaagtgcctcaattcgatcaatcaacgattaaaaatattgagtctgcaaaaggacttgatgtgtgggacagctggccgctgcaaaacgctgacggaacagtagctgaatacaacggctatcacgttgtgtttgctcttgcgggaagcccgaaagacgctgatgacacatcaatctacatgttttatcaaaaggtcggcgacaactcaatcgacagctggaaaaacgcgggccgtgtctttaaagacagcgataagttcgacgccaacgatccgatcctgaaagatcagacgcaagaacggtccggttctgcaacctttacatctgacggaaaaatccgtttattctacactgactattccggtaaacattacggcaaacaaagcctgacaacagcgcaggtaaatgtgtcaaaatctgatgacacactcaaaatcaacggagtggaagatcacaaaacgatttttgacggagacggaaaaacatatcagaacgttcagcagtttatcgatgaaggcaattatacatccggcgacaaccatacgttgagagaccctcactacgttgaagacaaaggccataaataccttgtattcgaagccaacacgggaacagaagaacggatacgacaggcgaagaactctttatttaacaaagatttttttgcccccctgttttcccccggagtgttcggttcaaaggtgtcaatgggcaatggcaaaattccaacgcgggggacatgcatgaaaccggaaatcatcattctcagtaaactaccgcaagaccccccaaccaaacaccgcatattctcaatcatagcaccacagcacacctattcaaaaactgaccacatagttggaagtaaagctctcctcagcaaatgtaaaagaatagaaattataacaaactatctctcagaccacagtgcaatcaaactagaactcgggattatgaaactcactcaaaactgctcaactacatggaaactgaacaacctgctcctgaactactactgggtacataacgaaatgaaggcagaaataaagatgttctttgaaaccaatgagaacaaagacacaacataccagaatctgtgggacacatttaaagcagtgtgtagagggaaatttacagcactaaatgcccacaagagaaagcaggaaagatctaaaattgacaccctaacatcacaattaaaagaactagaaaagcaagagcaaacacattcaaaagctagcagaaggcaagaaataactaaaatcagagcagaactgaaggaaatagagacacaaaaaacccttcaaaaaattaatgaatccaggagccggttttttgaaaggatcaacaaaatggatagaccgctagcaagactaataaagaaaaaaagagagaagaatcaaatagacgcaataaaaaatgataaaggggatatcaccaccgatcccacagaaatacaaactaccatcagagaatactacaaacacctctacgcaaataaactagaaaatctagaagaaatggataaattccttgacacatacactctcccaagactaaaccaggaagaagttgaatctctgaatacaccaataacaggagctgaaattgtggcaataatcaatagtttaccaaccaaaaagagtccaggaccagatggattcacagccgaattctatcagaggtacaaggaggaactggtaccattccttctgaaactattccaatcaacagaaaaagagggaatcctccctaactcattttatgaggccagcatcattctgataccaaagccaggcagagacacaacaaaaaaagagaattttagaccaatatccttgatgaacattgatgcaaaaatcctcaataaaatactggcaaaacgaatccagcagcacatcaaaaagcttatccaccatgatcaagtgggcttcatccctgggatgcaaggctggttcaatatacgcaaatcaataaatgtaatccagcatataaacaagagccaaaacaaaaaccacatgattatctcaatagatgcagaaaaagcctttcacaaaattcaacaacccttcatgctaaaaactctcaataaattaggaggagcgactcaagccttcgcggaaagaaattacccaaaggccatacaaagaaacgtacggcgtctctcatattacacgccatgatatgctgcagatccttaaacagcagcaaaacgaaaaataccaagtgcctcaattcgatcaatcaacgattaaaaatattgagtctggaaaaaggcctcgttgtgtgggacaagtgggccgcgccaaaccgctgacgggaccaggagctgaaatccaacgggttatcccgttgtgttgcttcttgcggggaagcccgaaaagccgctgatgccactccattctacatgttttatcaaaagggtcggcgccaactcaatcgacagctggaaaaacgcggggccgtgtctttaaagacagcgataagttcgacgccaacggatcccgatcctgaaagatcagacgcaagaatggtccggttctgcaacctttacatctgacggaaaaaatccggtttattctacactgactattccggtaagcattacggcaaacaaagcctgcctccttgcgcatgtttatgtgtcaaaatctgatgacacactcaaaatcaacggagtggaagatcacaaaacgatttttgacggagacggaaaaacatatcagaacgttcagcagtttatcgatgaaggcaattatacatccggcgaccaccatacgctgagagaccctcactacgttgaagacaaaggccataaataccttgtattcgaagccaacacggggaacagaaaaacggataccaaggcgaagaatctttatttaacaaagcgtactacggcggcggcacgaacttcttccgtaaagaaagccagaagcttcagcagagcgctaaaaaacgcgatgctgagttagcgaacggcgccctcgggtatcatagagttaaataatgattacacatctgaaaaaagtaatgaaagccgctgatcacttcaaacacggtaactgatgaaatcgagcgcgcgaatgttttcaaaatgaacggcaaatggtacttgttcactgattcacgcgggttcaaaaatgaccgatcgatggatgccagcctacgtgttctgaggctttgcagaactttcaacggtataccggcatacagcatgtgcatcgcataggaatggcggaacgtatgtggtgtgaccggaacagagaacgtcacaccgtcagcagcagcggcggcacccgcctccccaatccaggtcctgcccgttctgaacattttgaggcatttcagtcagttgctcaatgtacctataaccagaccgttcagctggatattacggcctttttaaagaccgtaaagaaaaataagcacaagttttatccggcctttattcacattcttgcccgcctgatgaatgctcatccggagttccgtatggcaatgaaagacggtgagctggtgatatgggatagtgttcacccttgttacaccgttttccatgagcaaactgaaacgttttcatcgctctggagtgaataccacgacgatttccggcagtttctacacatatattcgcaagatgtggcgtgttacggtgaaaacctggcctatttccctaaagggtttattgagaatatgtttttcgtctcagccaatccctggtcttccttagagctagcagtgatcatgggaccaattctggccaataagtgtgacaatctaaaaacttgtcacacttcacatggatctgtcatggcggaaacagcggttatcaatcacaagaaacgtaaaaatagcccgcgaatcgtccagtcaaacgacctcactgaggcggcatatagtctctcccgggatcaaaaacgtatgctgtatctgttcgttgaccagatcagaaaatctgatggcaccctacaggaacatgacggtatctgcgagatccatgttgctaaatatgctgaaatattcggattgacctctgcggaagccagtaaggatatacggcaggcattgaagagtttcgcggggaaggaagtggttttttatcgccctgaagaggatgccggcgatgaaaaaggctatgaatcttttccttggtttatcaaacgtgcgcacagtccatccagagggctttacagtgtacatatcaacccatatctcattcccttctttatcgggttacagaaccggtttacgcagtttcggcttagtgaaacaaaagaaatcaccaatccgtatgccatgcgtttatacgaatccctgtgtcagtatcgtaagtcttgaatcaaattatgttaatgttaaattgaggaacatggcagttaatttgcattatttagatgatacagaatgtttgcatttaatgtttgtggtaagggtaatggcttatacagtccatgctccacaatcagatgaagttaggtccggttactgcacctttacatctgacggaaaaatccgtttattctacactgactattccggtaaacattacggcaaacaaagcctgacaacagcgcaggtaaatgtgtcaaaatctgatgacacactcaaaatcaacggagtggaagatcacaaaacgatttttgacggagacggaaaaacatatcagaacgttcagcagtttatcgatgaaggcaattatacatccggcgacaaccatacgctgagagaccctcactacgttgaagacaaaggccataaataccttgtattcgaagccaacacgggaacagaaaacggataccaaggcgaagaatctttatttaacaaagcgtactacggcggcggcacgaacttcttccgtaaagaaagccagaagcttcagcagagcgctaaaaaacgcgatgctgagttagcgaacggcgccctcggtatcatagagttaaataatgattacacattgaaaaaagtaatgaagccgctgatcacttcaaacacggtaactgatgaaatcgagcgcgcgaatgttttcaaaatgaacggcaaatggtacttgttcactgattcacgcggttcaaaaatgacgatcgatggtattaactcaaacgatatttacatgcttggttatgtatcaaactctttaaccggcccttacaagccgctgaacaaaacagggcttgtgctgcaaatgggtcttgatccaaacgatgtgacattcacttactctcacttcgcagtgccgcaagccaaaggcaacaatgtggttatcacaagctacatgacaaacagaggcttcttcgaggataaaaaggcaacatttgcgccaagcttcttaatgaacatcaaaggcaataaaacatccgttgtcaaaaacagcatcctggagcaaggacagctgacagtcaactaa

SEQ ID NO: 135828 - DNA, 1729 bp, Homo sapiens
atgtcatctagtcactcaaagactttaggctataagaggctgactaaaagcaatccaatctcatgccaaattctattgtataaatctcgctctaaaggccgaaaaaatcagcgctcgacacggactcattgtcaccacccgtcacctaaaatctactcagcgtcggcaaaggagccatgggttctagcaactaacttacctgttgaaattcgaacacccaaacaacttgttaatatctattcgaagcgaatgcagattgaagaaaccttccgagacttgaaaagtcctgcctacggactaggcctacgccatagccgaacgagcagctcagagcgttttgatatcatgctgctaatcgccctgatgcttcaactaacatgttggcttgcgggcgttcatgctcagaaacaaggttgggacaagcacttccaggctaacacagtcagaaatcgaaactgcaaaatggcaactcttaaggaaaaactcattgcaccagttgcggaagagcgaggcgaacagttccaaacaataagatcacctgtagtgggtgtttggacaagttggtatggcagtgtgctatcagcattctggggaaagtctcctggcctgatgaactttgctcttgtgggatgtttttgggaggataagcttaaaggagggaatgatggttccttccagcatggggagcttattttctttcagacacctaaaaattgtgggcaggataaaggattattctggggaccgcccaattcctaaagatttgtaagttggtaactggcagggagtcccgtccagccaagaagggggagaatccggctcaaatcctgggtgccagagaaatggttaatggtcttccaaattccattattcctcaagatcgtccaagtacagtccctgatttgcatcataattggtggtttcccacccagttggacattcctacgtatgttaccctgggaaactaaagtgggattacccaaacaccgcgtgattggaagtggatgtaatctggattctgctagatttcgctaccttatggctgaaaaaacttggcattcatcccagcaagctgccatggatggaattttggggggaacatggcgactcaagtgtggcttggtgttggaatggtgtgaatgtggcaggtgtttctctccaggaattgaatccagaaatgggaactgacaatgatagtgaaaattggaaggaagtgcataagatggtggttgaaagtgcctatgaagtcatcaagctaaaaggatataccaactgggctattggattaagtgtggctgatcttattgaatccatgttgaaaaatctatccaggattcatcccgtgtcaacaatggtaaaggggatgtatggcattgagaatgaagtcttcctgagccttccatgtatcctcaatgcccggggattaaccagcgttatcaaccagaagctaaaggatgatgaggttgctcagctcaagaaaagtgcagataccctgtgggacatccagaaggacctaaaagacctgtgactagtgagctctaggctgtagaaatttaaaaactacaatgtgattaactcgagcctttagttttcatccatgtacatggatcacagtttgctttgatcttcttcaatatgtgaatttgggctcacagaatcaaagcctatgcttggtttaatgcttgcaatctgagctcttgaacaaataaaattaactattgtagtgtga

SEQ ID NO: 135829 - DNA, 390 bp, Homo sapiens
ggaaacttggtactctgcaatagatacatggagcccatcagaatggcagatggcttatgaaccacagggtggctccggatatgggggtcgtggctcatatggtgatcttggtggacctattattactacacaagtaactattcccaaagatttggctggatctattattggcaaaggtggtcagcggattaaacaaatccgtcatgagtcgggagcttcgatcaaaattgatgagcctttagaaggatccgaagatcggatcattaccattacaggaacacaggaccagatacagaatgcacagtatttgctgcagaacagtgtgaagcagtatgcagatgttgaaggattctaatgcaagatattttttcttttttatagtgtgaagcg

SEQ ID NO: 135830 - DNA, 178 bp, Homo sapiens
gctactgcagcactggggtgtcagttgttggtccgacccagaacgcttcagttgtgctctgcaaggatatataataactggtaaacgccctgcagaagatatggaagaggaacaagcatttaaaagatctagaaacactgatgagatggttgaattacgcattctgcttcagagcaag

SEQ ID NO: 135831 - DNA, 891 bp, Homo sapiens
atgcccaagaggaaggctgaagggggtgctaaaggagacaaagccaagccagagcccaagcctaaaaaggcccctgcaaaaaagggagaaaagatacccaaagggaaaaaaggaaaagctgatgctggcaaggaggggaataagcctgcagaaaatggagatgccaaacagagcaggcccagaaagctgaaggcactggagatgccaagtgaagtgtctgcatttttgattactgtgtacttctgggtaactgtggaagctgacagacataagccgaagaagaaaatgattggcatcacttctcccatcaaaggacgtgcacagccttatgatcccaatttttacgatgaaacctatgattatggtggttttacaatgatgtttgatgaccgtcgcggacgcccagtgggatttcccatgcggggaagaggtggttttgacagaatgcctcctggtcggggtgggcgtcccatgcctccatctagaagagattatgatgatatgagccctcgtcgaggaccacctccccctcctcccggacgaggcggccggggtggtagcagagctcggaatcttcctcttcctccaccaccaccacctagagggggagacctcatggcctatgacagaagagggagacctggagaccgttacgacggcatgttggctggatctattattggcaaaggtggtcagcggattaaacaaatccgtcatgagtcgggagcttcgatcaaaattgatgagcctttagaaggatccgaagatcggatcattaccattacaggaacacaggaccagatacagaatgcacagtatttgctgcagaacaggggcagcaggggaggtctcgccatttgccgacaactctttgtggtgtctggtgactga

SEQ ID NO: 135832 - DNA, 651 bp, Homo sapiens
  misc_feature (1)...(651): n = a,t,c or g
gaccatcattacgcctagcttggcacgaggcggcacgaggtacgcattctgcttcagagcaagaatgctggggcagtgattggaaaaaggaggcaagaatattaaggctctccgtacagagctacaatgccagtgtttcagtcccagacagcagtggccccgaggcgcatattgagtatcagtgctgatattgaaacaattggagaaattctgaagaaaatcatccctaccttgggaagagtaccaacactataaaggaagtgactttgactgcgagttgaggctgttgattcatcagagtctagcaggaggaattatttgggtcaaaggtgctaaaatcaaagaacttcgagagaacactcaaaccaccatcaagcttttccaggaatggctgtcctcattccactgacagaagttgttcttattggaggaaaacccgataggtgttagagttcataaagatcatcctngatcttatatctgaggctcccatcaaaggncgtgcacagccttatgtcccaatttttncgatgaacctatgatttggtggtttncaatnatgtttnatgcccgtcgcggncgcccagtgggatttccatncgggnagaggtggttttcagattcctcctggncgggntggggnccatgcct

SEQ ID NO: 135833 - DNA, 1827 bp, Homo sapiens
atggcaatactgagggccagagcggccgaaatcctgtttcaggagacagcggcttcccctcaggctctgccacgtctccaggccagacagggccgggctaaggtccgccggcgctcccgccagtctcccctaaagtcagcgccctggaagctgagcctggaccacgggactagggggctcgcaaacgacatcggcgtccagtggcgccggccggcccgcccaccttccagggacaccgtccctcggggtctggctctggcgcctgcaagccatgccatgccatgccacccccctcatacacgcgcctcggagccacctggcgctcacctggggaccgggaaagtgcctgcgtggtcgctgaagagtgtggtgagatgtgagcagagacgtgtaatgcagcaggcctgtgcttatccggacagaaagaagggcatgcaaagacttaaggatggagtgtgctcggcatgtgcgcagacaacagggaagcaggactgtgagaatgcttggtgtgtccctttaatacaagtggaaactgaacagccagaagaaagcttccctaacactgaaaccaatggtgaatttggtaaatgccctgcagaagatatggaagaggaacaagcattgaaaagatctagaaacactgatgagatggttgagttacacattctgcttcagaacaagaattctggggcagttattggagaaggaggtaagaatattaaggctccctgtatagactacagtgccagtgtttcagtcccagacagcagtggccccaagtgcatactgagtatcagtgctggtattgaaacaattggagaaattctaaagaaaatcatccctaccttggaagagggcctccagttgccattactcactccaaccagccagctcctgctggaatctgatgctgtggaatgcttaaattaccaacactataaaggaagagactttgagtgcgagttgaagctgttgatttatcagagtctagcaggaggaatattggggtcaaaggaatgctgttctcatcccactgacagagttgttcttattggaggaaaacccaatagggttgtagagtgcataaagatcatccttgatcttatatctgagtctcccatcaaaggacctgcacagccttatgatcccagtttttacaatgaaacctatgattatggtggttttacaatgatgtttgatgaccgccctggatgcccagtgggatttccaatgtggggaagaggtggttttgacagaatgcctcctggttggggtgggcgtcccatgcctccatctagaagagatatgagccctcatcgaggaccacctcctcctcttactggacgaggtggccggggtggtagcagagctcggaatcttcctcttcctccaccaccaccacctagaggggaagacctaatggcctatgacagaagagggagacctggagactgttacgatggcatggttggtttcagtcctgatgaaacttggaactctgcaatagatacatggagcccatcggaatggcagatggcttatgaaccacagggtggctccggatatgattattcctatgcagggattggtggctcatatggtgatcttggtggacctattactactgcacaagtaactattcccaaagatttgactggatctattattggcaaaggtggtcagcggattaaacaaatcggtcatgagttgggagcttcaatcaaaattgatgagcctttagaaggatccgaagatcagatcactatcattacaggaacacaggaccagatacagaatgcacaatatttgctgcagaacaatgtgtag

SEQ ID NO: 135834 - DNA, 476 bp, Homo sapiens
tgccagtgggaattaactacatttgccaaagtgctttgccagtcatttttattatggtgttatttgaatgttaattaataattttggtggtaaccagccgaccatgctaaatggctgccagtgtggggtatggtgttgcaggacctgaaaataaaatagttttttaaggtggtgcagaatgtcctttttgggcctggctattgaggataataagcacataactggtaaagttattgaaatataaattcaggttgctcactgcaacagtatattattgttatgcttatagcagataagtgtgtattggggaattgttgattagagactaaaattttataattctccctccacagtaccaacactataaaggaagtgactttgactgcgagttgaggctgttgattcatcagagtctagcacgaggaattattggggtcaaaggtgctaaaatcaaagaacttcgagaggtaaaaaaa

SEQ ID NO: 135835 - DNA, 517 bp, Homo sapiens
gtcaattgctctagtgtcttattagttaaactttgtaaaatatatatatacttgtttttccattgtatgcaaattgaaagaaaaagatgtaccatttctctgttgtatgttggattatgtaggaaatgtttgtgtacaattcaaaaaaaaaaaagatgaaaaaagttcctgtggatgttttgtgtagtatcttggcatttgtattgataagtttaaaattcacttcccaataaataaaacaccccatatgctagatttgatgtgtgcccaatcaaccttgttcaaattgggcacacatcaaatctagcatcatgggtgttttatttgatgtgtgcccaatttgaacaagggttgattgacacctgtaaaatttgttgaaacgttcctcttaaaaggaaatatagtaatcttatgtatttttttttgtgaagtgtttttctagcatttataagtgaaagctggcaggggtggtagttgggctcataatttattaaagtggtaatttagcaaaaaaaaa

SEQ ID NO: 135836 - DNA, 2413 bp, Homo sapiens
aggacgcgtgggcggcagtctcgcgcggtgatgagccgggttgggggagcggctcgtggaggctactgcagcactggggtgtcagttgttggtccgacccaaaacgcttcagttctgctctgcaaggatatataataactgattggtgtgccccgtttaataaaagaatatggaaacgtgaacagccagaagaaaccttccctaacactgaaaccaatggtgaatttggtaaaccgccctgcagaagatatggaagaggaacaagcatttaaaagatctagaaacacttgatgagatggttgaattaccgcattctgcttccagagcaagaatgcctggggcagtgattggaaaaggaggcaagaatattaaggctctccgtacagactacaatgccagtgtttcagtccccagacagcagtgtccccgagcgcatattgtgtatcagtgctgatattgaaacaattggagaaattctgaagaaaatcatccctaccttggaagagggcctgcagttgccatcacccactgcaaccagccagctcccgctcgaatctgatgctgtggaatgcttaaattaccaacactataaaggaagtgactttgactgcgagttgaggctgttgattcatcagagtctaggcagggagggaattattgggggtcaaaggtgcttaaaatcaaaggaacttcggggaggaacacttcaaaccaccatcaagcttttccaggaatgctgtcctcattccactgacagagttgttcttattggaggaaaacccgataggtttgttagagtgcataaagatcatccttgatcttatatctgagtctcccatcaaaggacggtgcacagccttatgatcccaatttttacggatggaaacctatggattatgggtggttttacaatgatgtttgatgaccgtcgcggacgcccagtgggatttcccatgcggggaagaggtggttttgacagaatgcctcctggtcggggtgggcgtcccatgcaaccatatagaagagattatgatgatatgagccctcgtcgaggaccacctccccctcctcccggacgaggcggccggggtggtagcagagctcggaatcttcctcttcctccaccaccaccacctagagggggagacctcatggcctatgacagaagagggagacctggagaccgttacgacggcatggttggtttcagtgctgatgaaacttgggactctgcaatagatacatggagcccatcagaatggcagatggcttatgaaccacagggtggctccggatatgattattcctatgcagggggtcgtggctcatatggtgatcttggtggacctattattactacacaagtaactattcccaaagatttggctggatctattattggcaaaggtggtcagcggattaaacaaatccgtcatgagtcgggagcttcgatcaaaattgatgagcctttagaaggatccgaagatcggatcattaccattacaggaacacaggaccagatacagaatgcacagtatttgctgcagaacagtgtgaagcagtattctggaaagtttttctaagactagtgaagaactgaaggagtcctgcatctttttttttttatctgcttctgtttaaaaagccaacattcctctgcttcataggtgttctgcatttgaggtgtagtgaaatctttgctgttcaccagatgtaatgttttacgttccttacaaacagggttggggggggggaagggcgtgcaaaaactaacattgaaattttgaaacagcagcagagtgagtggattttatttttcgttattgttggtggtttaaaaaattccccccatgtaattattgtgaacaccttgctttgtggtcactgtaacatttggggggtgggacagggaggaaaaagtaacaatagtccacatgtccctgagcatctgttcagagcagtgtgcagaatgtaatgctcttttgtaagagacgttttatgatttttaaaataaatttagtgaacctatttttgggtggtcattttttttttaagacagtcattttaaaatggtggctgaatttcccaacccacccccaaactaaacactaagtttaattttcagctcctctgttgggacatataagtgcatctcttgttgggacatagggcaaaataacttgggcaaacttaggttctgggtgatttcttgatggtttggaagtctattgctgggaagaaattccatcatacatattcatgcttataataagctggggattttttgtttgtttttgcaaatgcttgcccctacttttcaacaattttctatgttagttgtgaagaactaaggtggggagcagtactacaagttgagtaatggttgagtattaccagaattctgatggcacaa

SEQ ID NO: 135837 - DNA, 3075 bp, Homo sapiens
tttcgtgggcgctccaggcgacagcactgcagacgccattatcctctgtttctctgctgcaccgacctcgacgtcttgcctgtgtcccacttgttcgcggcctataggctactgcagcactggggtgtcagttgttggtccgacccagaacgcttcagttctgctctgcaaggatatataataactgattgcgatgtgcccgtttaataaaagaatatggaaactgaacagccagaagaaaccttccctaacactgaaaccaatggtgaatttggtaaacgccctgcagaagatatggaagaggaacaagcatttataagatctagaaacactgatgagatggttgaattacgcattctgcttcagagcaagaatgcttggggcagtgatttggaaaaggaggcaagaatattaaggctctccgtacagactacaatgccagtgtttcagtcccagacagcagtggccccgagcgcattattgagtatcagtgctgatattgaaacaattggagaaattctgaagaaaatcatccctaccttggaagagggcctgcagttgccatcacccactgcaaccagccagctcccgctcgaatctgatgctgtggaatgcttaaattaccaacactataaaggaagtgactttgactgcgagttgaggctgttgattcatcagagtctagcaggaggaattattggggtcaaaggtgctaaaattaaagaacttcgagagaacactcaaaccaccatcaagcttttccaggaatgctgtcctcattccactgacagagttgttcttattggaggaaaacccgatagggttgtaagagtgcataaagatcatccttgatcttatatctgagtctcccatcaaaggacgtgcacagccttatgatcccaatttttacgatgaaacctatgattatggtggttttacaatgatgtttgatgaccgtcgcggacgcccagtgggatttcccatgcggggaagaggtggttttgacagaatgcctcctggtcggggtgggcgtcccatgcctccatctaagaagagattatgatgatatgagccctcgacgaggaccacctccccctcctcccggacgaggcggccggggttgggtagcagagctcggaatcttcctcttcctccaccaccaccacctagagggggagacctcatggcctattacaaaagagggagacctcggagacccttacgacggcatggttggtttcagtgctgatgaaacttgggactctccaatagatacatggagcccattcagaatggcagatggcttatgaaccacagggtgggctccggcatatgattattcctatgacaggggggtcgtggctcatatggtgatcttgggggacctattattactacacaagtaactattcccaaagatttgggctgggatctatttattggaaaaagggtggtcagcgggattaaacaaatcccgtcatgagtcggggagctttcgatcaaaattgatgagcctttaggaaggatccgaagatccggatcattaccattacagggaacacaggaccagatacaggaatgcacagtatttgctgcaggaacagtgtgaagcagtatgcagatgttgaaggattctaatgcaagatattttttcttttttatagtgttgaagccagtattctgggaaagtttttctaaagactagtgaagaactgaagggagtccctgccatcttttttttttttatctgcttctgtttaaaaaagcccaacattccctctgcttccatagggtgttcctgccattttgagggtgtaagtgaaaatctttgcctgttcccccagagggaaatgttttagttccctaccaacccagggttgggggggggaaggggcgggcaaaaaccttacccattgaattttgaaacagcagccagagtgagtgacttttattttttgttcattgttggtggttttaaaaaaaattcccccccatggtaattattgtgaacgaccttgctttgtggtcactgtaacatttggggggttgggacaagggaggaaaagtaacaatagtcccacatgtccctggcatctgttcagaagcagtgtgcagaatgtaatgctcttttgtaagaaacgtttttatgatttttaaaatgaagtctattgaacctatttttggtggtcattttttttttaagaccagtcattttaaaaatggtggctgaatttccaaaccaccccccaaacctaaccactaaggttttattttcaagctctctggttgaacatataaggtgcatcttcttgttggacataggcaaaataactgtggcaaacctagtttctggtgatttcttgactggtttggaagtctattgctgggyagaaattccatcatacatatccaggcctaaaaataagcctggggattttttgtttgtttttgccaaaatgctttgcccccctaccttttccaaccaaatttttcctatggtttaggttagttgtgaagaacctaaggtggggagccagtacctacaagttgaggtaatgggtatgaggtatatacccagaaattcctgattgggcagcaagttttattaatcacgaataacacttgggttatggcaagtgacctaatgccggaaaaaattgattatttttattaagataatttcctcaccctatagacttaaaactggtcaatttgctctagtgtcctattagttaaactttgttaaaatatatatatacccggttttttcccttgtatggccaattgaaagaaaaagatggaccctttttcttgttgtatgttggattatgtaggaaatgtttgtgtccaattcaaaaaaaaaaaaaagatgaaaaaagttcctgtggatgttttgtgtagtatcttggcaatttgtattgatagttaaaatttcacttccaaataaataaaacacccatgatgctagatttgatgtgtgcccaatttgaacaagggttgattgacacctgtaaaatttgttgaaacgttcctcttaaaaggaaatatagtaatcttatgtaaaaaaaaaaaaaa

SEQ ID NO: 135838 - DNA, 2463 bp, Homo sapiens; identical to SEQ ID NO: 123580

SEQ ID NO: 135839 - DNA, 3750 bp, Homo sapiens
atggtcattctcctttacggtgataaccgtcgcgtaaggcaaaaattgccccatttttttggattcctcagcgacaacaactgtcgatttttagtaaatatctatccgccgcgtgtccactattgctgggtaagatcagattacaacctgtacgccaatactatcaccgtaactaacggcggtgtattggatgtgaacgttgatcagttcgatactgaagctttccgtactgacaaactggaactgaccagcggcaacatcgctgaccataacggtaacgtagtatctggtgtgttcgatatccatagcagcgattacgttctgaacgctgatctggtgaacgaccgtacctgggatacttccaagtctaactacggttacggtattgttgctatgaactctgatggtcacctgactatcaacggtaacggcgacgtagacaacggtactaactggatacagctctgtaacaatgttgttgctgcaaccggtaactacaaagttcgtatcgacaacgcaactggcgctggcgctaatgctgattacaaagataaagaaattatctacgtaaacgacgtcaacagcaacgcgaccttctctgctgctaacaaagctgacctgggtgcatacacctatcaggctgaacagcgcggtaacaccgcttgtctgccacagatggagcttgacgactacgctaacatgccgctgagcatcccgtctgcgaacaccaatatctggaacctgggacaagacaccgttggtactcgtctgaccaactctcgtcatggcctggctgataacggcggcgcatgggtaagctacttcggtggtaacttcaacggcgacaacggcaccatcaactatgatcaggatgttaacggcatcatggtcggtgttgataccaaaattgacggtaacaacgctaagtggatcgtcggtgcggctgcaggttcgctaaaggtggatcaagacagccagactgcctacatctactcttctgctcacttcgcgaacaacgtctttgttgatggtagcttgagctactctcacttcaacaacgacctgtctgcaaccatgagcaacggtacttacgttgacggtagcaccaactccgacgcttggggcttcggtttgaaagccggttacgacttcaaactgggtgatgctggttacgtgactccttacggcagcgtttctggtctgttccagtctggtgatgactaccagctgagcaacgacatgaaagttgacggtcagtcttacgacagcatgcgttatgagggatctcctagagtcgagcctgcatcggcatgcaagatgcacaaagtgacgttagacacggcgacttatgtgccgatcgatgacgatcacaaatgggttgttctggggcgtacccgctggggttatggtgatggtttaggcggcaaagagatgccgttctacgagaacttctatgccggtggttccagcaccgtgcgtggcttccagtccaataccattggtccgaaagcagtttacttcccgcatcaggccagtaattatgatccggactatgattacgaatgtgcgactcaggacggcgcgaaagacctgtgtaaatcggatgatgctgtaggcggtaacgcactggcggttgccagcctcgagttcatcaccccgacgccgtttattagcgataagtatgctaactcggttcgtacttccttcttctgggatatgggtaccgtttgggatacaaactgggattccagccaatattctggatatccggactatagtgatccaagcaatatccgtatgtctgcgggtatcgcattacaatggatgtccccattggggccgttggtgttctcctacgcccagccgttcaaaaagtacgatggagacaaggcagaacagttccagtttaacatcggtaaaacctgcgcaacaattaccccgcaaatttatcccgaaggaaaactgcgctgtaccgcaccggtgttcgaacccgggggcggcggcatcaacgtcgcccgcgccattgcccatcttggaggcagtgccacagcgatcttcccggcgggtggcgcgaccggcgaacacctggtttcactgttggcggatgaaaatgtccccgtcgctactgtagaagccaaagactggacccggcagaatttacacgtacatgtggaagcaagcggtgagcagtatcgttttgttatgccaggcgcggcattaaatgaagatgagtttcgccagcttgaagagcaagttctggaaattgaatccggggccatcctggtcataagcggaagcctgccgccaggtgtgaagctggaaaaattaacccaactgatttccgctgcgcaaaaacaagggatccgctgcatcgtcgacagttctggcgaacagttaagtgcagcactggcaattgaaaatccactggccgtatctctgctgttcactgcacctgtttatgctgctgatgaaggttctggcgaaattcactttaagggggaggttattgaagcaccttgtgaaattcatccagaagatattgataaaaacatagatcttggacaagtcacgacaacccatataaaccgggagcatcatagcaataaagtggccgtcgacattcggttgatcaactgtgatctgcctgcttctgacaacggtagcggaatgccggtatccaaagttggcgtaaccttcgatagcacggctaagacaactggtgctacgcctttgttgagcaacaccagtgcaggcgaacatactggggtcggtgtacgactgatggacaaaaatgacggtaacatcgtattaggttcagccgcgccagatcttgacctggatgcaagctcatcagaacagacgctgaactttttcgcctggatggaacaaattgataatgcagtcgatgtcacggcaggtatggacaccgtgaatatttatcgactctcttttgtatcctgcctggtcatggcgatgccttgcgcaatggcggtcgaattcaatctgaatgttctcgataaatcaatgcgcgaccgcattgatatttcattaataataggaaaaggagtcatttgctcccgatatccgtcagtccttgcacagttagatcgctgcttaagcttcctgttgatgattggctttagcctggtggcagaaggtttcggcttcgtcattccgaaaggctacctgtacgctgccattggtttctcggtgatgatcgaggcgctcaatcagttggctatctttaaccggcgacgttttctttccgctaaccagacgctgcgccacgagactaccgaagcggtaatgcgcctgcttagcgggcaaaaagaagatgcggaactggacgccgaaaccgcgtccatgctggtggatcatggtaaccagcagatctttaatccgcaggaacggcggatgattgagcgggtacttaatcttaaccagcgtaccgtcagcagcattatgacgtcgcgccacgatattgagcatatcgatctcaacgcgccggaagaagaaatccgccaattgctggagcgaaatcagcatacgcggctggtggttaccgacggtgatgacgcagaagatttgctcggtgttgttcacgttatcgacctgctacaacagtctctgcgcggcgaaccgctcaacctgcgggtgatgattcgccaaccgctggtgttcccggaaaacttgccgttgtgtactgccctggaacatttcgtaatgcccgcacgcactttgcttttgtag

SEQ ID NO: 135840 - DNA, 1353 bp, Homo sapiens
atgattgtcatcggtgctcgtccgcgccaaagcttgcatgcctgcagccgcgtaacctggcaaaatcggttacggttgagtaataaatggatgcccctgcttttagagtttttccgtcacagaaagggctacaactgtttccttatgctctggcatctgagaactgacgagaacaaggtaaccgtcagtgccgataagttcaaagttaaacctggtgttgataccaacattgaaacgttgatcgaaaacgcgctgaaaaacgctgctgaatgtgcggcgctggatgtcacaaagcaaatggcagcagacaagaaagcgatggatgaaatcaacggtccttcgcgtgatgtgaagctgacctttgcgcaaattgcaccgccgccgggcagcatggtgctacgtggcattaacccgaacggcagcattgagtttggtatgcgcagcgatgaagtggtgacgaaggcgatgctcaacctcgaatacaccccatcgccatcgttactgcctgtccagtcgcagttaaaggtttatctcaatgatgaactgatgggcgtgctgccagtgaccaaagaacagttgggtaaaaaaacgctggcgcaaatgcccattaacccactgtttattagcgacttcaaccgtgtacggctggagtttgtcggccattatcaggacgtgtgcgaaaaaccggccagcaccacgctttggctggatgttgggcggagcagtggactggatctgacctatcagaccctgaatgtgaagaatgacctgtcacacttcccggtgccattctttgacccgagcgataaccgcaccaacaccttgccgatggtctttgcgggtgcgccggatgttgggctgcaacaagcctctgccattgtcgcctcgtggtttggttcgcgttctggctggcgtgggcagaacttcccggtactctataaccaactgccggatcgcaatgccattgtctttgcaaccaacgacaaacggccggacttcctgcgcgatcatccggcggtaaaagccccggtgattgagatgattaaccatccgcagaatccttacgtcaaacagtttacttttgcttgttctgaagaatactcgacgataaagcgcgtatgggtctacatcactggtgtgaccgatcaccatcagaacagccagccccagtcgatgcagcgaattgcaggcactaacgtctggcagtggacgacacaactcaatgccaactggcgcggcagctactgcttagttcccaccgaacgggtacccgagctcgattgtaatcattctgtccatatgagaggttctgatttatcagccttcatagaagctgataagctcttgaaatga

SEQ ID NO: 135841 - DNA, 1940 bp, Homo sapiens
tgctttatctggttggctttcagtcagaacaggggattttgcggcgctgacgctacaactaacagccagcagagaaagatagagcattgtccgtttcatgatatcagtccagattgacgttacggcagccaaagagcgtggtgaaaataaacccgcaaacccatgccaccagaatcccgccagcataaaccgccatggccggaaggatgccttgtgcggaagtcatcagcggcagcgctaccagaccagacggcccaaaggcgctgtttaagcccatcggcagaccccaccaggctatcaggccgataaacaaaccgcccgccgcgccgcctaaacaggcggtaacaaacggcttcatgcggggcagggtgccacccaaaacattaacggtgccctctgagtcctcattagcgccaatgacgctggtagtaatagtggttaaggaggcattaccgccagccaaaatattcagcactccagtgccataccagccaaccagacgtgcaccagacgctgaaccgcttagtgccagcaaaacacccagcgtctatctagtgaatttcgttgtcagtccagaggatttacgcaaattaaccgtcgatgttttacctgccctgcgagcaaatacccgagccctttggcaggtggaggtgagtgcgttcccctctttcatgacgcaggcgacgccagcaacgcaacccctgatcaatgctgagccagctgtagccgccccgacggaacaaaatccgcaggtggggccagtgatgccgggcgtgcagggcgctgatgcgccagtcgtggcgcagaacggtccttcgcgtgatgtgaagctgacctttgcgccaattgcaccgccgccgggcagcatggtgctacgtggccttaacccgaacggcagccttgagtttggtatgcgcagcgatgaagtggtgacgaaggcgatggtccaactcgaattaaccccatggcatggttatggctgtcagtgcccgtttctcccggtgaagtacctgtacgctgccattggtttctcggtgatgatcgaggcgctcaatcagttggctatctttaaccggcgacgttttctttccgctaaccagacgctgcgccagcggactaccgaagcggtaatgcgcctgcttagcgggcaaaaagaagatgcggaactggacgccgaaaccgcgtccatgctggtggatcatggtaaccagcagatctttaatccgcaggaacggcggatgattgagcgggtacttaatcttaaccagcgtaccgtcagcagcattatgacgtcgcgccacgatattgagcatatcgatctcaacgcgccggaagaagaaatccgccagttgctggagcgaaatcagcatacgcggctggtggttaccgacggtgatgacgcagaagatttgctcggtgttgttcacgttatcgacctgctacaacagtctctgcgcggcgaaccgctcaacctgcgggtgttgattcgccagccgctggtgttcccggaaaccttgccgttgttacctgccctggagcagttccgtaatgcccgcacgcactttgcttttgtggtggatgagtttggctcggtggaagggattgtgacattaagtgacgtcactgaaaccattgccggtaacttaccgaacgaagtggaagagatcgacgcccgccatgatattcagaagaatgcggaccgttcctggacgggaaatgtctattgccgttgggggactgtcgactctagcaggcatccccgactggctgtattaaccgacgaggctcccaactatggttatcctacattgtacgaatttcggaaaaggtttctgactcctggaacagtgtgcaagcggtgtgaccagagaggagacgccatgcgtgtgcaggtccagtgggttttctacacgtacattctgcctttggcaaacgagtga

SEQ ID NO: 135842 - DNA, 1566 bp, Homo sapiens
atgaaggcagaaataaagatgtcctttgaaaccaatgagaacaaagacacaacataccagaatctctgggacacattcaaagcagtgtgtagagggaaatttatagcactaaattcccacaagacaaagcaggaaaggtctaaaattgacaccctaacatcacaaataaaagaactacagaagcaagagcaaacactttcaaaagctagcagaaggcaagaaataactaagatcagagcagaactgaaggaaatagagacacaaaaaacccttcaaaaactcaatgaatccaggagctggttttttgaaaagatcaacaaaattgatagaccaccagcaagactaataaagaagaaaagagagaagaatgacatagacacaataaaaaatgataaaggggatatcaccaccgatcccacagaaatacaaactaccatcagagaataccgtaaacacctctatgcaaataaactagaaaatctagaggaaatggataaattccttgacacatacaccatcccaagactaaaccaggaagaagttgaatctctgaatagaccaataacaggctctgaaagtaaggcaataattaatagcttaccaaccaaaaaaagtccaggaccagatggattcacagccgaattctaccagaggcgggatgtgaatcgcgtctgtcgggcgcaacaattgtggcttgtggcggtttacaccggcgaaggccatctcctgggggaaaatccaccctgtttttcagcggcaaattctgagggttctcagtcaaaccctgttcccgaatattccctgggaagaaatctcggttatggcctaaaaatgttcggcgtaccgcgcgcagagctgaaaccccgcttcaaagaggctttgccgatggtgaatctggaaggattcgaagaccgctttgtcgatcagatctccggcgggcagcagcagcgcgtggcgctggcccgcgcgctgatcctcaagccgaaagtgctgctgtttgatgagccgttgagtaacctcgacgccaacctgcgtcgcagcatgcgcgacaagatccgcgagttgcaaaagcagtttgatatcacctcgctgtacgtcacccacgatcagagcgaagcctttgcggtttctgatactgtgctggtgatgaacaagggacacatcatgcagatcggctcaccgcaggatctttaccgccagcccgcctcccgctttatggcgagctttatgggcgatgccaacctgttcccggcaaccttcagcgacggatacgttgatatctacggctatcatctgccgcgcccgctgcactttggtacacagggtgaagggatggtcggtgtgcgcccggaagcgatcacgctcagcgatcgcggcgaagagagccagcgctgcgtgatccgccatgtcgcctatatggggccgcagtatgaagtgacggtggaatggcacgggcaggagatattattgcaggtcaacgctacgcgtctgcaaccggacgtcggcgagcagtattatcttgaaatccatccgtacggcatgtttgttctggcggatgcggcataa

SEQ ID NO: 135843 - DNA, 856 bp, Homo sapiens
ggattttgccgatttcggaaccaccatcaaacaggattttcgcttgctggggcaaaccagcgtggaccgcttgctgcaactctctcagggccaggcggtgaagggcaatcagctgttgcccgtctcatgggtgaaaagaaaaaccaccctggcgcccaatacgcaacccgcctctccccgcgcgttggccgattcattaatgcagctggcacgacaggtttcccgactggaaagcgggcacccacttgctggcccggggctgacaattatcccttcctgtctggctctgccccgtattgaaactgagttaatgggcaaatttgatgaaggtaaactgcccaccgatccacacttgatgctcggactggccattgaaactgttgctcatgactatgatgtcatagttattgacagcgcgcctaacctgggtatcggcacgattaatgtcgtatgtgctgctgatgtgctgattgttcccacgcctgctgagttgtttgactacacctccgcactgcagtttttcgatatgcttcgtgatctgctcaagaacgttgatcttaaagggttcgagcctgatgtacgtattttgcttaccaaatacagcaatagtaatggctctcagtccccgtggatggaggagcaaattcgggatgcctggggaagcatggttctaaaaaatgttgtacgtgaaacggatgaagttggtaaaggtcagatccggatgagaactgtttttgaacaggccattgatcaacgctcttcaactggtgcctggagaaatgctctttctatttgggaacctgtctgcaatgaaattttcgatcgtctgattaaaccacgctgggagattagataa

SEQ ID NO: 135844 - DNA, 2391 bp, Homo sapiens; identical to SEQ ID NO: 121259
  misc_feature (1)...(2391): n = a,t,c or g

SEQ ID NO: 135845 - DNA, 762 bp, Homo sapiens
atggacgatatcccgcaagaggcccggcagtaccggcataaccaagcctatgcctacagcatccagggtgacggtgccgaggatgacgataagcgcattgttagatttcatacacgagtatctggtgtcatagaaattgccgatgggagtcgccgtcgtaaagctgctgcacttaccgaaagtgattatcgtgttctggttggcgagctggatgatgagcagatggctgcattatccagattgggtaacgattatcgcccaacaagtgcttatgaacgtggtcagcgttatgcaagccgattgcagaatgaatttgctggaaatatttctgcgctggctgatgcggaaaatatttcacgtaagattattacccgctgtatcaacaccgccaaattgcctaaatcagttgttgctcttttttctcaccccggtgaactatctgcccggtcaggtgatgcacttcaaaaagcctttacagataaagaggaattacttaagcagcaggcatctaaccttcatgagcagaaaaaagctggggtgatatttgaagctgaagaagttatcactcttttaacttctgtgcttaaaacgtcatctgcatcaagaactagtttaagctcacgacatcagtttgctcctggagcgacagtattgtataagggcgataaaatggtgcttaacctggacaggtctcgtgttccaactgagtgtatagagaaaattgaggccattcttaaggaacttgaaaagccagcaccctga

SEQ ID NO: 135846 - DNA, 1086 bp, Homo sapiens
atggagaaaaaaatcactggatataccaccgttgatatatcccaatggcatcgtaaagaacattttgaggcatttcagtcacctgctcaatgtacaaaaaaccaaacagttcagctggatattacggcctttttaaagaccgtaaagaaaaataagcacaagttttatccggcctttattcacattcttgcccgcctgatgaatgctcatccggagttccgtatggcaatgaaaggcgtgcccgggggtgatagtgttaaaaacacctctcgggtatggtcgggtaatgaacgtgaccagaagctgcttactgagaacgcactgaatgatctcatcccttcttttctactgactggtcaacagacaccggcgttgggtagaagagtatctggtgtcatagaaattgccgatggaagtcgccgtcgtaaagctgctgcacttaccgaaagtgattatcgtgttctggttggcgagctgtatgatgagcagatgcccccattatccagattgggtaacgattatcgcccaacaagtgctcacccccagaaaagacgttatgcaagccgattgcagaatgaatttgctggaaatatttctgcgctggctgatgcggaaaatatttcacgggttcgggatgtgaatttacttcttgaagtgctcggggttgatagtgttgagaagacttttcgggtatggtcaggtaatgaacgtgaccaggagctgcttatggaggacgcattggatgatctcatcccttcttttctactgactggtcaacagacaccggcgttcggtcgaagagtatctggtgtcatagaaattgccgatgggagtcgccgtcgtaaagctgctgcacttaccgaaagtgattatcgtgttctggttggcgagctggatgatgagcagatggctgcattatccagattgggtaacgattatcgcccaacaagtgcttatgaacgtggtcagcgttatgcaagccgattgcagaatgaatttgctggaaatatttctgcgctggctgatgcggaaaatatttcacgtaagattatcccccgctgtatcaactcttgccaaattgcctaa

SEQ ID NO: 135847 - DNA, 1575 bp, Homo sapiens
atgcttcgtgatctgctcaagaacgttgatcttaaagggttcgagcctgatgtacgtattttgcttaccaaatacagcaatagtaatggctctcagtccccgtggatggaggagcaaattcgggatgcctggggaagcatggttctaaaaaatgttgtacgtgaaacggatgaagttggtaaaggtcagatccggatgagaactgtttttgaacaggccattgatcaacgctcttcaactgataatgaaggtgcgcctgttattccaaaacatacgctcaatactcaaccggttgaagatacttcgttatcgacaccagctgccccgatggtggattcgttaattgcgcgcgtaggagtaatggctcgcggtaatgccattactttgcctgtatgtggtcgggatgtgaagtttactcttgaagtgctccggggtgatagtgttgagaagacctctcgggtatggtcaggtaatgaacgtgaccaggagctgcttactgaggacgcactggatgatctcatcccttcttttctactgactggtcaacagacaccggcgttcggtcgaagagtatctggtgtcatagaaattgccgatgggggatcctctagatccaagaaaaggaggcgggggtgtgaaggggggaggcggggagacagggctgcccggatcagaaacatcctgcagcattctccgtctccggaggaaaaatacatttgtctgggcgaactccggtggaaaagcgccccaggctgccacagcctagagatcttggtgctcgagccttcgcggcctgccgagggagcagggggcgcccgtggaactggctccctgcagctctgcggctacacgcggacctcggctgtgtgcgaggtggcggaggaggctggccgggtgcgaatccgtacccagccccagcatcttccacctgctgaggaccaccgctcagccatgggctaccagaggcaggagcctgtcatcccgccgcaggtaaaactagcgactaggcaggttctgaagccagttgtccggaaatttcattcaccttgcaacagggccaaccatagtacatgtcgttgtaaccctttagaacggagtaacttcggtgtgccgtttgtatgtcctgcttgtggattgctgctggtcccgccttatccacaacattttgcgcacggttatgtggacaaaattacctgcttacccagcggtgccggtcacgttaaccgggctgcatccgatgcaatcaggcaccgttgtatgaaatctaacaatgcgctcatctgtcatcctcggcaccgtcaccctggatgctgtaggcataggcttggttatgccggtactgccgggcctcttgcgggatatcgtccattccgacagcatcgccagccactatggcgtgtctctagcgctatatgcgttgatgcaatttctatgcgcacccgttctcggagcactgtccgatcgtatttgccgccgcccagtccctggcacttcgctacttggagccactatcgactacgcgatcatggcgaccacacccgtcttgtggtttttcctcacacgacaatggattaa

SEQ ID NO: 135848 - DNA, 975 bp, Homo sapiens
tcaacaagatggtgaattgactagtgggtagatccacaggacgggtgtggtcgccatgatcgcgtagtcgatagtggctccaagtagcgaagcgagcaggactgggcggcggccaaagcggtcggacagtgctccgagaacgggtgcgcatagaaattgcatcaacgcatatagcgctagcagcacgccatagtgactggcgatgctgtcggaatgcaccacatcccgcaagaggcccggcagtaccggcataaccaagcctatgcctacagcatccagggtgacggtgccgaggatgacgatgagcgcattgttagatttcatacacggtgcctgacagaagcattcgaaaaactgcagtgcggaggtgtagtcaaccaactcagcaggcgtgggaacaatcagcacatcagcagcacatacgacattaatcgtgccgatacccaggttaggcgcgctgtcaataactatgacatcatagtcatgagcaacagtttcaatggccagtcggagcatcaggtgtggatcggtgggcagtttaccttcatcaaatttgcccattaactcagtttcaatacggtgcagagccagacaggaaggaataatgtcaagccccggccagcaagtgggctttattgcataagtgacatcgtccttttccccaagatagaaaggcaggagagtgtcttctgcatgaatatgaagatctggtacccatccgtgatacattgaggctgttccctgggggtcgttaccttccacgagcaaaacacgtagccccttcagagccagatcctgagcaagatgaacagaaactgaggttttgtaaacgccacctttatgggcagcaaccccgatcaccggtggaaatacgtcttcagcacgtcgcaatcgcgtacccaacacatcacgcatatgattaatatgttcaattgtataaccaacacgttgctcaacccgtcctcgaatttccat

SEQ ID NO: 135849 - DNA, 798 bp, Homo sapiens
tcaagcaagtaagcgttgatcaaggggcggttcaaaaccagttttcaccgggttctctcctttcccaacttcatcggtttcgcggacaacttttttagacccatgttccccaggcatccgaatttgttgttccatccccgggggactgagagccattactattgttgtattgggtaaatcaggctcgaaccctttaagatcaacgttcttgagcagatcacgaagcatatcgaaaaactgcagtgcggaggtgtagtcaaacaactcagcaggcgtgggaacaatcagcacatcagcagcacatacgacattaatcgtgccgatacccaggttaggcgcgctgtcaataactatgacatcatagtcatgagcaacagtttcaatggccagtcggagcatcaggtgtggatcggtgggcagtttaccttcatcaaatttgcccattaactcagtttcaatacggtgcagagccagacaggaaggaataatgtcaagccccggccagcaagtgggctttattgcataagtgacatcgtccttttccccaagatagaaaggcaggagagtgtcttctgcatgaatatgaagatctggtacccatccgtgatacattgaggctgttccctgggggtcgttaccttccacgagcaaaacacgtagccccttcagagccagatcctgagcaagatgaacagaaactgaggttttgtaaacgccacctttatgggcagcaaccccgatcaccggtggaaatacgtctggagctcgtcgcaatcgcgtaccaaacacatcacgcat

SEQ ID NO: 135850 - DNA, 975 bp, Homo sapiens; identical to SEQ ID NO: 118380
  misc_feature (1)...(975): n = a,t,c or g

SEQ ID NO: 135851 - DNA, 1142 bp, Homo sapiens
atagtcgtgttaaattggggcagtcctcagagtcccaagtagcagcactcaagacaagggagcctatgaatatagcaaccctggaggttctggttttgaaagggctacgtgtttgtttcgtgaaagtaaaccaccccaagggaccagcttcaatgtatccgggatgggtaccaattctttatattcatgcagaagaccctctcctgcctttctatcttggggaaaaggaggatgtcacttatgcaataaagcccacttgctggccggggcttgacattattccttcctgtctggctctgccccgtattgaaactgagttaatgggcaaatttgatgaaggtaaactgcccaccgatccacacctgatgctccgactggccattgaaactgttgctcatgactatgatgtcatagttattgacagcgcgcctaacctgggtatcggcacgattaatgtcgtatgtgctgctgatgtgctgattgttcccacgcctgctgagttgtttgactacacctccgcactgcagtttttcgatatgcttcgtcctctgctcaagaacgttgatcttaaagggttcgagcctgatgtacgtattttgcttaccaaatacagcaatagtaatggctctcagtccccgtggatggaggagcaaattcgggatgcctggggaagcatggttctaaaaaatgttaaagaatttgctggaaatatttctgcgctggctgatgcggaaaatatttcacgtaagattattacccgctgtatcaacaccgccaaattgcctaaatcagttgttgtcttttttctcaccccggtgaactatctgcccggtgatgcacttcaaaaagcctttacagataaagaggaattacttaagcagcaggcatctaaccttcatgagcagaaaaaagctggggtgatatttgaagctgaagaagttatcactcttttaacttctgtgcttaaaacgtcatctgcatcaagaactagtttaagctcacgacatcagtttgctcctggagcgacagtattgtataagggcgataaaatggtgcttaacctggacaggtctcgtgttccaactgagtgtatagagaaaattgaggccattcttaaggaacttgaaaagccagcaccctga

SEQ ID NO: 135852 - DNA, 1206 bp, Homo sapiens
ttagaacctgcttccctcagcatcccgaatttgctcctccatccacggggactgagagccattactattgctgtatttggtaagcaaaatacgtacatcaggctcgaaccctttaagatcaacgttcttgagcagatcacgaagcatatcgaaaaactgcagtgcggaggtgtagtcaaacaactcagcaggcgtgggaacaatcagcacatcagcagcacatacgacattaatcgtgccgatacccaggttaggcgcgctgtcaataactatgacatcatagtcatgagcaacagtttcaatggccagtcggagcatcaggtgtggatcggtgggcagtttaccttcatcaaatttgcccattaactcagtttcaatacggtgcagagccagacaggaaggaataatgtcaagccccggccagcaagtgggctttattgcataagtgacatcgtccttttccccaagatagaaaggcaggagagtgtcttctgcatgaatatgaagatctggtacccatccgtgatacattgaggctgttccctgggggtcgttaccttccacgagcaaaacacgtagccccttcagagccgatcctgtcgtgccagctgcattaatgaatcggccaacgcgcggggagaggcggtttgcgtattgggcgccagggtggtttttcttttcaccagtgagacgggcaacagctgattgcccttcaccgcctggccctgagagagttgcagcaagcggtccacgctggtttgccccagcaggcgaaaatcctgtttgatggtggttccgaaatcggcaaaatccgacattaatcgtgccgagacccaggttaggcgcgctgtcaataactatgacatcatagtcatgagcaacagtttcaatggccagtcggagcatcaggtgtggatcggtgggcagtttaccttcatcaaatttgcccattaactcagtttcaatacggtgcagagccagacaggaaggaataatgtcaagccccggccagcaagtgggctttattgcataagtgacatcgtccttttccccaagatagaaaggcaggagagtgtcttctgcatgaatatgaagatctggtacccatccgtgatacattgaggctgttccctgggggtcgttaccttccacgagcaaaacacgtagccccttcagagccagatccttggtcttacgctctatcat

SEQ ID NO: 135853 - DNA, 1041 bp, Homo sapiens
tcaacaagatggtgaattgactagtgggtagatccacaggacgggtgtggtcgccatgatcgcgtagtcgatagtggctccaagtagcgaagcgagcaggactgggcggcggccaaagcggtcggacagtgctccgagaacgggtgcgcatagaaattgcatcaacgcatatagcgctagcagcacgccatagtgactggcgatgctgtcggaatggacgatatcccgcaagaggcccggcagtaccggcataaccaagcctatgcctacagcatccagggtgacggtgccgaggatgacgatgagcgcattgttagatttcatacacggcgcctgacctttaagatcaacgttcttgagcagatcacgaagcatatcgaaaaactgcagtgcggaggtgtagtcaaacaactcagcaggcgtgggaacaatcagcacatcagcagcacatacgacattaatcgtgccgatacccaggttaggcgcgctgtcaataactatgacatcatagtcatgagcaacagtttcaatggccagtcggagcatcaggtgtggatcggtgggcagtttaccttcatcaaatttgcccattaactcagtttcaatacggtgcagagccagacaggaaggaataatgtcaagccccggccagcaagtgggctttattgcataagtgacatcgtccttttccccaagatagaaaggcaggagagtgtcttctgcatgaatatgaagatctggtacccatccgtgatacattgaggctgttccctgggggtcgttaccttccacgagcaaaacacgtagccccttcagagccagatcctgagcaagatgaacagaaactgaggttttgtaaacgccacctttatgggcagcaaccccgatcaccggtggaaatacgtcttcagcacgtcgcaatcgcgtaccaaacacatcacgcatatgattaatttgttcaattgtataaccaacacgttgctcaacccgtcctcgaatttccatatccggggtgcggtagtcgccctgctttctcggcat

SEQ ID NO: 135854 - DNA, 801 bp, Homo sapiens
atgaagcgtgcgcctgttattccaaaacatacgctcaatactcaaccggttgaagatacttcgttatcgacaccagctgccccgatggtggattcgttaattgcgcgcgtaggagtaatggctcgcggtaatgccattactttgcctgtatgtggtcgggatgtgaagtttactcttgaagtgctccggggtgatagtgttgagaagacctctcgggtatggtcaggtaatgaacgtgaccaggagctgcttactgaggacgcactggatgatctcatcccttcttttctactgactggtcaacagacaccggcgttcggtcgaagagtatctggtgtcatagaaattgccgatgggagtcgccgtcgtaaagctgctgcacttaccgaaagtgattatcgtgttctggttggcgagctggatgatgagcagatggctgcattatccagattgggtaacgattatcgcccaacaagtgcttatgaacgtggtgatgcacttcaaaaagcctttacagataaagaggagttacttaagcagcaggcatctaaccttcatgagcagaaaaaagctggggtgatatttgaagctgaagaagttatcactcttttaacttctgtgcttattacgtcatctgcatcaagaactggggggagctcacgacatcagtttgctcctggagcgacagtattgtataagggcgataaaatggtgcttaacctggacaggtctcgtgttccaactgagtgtatagagaaaattgaggccattcttaaggaacttgaaaagccagcaccctga

SEQ ID NO: 135855 - DNA, 1785 bp, Homo sapiens; identical to SEQ ID NO: 119298

SEQ ID NO: 135856 - DNA, 1134 bp, Homo sapiens
atggaaattaaaggaccggttgagcaacgtgttggttatacaattgagcaaattaatcatatgcgtgatgtgtttggtacgcgattgcgacgtgctgaagacgtatttccaccggtgatcggggttgctgcccataaatgtggcgtttacaaaacctcagtttctgtgcatcttgctcaggatctggctctgaaggggctacgtgttttgctcgtggaaggtaacgacccccagggaacagcctcaatgtatcacggatgggtaccagatcttcatattcatgcagaagacactctcctgcctttctatcttggggaaaaggacgatgtcacttatgcaataaagcccacttgctggccggggcttgacattattccttcctgtctggctctgcaccgtattgaaactgagttaatgggcaaatttgatgaaagtaaactgcccaccgatccacacctgatgctccgactggccattgaaactgttgctcatgactatgatgtcatagttattgacagcgcgcctaaactgggtatcgggacgattaatgtcgcatgtgctgctggagtgctgattgttcccccccctgctgagttgtttgactacaccttcgcactggagttttttcatttgcttcgtgatctggtcaagaaccttgatcttaaaagggtcgagggacctacggtaatgaacgtgaccaggagctgcttactggaggacgcactggatgatctcatcccttcttttctactgactggtcaacagacaccggcgttcggtcgaagagtatctggtgtcatagaaattgccgatgggagtcgccgtcgtaaagctgctgcacttaccgaaagtgattatcgtgttctggttggcgagctggatgatgagcagatggctgcattatccagattgggtaacgattatcgcccaacaagtgcttatgaacgtggtcagcgttatgcaagccgattgcagaatgaatttgctggaaatatttctgcgctggctgatgcggaaaatatttcacgtaagattattacccgctgtatcaacacccgccaattgcctaaatcagttgttggttttttttctcaccccggtgaactttctgcccggtcaggtgatgccctttaa

SEQ ID NO: 135857 - DNA, 3300 bp, Homo sapiens
  misc_feature (1)...(3300): n = a,t,c or g
atggcgggcgcccttcccccagcctcgctgccgccttgcagtttgatctcagactgctgtgctagcaatcagggagactccgtgggcctaggatcctccgagccaggtgcgggatataatctcgtggtgcaccgttttttaagcaggtcagaaaagcgcagtattcgggtgggagtgacccgattttctagggatttccgatttggaccccccatcaacaagattttcgcctgtggggcaaaccagcgtggacggcttgctgcaattctctcagggccagccggtgaagggcaatcagctgttgcccgtctcactggtaaaaagaaaaaccaccctggcgcccaatacgcaacccgcctctccccgcgcgttggccgattcattaatgcagctggcacgacaggtttcccgactggaaagcgggcagtgagcgcaacgcaattaatgtccaatactcaccggttgaaaatatttggtaatgacccccagctgccccgagggggattcgttattggcgcgcgtaggagtaatggctcccggaaacgccattactttgctggtaatgaacgtgcccaggagctgcttactgaggacgcactggatgatctcatcctttcttttctactgactggtcaacagacaccggcgttcggtcgaagagtatctggtgtcatagaaattgccgatgggagtcgccgtcgtaaagctgctgcacttaccgaaagtgattatcgtgttctggttggcgagctggatgatgagcagatggctgcattatccagattgggtaacgattatcgcccaacaagtgcttatgaacgtggtcagcgttatgcaagcccattgcagaatgaatttgctggaaatatttctgcgctggctgatgcggaaaatatttcacgtaagattattacccgctgtatcaacaccgccaaattgcctaaatcagttgttgctcttttttctcaccccggtgaactatctgcccggtcagacacctccaacaggagcattcagctggcatcaggttggtgcccccctcggatggagctgccagaggaaggagcagtcttcaatctttgctcttttgcagcctttactagtgataccttcagggattttgccgatttcggaccccccatcacacaggattttcgcctgctggggcaaaccagcgtggaccgcttgctgcaactctctcagggccaggcggtgaagggcaatcagctgttgcccgtctcactggtgaaaagaaaaaccaccctggcgcccaatacgcaaaccgcctctccccgcgcgttggccgattcattaatgcagctggcacgacaggtttcccgactggaaagcgggcaggattttgccgatttcggaaccaccatcaaacaggattttcgcctgctggggcaaaccagcgtggaccgcttgctgcaactctctcagggccaggcggtgaagggcaatcagctgttgcccgtctcactggtgaaaagaaaaaccaccctggcgcccaatacgcaaaccgcctctccccgcgcgttggccgattcattaatgcagctggcacgacaggtttcccgactggaaagcgggcaaaataaagacccaactcaatggattgctacttttggtgcaactataacaccacccgcagtgaaacgaaatgtgaggaaaattattcttcatgagaattaccatagagaaacaaatgaaaatgacaccgctttggttcagctctctactggagttgagttttcaaatatagtccagagagtttgcctcccagactcatctataaagttgccacctaaaacaagtgtgttcgtcacaggatttggatccattgtagatgatgcctcgctgccgccttgcagtttgatctcagactgctgtgctagcaatcagggagactccgtgggcctaggatcctccgagccaggtgcgggatataatctcgtggtgcaccgttttttaagcaggtcagaaaagcgcagtattcgggtgggaggacccgattttctaggggatttttgttcccaaatgggaaccaacactcaaccctatcttggggctattctttttattaataagggatttgcccgatttgggaacccaccatccaacagggatttttcgcttgctggggcaaaaccagcgtggacccgcttgctgcacttctctcagggcccagggggtgaagggcaatcagctgttgcccgtctcactggtgaaaagaaaaaccaccctggcgctcaatacgcaaaccgcctctccccgcgcgttggccgattcattaatgcagctggcacgacaggtttcctgactggaaagcgggcagtgagcgcaacgcaattaataataaccaatacagagaagtgcttaaaggagctgatgaagctgaaaaccaaggctcgagaactacgtgaagaatgcagaagcctcaggagccgatgcgatcaactggaagaaagggtgtcagcaatggaagatgaaatgaatgaaatgaagcgagaagggaagtttagagaaaaaagaataaaaagaaacgagcaaagcctccaagaaatatgggactatgtgaaaagaccaaatctacgtctgattggtgtaactgaaagtgatggggagaatggaaccaagttggaaaacactctgcaggatattatccaggagaacttccccaacctagcaaggcagtccaacgttcagatgtctaggatatttcgacattcttctgtaggcggtcgatttatcaaatctcatgttatcaaattaagattgggtaacgattatcgcccaccaagggcttatgcacgtggtcagcgttatgcaacccgattgcagaatgaatttgctgnaaatatttctgcgctggctgatgcggaaaatatttcacgtaagattattacccgctgtatcaaccccgccaaattgcctaaatcagttgttgctctnttttctcaccccggtgaactatctgcccggtcaggtgatgcacttcaaaaagcctttacagataaagaggaattacttaagcagcaggcatctaaccttcatgagcagaaaaaagctggggtgatatttgaagctgaagaagttatcactcttttaacttctgtgcttaaaacgtcatctgcatcaagaactagtttaagctcaccacatcagtttgctcctggagcgacagtattgtataagggcgataaaatggtgcttaacctggacaggtctcgtgttccaactgagtgtatagagaaaattgaggccattcttaaggaacttgaaaagccagcaccctga

SEQ ID NO: 135858 - DNA, 898 bp, Homo sapiens
atgctccgactggccattgaaactgttgctcatgactatgatgtaaaacatattgacagcgcgcctaacctgggtatcggcacgattaatgtcgtatgtgctgctgatgtgctgattgttcccacgcctgctgagttgtttgactacacctccgcactgcagtttttcgatatgcttcgtgatctgctcaagaacgttgatcttaaagggttcgagcctgatgtacgtattttgcttaccaaatacagcaatagtaatggctctcagtccccgtggatggaggagcaaattcgggatgcctggggaagcatggttctaaaaattgttgtacgtgaacggaatgaagttggtaaaggtcagatccggatgagaactgtttttgaccaggccattgatcaacgctcttcaactgatacttcgttatcgacaccagctgccccgatggtggattcgttaattgcgcgcgtaggagtaatggctcgcggtaatgccattactttgcctgtatgtggtcgggatgtggagtttactcttgaagtgctccggggtgatagtgttgagaagacctctcgggagctgcttactgaggacgcactggatgatctcatcccttcttttctactgactggtcaacagacaccggcgttcggtcgaagagtatctggtgtcatagaaattgccgatgggagtcgccgtcgtaaagctgctgcacttaccgaaagtgattatcgtgttctggttggcgagctggatgatgagcagatggctgcattatccagattgggttttttttatcgcccaacaagtgcttatgaacgtggtcagcgttatgcaagccgattgcagaatgaatttgctggaaatatttctgcgctggcggatgcggaaaatatttcac

SEQ ID NO: 135859 - DNA, 1980 bp, Homo sapiens; identical to SEQ ID NO: 119299
  misc_feature (1)...(1980): n = a,t,c or g

SEQ ID NO: 135860 - DNA, 1932 bp, Homo sapiens; identical to SEQ ID NO: 119300
  misc_feature (1)...(1932): n = a,t,c or g

SEQ ID NO: 135861 - DNA, 1014 bp, Homo sapiens
tcaacaagatggtgaattgactagtgggtagatccacaggacgggtgtggtcgccatgatcgcgtagtcgatagtggctccaagtagcgaagcgagcaggactgggcggcggccaaagcggtcggacagtgctccgagaacgggtgcgcatagaaattgcatcaacgcatatagcgctagcagcacgccatagtgactggcgatgctgtcggaatggacgatatcccgcaagaggcccggcagtaccggcataaccaagcctatgcctacagcatccagggtgacggtgccgaggatgacgatgagcgcattgttagatttcatacacggtgcctgatagtagtacatcaggtgtggatcggtgggcagactaccttcatcaaatttgcccattaactcagtttcaatacggtgcagagccagacaggaaggaataatgtcaagccccggccagcaagtgggctttattgcataagtgacatcgtccttttccccaagatagaaaggcaggagagtgtcttctgcatgaatatgaagatctggtacccatccgtgatacattgtttctgttccctgggggtcgttaccttccacgagcaaaacacgtagccccttcagagccagatcctgagcaagatgaacagaaactgaggttttgtaaacgccacctttatgggcagcaaccccgatcaccggtggaaatacgtcttcagcacgtcgcaatcgcgtaccaaacacatcacgcatatgattaatttgttcaattgtataaccaacacgttgctcaacccgtcctcgaatttccatatccgggtgcggtagtcgccctgctttctcggcatctctgatagcctgagaagaaaccccaactaaatccgctgcttcacctattctccagcgccgggttattttcctcgcttccgggctgtcatcattaaactgtgcaatggcgatagccttcgtcatttcatgaccagcgtttatgcactggttaagtgtttccatgagtttcat

SEQ ID NO: 135862 - DNA, 1077 bp, Homo sapiens
  misc_feature (1)...(1077): n = a,t,c or g
tcaacaagatggtgaattgactagtgggtagatccacaggacgggtgtggtcgccatgatcgcgtagtcgatagtggctccaagtagcgaagcgagcaggactgggcggcggccaaagcggtcggacagtgctccgagaacgggtgcgcatagaaattgcatcaacgcatatagcgctagcagcacgccatagtgactggcgatgctgtcggaatggacgatatcccgcaagaggcccggcagtaccggcataaccaagcctatgcctacagcatccagggtgacggtgccgaggatgacgatgagcgcattgttagatttcatacacggtgcctgacntagtctaggcgcgctgtcaataactatgacatcatagtcatgagcaacagtttcaatggccagtcggagcatcaggtgtggatcggtgggcagtttaccttcatcaaatttgcccattaactcagtttcaatacggtgcagagccagacaggaaggaataatgtcaagccccggccagcaagtgggctttattgcataagtgacatcgtccttttccccaagatagaaaggcaggagagtgtcttctgcatgaatatgaagatctggtacccatccgtgatacattgaggctgttccctgggggtcgttaccttccacgagcaaaacacgtagccccttcagagccagatcctgagcaagatgaacagaaactgaggttttgtaaacgccacctttatgggcagcaaccccgatcaccggtggaaatacgtcttcagcacgtcgcaatcgcgtaccaaacacatcacgcatatgattaatttgttcaattgtataaccaacacgttgctcaacccgtcctcgaatttccatatccgggtgcggtagtcgccctgctttctcggcatctctgatagcctgagaagaaaccccaactaaatccgctgcttcacctattctccagcgccgggttattttcctcgcttccgggctgtcatcattaaactgtgcaatggcgatagccttcgtcatttcatgaccagcgtttatgcactggttaagtgtttccatgagtttcat

SEQ ID NO: 135863 - DNA, 783 bp, Homo sapiens; identical to SEQ ID NO: 127581

SEQ ID NO: 135864 - DNA, 1053 bp, Homo sapiens; identical to SEQ ID NO: 118377

SEQ ID NO: 135865 - DNA, 735 bp, Homo sapiens
atgaccaccagcggccccgaggggaatttgttaatggcgcgcgtaggagtaaaggctcgcggtaaagcccattacttgcccttgctccggggtgaaagtgtgagaaagacctctcgggtagggtcaggtaatgaacgtgaccaggagctgcttactgaggacgcactggatgatctcatcccttcttttctactgactggtcaacagacaccggcgttcggtcgaagagtatctggtgtcatagaaattgccgatgggagtcgccgtcgtaaagctgctgcacttaccgaaagtgattatcgtgttctggttggcgagctggatgatgagcagatggctgcattatccagattgggtaacgattatcgcccaacaagtgcttatgaacgtggtcagcgttatgcaagccgattgcagaatgaatttgctggaaatatttctgcgctggctgatgcggaaaatatttcacgtcagattattacccgctgtatcaacaccgccaaattgcctaaatcagttgttgctcttttttctcaccccggtgaactatctgcccggtcaggtgatgcacttcaaaaagcctttacagaaaagagaacacttaagcagcaggcactaacttcagagcaaaaaaagcggggtataatgaagctgaagaagtatcatcgtctttatctccccaagggcggctttctaaccgaagtgcctctaaggatatgtactcatcctttttaa

SEQ ID NO: 135866 - DNA, 1089 bp, Homo sapiens
atgaacatgaacatcaaaaaaattgtaaaacaagccacagttctgacttttacgactgcacttctggcaggaggagcgactcaagccttcgcgaaagaaaataaccaaaaagcatacaaagaaacgaaggcggtagggtcaggtaatgaacgtgaccaggagctgcttactgaggaggcatggaatgatctcatcctttcttttctactgactggtcaacagaccccggcgttcggtcgaagagtatctggtgtcatagaaattccggatgggagtcgccgtcgtaaagctgctgcacttccgaaaagtgattatcgtgttctggttggcgagctggatgatgagcagatggctgcattatccagattgggtaacgattatcgcccaacaagtgcttatgaacgtggtcagcgttatgcaagccgattgcagaatgaatttgctggaaatatttctgcgctggctgatgcggaaaatatttcacgtaagattattacccgctgtatcaacaccgccaaattgcctaaatcagttgttgctcttttttctcaccccggtgaactatctgcccggtcaggtgatgcacttcaaaaagcctttacagataaagaggaattacttaagcagcaggcatctaaccttcatgagcagaaaaaagctggggtgatatttgaagctgaagaagttatcactcttttaacttctgtgcttaaaacgtcatctgcatcaagaactagtttaagctcacgacatcagtttgctcctggagcgacagtattgtataagggcgataaaatggtgcttaacctggacaggtctcgtgttccaactgagtgtaagagaaaattgaggccattcttaaggaacttgaaaagccagcaccctgatgcgggggatcctctacagaagactggcttgcatgcccctagggcttcctcattcagtcagctagcattagattatgccctttttgtcctatctatcttctacccgggctgcccattctttgttaaacttaagcataaaaacagacaatttcttctgtatctttgggtcttcattctaaaggccgctgtgtatacacattaa

SEQ ID NO: 135867 - DNA, 924 bp, Homo sapiens
atgaaactcatggaaacacttaaccagtgcataaacgctggtcatgaaatgacgaaggctatcgccattgcacagtttaatgatgacagcccggaagcgaggaaaataacccggcgctggagaataggtgaagcagcggatttagttggggtttcttctcaggctatcagagatgccgagaaagcagggcgactaccgcacccggatatggaaattcgaggacgggttgagcaacgtgttggttatacaattgaacaaattaatcatatgcgtgatgtgtttggtacgcgattgcgacgtgctgaagacgtatttccaccggtgatcggggttgctgcccataaaggtggcgtttacaaaacctcagtttctgttcatcttgctcaggatctggctctgaaggggctacgtgttttgctcgtggaagtgcttatgaacttggtcagcgttatgcaagccgattgcagaatgcatttgctggaaaaatttctgcgctggctgatgcggaaatattttcacgtaagattatttacccgctgtatcaacaccgccaaattgcttaaatcagttgttgctcttttttctcacccggttgaactatctgcccggtcaggtgatgcacttcaaaaagcctttacagataaagaggaattacttaagcagcaggcatctaaccttcatgagcagaaaaaagctggggtgatatttgaagctgaagaagttatcactctttttacttctgtgcttaaaacgtcatctgcatcaagaactagtttaagctcacgacatcagtttgctcctggagcgacagtattgtataagggcgataaaatggtgcttaacctggacaggtctcgtgttccaactgagtgtatagagaaaattgaggccattcttaaggaacttgaaaagccagcaccctga

SEQ ID NO: 135868 - DNA, 1992 bp, Homo sapiens; identical to SEQ ID NO: 121234

SEQ ID NO: 135869 - DNA, 588 bp, Homo sapiens
  misc_feature (1)...(588): n = a,t,c or g
nttaaccagtgcataaacgctggtcagtaaatgaggaaggctatccccactggcacagcttaatgattgcagcgccggaacgagggaaaaataacccggcgctgggaaatagggtaaaccaccgatataatttggggtttttttccaggcttccaaagatccgaaaaaccaggccggactccggcaccggatatggaaaatcgaaggcggggttgagcaacgtgttggttatacaattgaacaaattaatcatatgcgtgatgtgtttggtacgcgattgcgacgtgctgaagacgtatttccaccggtgatcggggttgctgcccataaaggtggcgtttacaaaacctcagtttctgttcatcttgctcaggatctggctctgaaggggctacgtgttttgctcgtggaaggtaccgacccccagggaacagcctcaatgtatcacggatgggtaccagatcttcatattcatgcagaagacactctcctgcctttctatcttggggaaaaggacgatgtcacttatgcaataaagcccacttgctggccggggcttgacattattccttcctgtccggntntnct

SEQ ID NO: 135870 - DNA, 848 bp, Homo sapiens
tgcccgggggtgatagtgttaaaaacacctctcgggtatggtcgggtaatgaacgtgaccagaagctgcttactgagaacgcactgaatgatctcatcccttcttttctactgactggtcaacagacaccggcgttgggtagaagagtatctggtgtcatagaaattgccgatggaagtcgccgtcgtaaagctgctgcacttaccgaaagtgattatcgtgttctggttggcgagctgtatgatgagcagatgcccccattatccagattgggtaacgattatcgcccaacaagtgctcacccccagaaaagacgttatgcaagccgattgcagaatgaatttgctggaaatatttctgcgctggctgatgcggaaaatatttcacgggttcgggatgtgaatttacttcttgaagtgctcggggttgatagtgttgagaagacttttcgggtatggtcaggtaatgaacgtgaccaggagctgcttatggaggacgcattggatgatctcatcccttcttttctactgactggtcaacagacaccggcgttcggtcgaagagtatctggtgtcatagaaattgccgatgggagtcgccgtcgtaaagctgctgcacttaccgaaagtgattatcgtgttctggttggcgagctggatgatgagcagatggctgcattatccagattgggtaacgattatcgcccaacaagtgcttatgaacgtggtcagcgttatgcaagccgattgcagaatgaatttgctggaaatatttctgcgctggctgatgcggaaaatatttcacgtaagattatcccccgctgtatcaactcttgccaaattgcctaa

SEQ ID NO: 135871 - DNA, 972 bp, Homo sapiens
atgggactgaccctgaacttagagccgcccccagctggaacctgggctccccggcgcggccaccaggtggcactggcgccctccctcgcggacccaggctggtgctctcgtcctttcaagcacaagcttggaggcctgattttcaatcagttgctttcaaacgcacaaacgccgaaccggtttacgcagtttcggcttagtgaaacaaaagaaatcaccaatccgtatgccatgcgtttatacgaatccctgtgtcagtatcgtaagccggatggctcaggcatcgtctctctgaaaatcgactggatcatagagcgttaccagctgcctcaaagttaccagcaaattgccgatgggagtcgccgtcgtaaagctgctgcacttaccgaaagtgattatcgtgttctggttggcgagctggatgatgagcagatggctgcattatccagattgggtaacgattatcgcccaacaagtgcttatgaacgtggtcagcgttatgcaatccgattgcagaatgaatttgctggaaatatttctgcgctggctgatgcggaaaatatttcacgtaagattattacccgctgtatcaacaccgccaaattgcctaaatcagttgttgctcttttttctcaccccggtgaactatctgcccggtcaggtgatgcacttcaaaaagcctttacagataaagaggaattacttaagcagcaggcatctaaccttcatgagcagaaaaaagctggggtgatatttgaagctgaagaagttatcactcttttaacttctgtgcttaaaacgtcatctgcatcaagaactagtttaagctcacgacatcagtttgctcctggagcgacagtattgtataagggcgataaaatggtgcttaacctggacaggtctcgtgttccaactgagtgtatagagaaaattgaggccattcttaaggaacttgaaaagccagcaccctga

SEQ ID NO: 135872 - DNA, 1617 bp, Homo sapiens
atgcagcgacaattgactggatcattaaggatttgtacagacttcctttctggggctttaaagcttactaagcatcagttctcagtaagtacaacccgtccctcagggcggggcgatcgcgcggagtcgggggcggtttcctgcacacagaaagggagtgcttttaggggcaaaggaagctgcccgcggcgtagggacgtctttctaatgtcagcagagagaggccgatgcgggaagagttatccacagatgcgggaagggagaggacgcgagaaggggaaccgcgttctcctggccttccgcggacggggatcgggcaattcagagatcatcagagtggtttcaaaagaggagccacctgtgcctgcaggttcacacactccactccctgcagtctggcaccctgctcctctgcagcacaagatatcgaaggatggaccacaggcacaacacccaggtaaggaaccaccacaaggcaaggccaccacaaagagctgctactatggcaaggcccagcaaagccatgggggcaggactgcctggaggcttagggatccaaccaatggccagcaaaactgcagggatggagcctccactctagtgtgtccagaaggtggaacggcagccccagggggatcctctagcacattcgacccaatagaagatgtactgagaggagatagaggaagagataaggtaaaaagtttattcaaagggataataccagagaactttccaaacctagagaaagatatcaacattcaagtacaagaaggctatagaacaccacgcagatttaaccccaagactacttccagccatttaataatcaaactcctaaaggtcaaggataaagaaaggatcctaaaagcagcaagagaaaagaaacaaataacatgcaaaggaactccaatatatctggtagcagacttctcagtagaaaccttacagacaccggcgtcgggtcgaagagtatctggtgtcatagaaattgccgatgggagtcgccgtcgtaaagctgctgcacttaccgaaagtgattatcgtgttctggttggcgagctggatgatgagcagatggctgcattatccagattgggtaacgattatcgcccaacaagtgcttatgaacgtggtcagcgttatgcaagccgattgcagaatgaatttgctggaaatatttctgcgctggctgatgcggaaaatatttcacgtaagattattacccgctgtatcaacaccgccaaattgcctaaatcagttgttgctcttttttctcaccccggtgaactatctgcccggtcaggtgatgcacttcaaaaagcctttacagataaagaggaattacttaagcagcaggcatctaaccttcatgagcagaaaaaagctggggtgatatttgaagctgaagaagttatcactcttttaacttctgtgcttaaaacgtcatctgcatcaagaactagtttaagctcacgacatcagtttgctcctggagcgacagtattgtataagggcgataaaatggtgcttaacctggacaggtctcgtgttccaactgagtgtatagagaaaattgaggccattcttaaggaacttgaaaagccagcaccctga

SEQ ID NO: 135873 - DNA, 867 bp, Homo sapiens
atggacgatatcccgcaagaggcccggcagtaccggcataaccaagcctatgcctacagcatccagggtgacggtgccgaggatgacgatgagcgcattgttagatttcatacacgggtcaccgtcgacagcgacacacttgcatcggatgcagcccggttaacgtgccggcacggcctggctcgggatgtgaagtttactcttgaagtgctccggggtgatagtgttgagaagacctctcgggtatggtcaggtaatgaacgtgaccaggagctgcttactgaggacgcactggatgatctcatccctttttttctactgactggtcaacagacaccggcgttcggtcgaagagtatctggtgtcatagaaattgccgatgggagtcgccgtcgtaaagctgctgcacttaccgaaagtgattatcgtgttctggttggcgagctggatgatgagcagatggctgcattatccagattgggtaacgattatcgcccaacaagtgcttatgaacgtggtcagcgttatgcaagccgattgcagaatgaatttgctggaaatatttctgcgctggctgatgcggaaaatatttcacgtaagattattacccggctgtatcaacaccggcacaattggctaaatcaggtgttgctcttttttctcaccccggtgaactatctgccccgtcaggggatgcactttaaaaagcctttaccgattaagaggaatttctttaaccgcaaggatctaacctttattgaacagaaaaaagctgggggtgatatttggaagctgaaaaaaattttcactctttttaacttctgtggtttaaaaacgtcattttgcgtcaaagaactaattttatag

SEQ ID NO: 135874 - DNA, 1341 bp, Homo sapiens
atgctagtgtggtgtcccttaaaagtcgacggcccagggggccgccaggcctaccccaaaggcaaatcgggaggatcgaaacgccagatcgcaaaaaccagtccatccagaaggagacatgaacatgaacatcaaaaaaatgtaaaacaagccccagttctgacttttacgactgcacttctggcaggaggagcgactcaagccttcgcgaaagaaaataaccaaaaagcatacaaagaaacgtacggcgtctctcatattacacgccatgatatgctgcagatccctaaacagcagcaaaacgaaaaataccaagtgcctcaattcgatcaatcaacgattaaaaatattgagtctgcaaaaggacttgatgtgtgggacagctggccgctgcaaaacgctgacggaacagtagctgaatacaacggctatcacgttgtgtttgctcttgcgggaagcccgaaagacgctgatgacacatcaatctacatgttttatcaaaaggtcggcgacaactcaatcgacagctggaaaaacgcgggccgtgtctttaaagacagcgataagttcgacgccaacgatccgatcctgaaagatcagacgcaagaatggtccggttctgcaacctttacatctgacggaaaaatccgtttattctacactgactattccggtaaacattacggcaaacaaagcctgacaacagcgcagaaattgccgatgggagtcgccgtcgtaaagctgctgcacttaccgaaaagtgattatcgtgttctggttggcgagctggatgataagcagatggctgcattatccagattgggtaacgattatcgcccaacaagtgcttatgaacgtggtcagcgttatgcaagccgattgcagaatgaatttgctggaaatatttctgcgctggctgatgcggaaaatatttcacgtaagattattacccgctgtatcaacaccgccaaattgcctaaatcagttgttgctcttttttctcaccccggtgaactatctgcccggtcaggtgatgcacttcaaaaagcctttacagataaagaggaattacttaagcagcaggcatctaaccttcatgagcagaaaaaagctggggtgatatttgaagctgaagaagttatcactcttttaacttctgtgcttaaaacgtcatctgcatcaagaactagtttaagctcacgacatcagtttgctcctggagcgacagtattgtataagggcgataaaatggtgcttaacctggacaggtctcgtgttccaactgagtgtatagagaaaattgaggccattcttaaggaacttgaaaagccagcaccctga

SEQ ID NO: 135875 - DNA, 1812 bp, Homo sapiens
atgagggtgcaggcattgggtaaatacaggcattcaaaatgggagaaattggccaaaacaaagaggctgcaggcccaatgcaagtcccccccccagtggggcagtcaaatattaaagctacaaaatgatctcctcgcttacatccaggtcacactgatgcaagagtggactcttgttcccaaacgggaacaacactcaacctattctcgggctattcttttgatttataagggattttgccgatttcggaaccaccatcaaacaggattttcgcctgctggggcaaaccagcgtggaccgcttgctgcaactctctcagggccaggcggtgaagggcaatcagctgttgcccgtctcactggtgaaaagaaaaaccaccctggcgcccaatacgcaaaccgcctctccccgcgcgttggccgattcattaatgcagctggcacgacaggtaatgaacgtgaccaggagctgcttactaagaacgcatgggatgatctcatcccttcttttctactgactggtcaacaaacaccggcgttcggtcgaagagtatctggtgtcatagaaattgccgatgggagtcgccgtcgtaaagctgctgcacttaccgaaagtgattatcgtcttctggttggcgagctggatgatgagcagatggctgcattatccagattgggtaacgattatcgcccaacaagtgcttatgaacgtggtcagcgttatgcaagccgattgcagaatgaatttgctggaaatatttctgcgctggctgatgcggaaaatatttcacgtaagattattacccgctgtatcaacaccgccaaattgcctaaatcagttgttgctcttttttctcaccccggtgaactatctgcccggtcaggtgatgcacttcaaaaagcctttacagataaagaggaattacttaagcagcaggcatctaaccttcatgagcagaaaaaagctggggtgatatttgaagctgaagaagttatcactcttttaacttctgtgcttaaaacgtcatctgcatcaagaactagtttaagctcacgacatcagtttgctcctggagcgacagtattgtataagggcgataaaatggtgcttaacctggacaggtctcgtgttccaactgagtatcagacgcaagaatggtcgggttctgcaactttaccatctgacggaaaaatccgtttattctacactgactattcgggtaaacattacggcaaacaaagcctgacaacagcgcaggtaaatgtgtcaaaatctgatgacacactcaaaatcaacggagtggaagatcacaaaacgatttttgacggagacggaaaaacatatcagaacgttcagcagtttatcgatgaaggcaattatacatccggcgacaaccatacgctgagagaccctcactacgttgaagacaaaggccataaataccttgtattcgaagccaacacgggaacagaaaacggataccaaggcgaagaatctttatttaacaaagcgtactacggcggcggcacgaacttcttccgtaaagaaagccagaagcttcagcagagcgctaccccccgcgatgctgagttagcgaacggcgccataagaatttttaccgtgggaaatttcccggtgtggggggaaaaaaaatgtgtgcacaagtttgtcaaaatattttttgggcagatcaaagttgaggatgagctcaggcgctttggcgacctggccggttgcgcgcacactcagggcagcactgatatgccagccccctgctgcctcagccccctccagactttgggtgctgactag

SEQ ID NO: 135876 - DNA, 1012 bp, Homo sapiens
atccctgtacaagctgaacgcttaccggatgtgtaataagtattcattgaagagttgggtaattactctcttgaaatcctgggtatctcatcccaactactcccccatctgcgaggtacctgttaaattattttatgccaagacaccggcgttcggtcgaagagtatctggtgtcatagaaattgccgatgggagtcgccgtcgtaaagctgctgcacttaccgaaagtgattatcgtgttctggttggcgagctggatgatgagcagatggctgcattatccagattgggtaacgattatcgcccaacaagtgcttatgaacgtggtcagcgttatgcaagccgattgcagaatgaatttgctggaaatatttctgcgctggctgatgcggaaaatatttcacgtaagattattacccgctgtatcaacaccgccaaattgcctaaatcagttgttgctcttttttctcaccccggtgaactatctgcccggtcaggtgatgcacttcaaaaagcctttacagataaagaggaattacttaagcagcaggcatctaaccttcatgagcagaaaaaagctggggtgatatttgaagctcaacaagttatcactcttttaacttctgtgcttaaaacgtcatctgcatcaagaactagtttaagctcacgacatcagtttgctcctggagcgacagtattgtataagggcgataaaatggtgcttaccctggacaggtctcgtgttccaactgagtgtatagagaaaattgaggccattcttaaggaacttgaaaagccagcacccggcatcgccagtcaatatggcgtgctgctagcgctatatgcgttgatgcaatttctatgcgcacccgttctcggagcactgtccggccgctttggccgccgcccagtcctgctcgcttcgctacttggagccactatcgactacgcgatcatggcgaccacacccgtcctgtggatctacccactagtcaattcaccatcttgttga

SEQ ID NO: 135877 - DNA, 2179 bp, Homo sapiens
atttttcccccggggaaatttcttttgccctgagggtaaaagctatctgacaaaacggtttttttttgtttcctccccaattccctccatatgtcggggtaccgggctcggggagggttaatgaaaataaagggcctaggggttgggtctttttatactcccgtgggagggggggccttaaatttaacacaaccttcgcgtttttttaatggccttggcgatttggttgttgctttccaagtaaatgcaaagatttaataaaaaaacgcaaagcaatgattaaaggatgttcagaatgaaactcatggaaacacttaaccagtgcataaacgctggtcatgaaatgacgaaggctatcgccattgcacagtttaatgatgacagcccggaagcgaggaaaataacccggcgctggagaataggtgaagcagcggatttagttggggtttcttctcaggctatcagagatgccgagaaagcagggcgactaccgcacccggatatggaaattcgaggacgggttgagcaaggtgttggttatacaattgaacaaattaatcatatgcgtgatgtgtttggtacgcgattgcgacgtgctgaagacgtatttccaccggtgatcggggttgctgcccataaaggtggcgtttacaaaacctcagtttctgttcatcttgctcaggatctggctctgaaggggctacgtgttttgctcgtggaaggtaacgacccccagggaacagcctcaatgtatcacggatgggtaccagatcttcatattcatgcagaagacactctcctgcctttctatcttggggaaaaggacgatgtcacttatgcaataaagcccacttgctggccggggcttgacattattccttcctgtctggctctgcaccgtattgaaactgagttaatgggcaaatttgatgaaggtaaactgcccaccgatccacacctgatgctccgactggccattgaaactgttgctcatgactatgatgtcatagttattgacagcgcgcctaacctgggtatcggcacgattaatgtcgtatgtgctgctgatgtgctgattgttcccacgcctgctgagttgtttgactacacctccgcactgcagtttttcgatatgcttcgtgatctgctcaagaacgttgatcttaaagggttcgagcctgatgtacgtattttgcttaccaaatacagcaatagtaatggctctcagtccccgtggatggaggagcaaattcgggatgcctggggaagcatggttctaaaaaatgttgtacgtgaaacggatgaagttggtaaaggtcagatccggatgagaactgtttttgaacaggccattgatcaacgctcttcaactgctgccccgatggtggattcgttaattgcgcgcgtaggagtaatggctcgcggtaatgccattactttgcctgtatgtggtcgggatgtgaagtttactcttgaagtgctccggggtgatagtgttgagaagacctctcggacaccggcgttcggtcgaagagtatctggtgtcatagacattgccgatgggagtcgccgtcgtaaagctgctgcacttaccgaaagtgattatcgtgttctggttggcgagctggatgatgagcacatgcctgcattatccccattgggtaacgattatcgcccaacaagtgcttatgaacgtggtcagcgttatgcaacccgattgcagaatgaatttgctggaaatatttctgcgctggctgatgcggaaaatatttcacgtaagattattacccgctgtatcaacaccgccaaattgcctaaatcagttgttgctcttttttctcaccccggtgaactatctgcccggtcaggtgatgcacttcaaaaagcctttacagataaagaggaattacttaagcagcaggcatctaaccttcatgagcagaaaaaagctggggtgatatttgaagctgaagaagttatcactcttttaacttctgtgcttaaaacgtcatctgcatcaatatatagtttaagctcgagacagcagtttgctcatggagcgccagtattgtataagggcgataaaatggtgcttaacctggacaggtctcgtgttccaactgagtgtatagagaaaattgaggccattcttaaggaacttgaaaagccagcaccctga

SEQ ID NO: 135878 - DNA, 1299 bp, Homo sapiens; identical to SEQ ID NO: 127495

SEQ ID NO: 135879 - DNA, 1044 bp, Homo sapiens
atggacgatatcccgcaagaggcccggcagtaccggcataaccaagcctatgcctacagcatccagggtgacggtgccgaggatgacgatgagcgcattgttagatttcatacacgggtcaccgtcgacagcgacacacttgcatcggatgcagcccggttaacgtgccggcacggcctgggtaaccagagacccccttttctactgactggtcaacagacaccggcgttcggtcgaagagtatctggtgtcatagaaattgccgatgggagtcgccgtcgtaaagctgctgcacttaccgaaagtgattatcgtgttctggttggcgagctggatgatgagcagatggctgcattatccagattgggtaacgattatcgcccaacaagtgcttatgaacgtggtcagcgttatgcaagccgattgcagaatgaatttgctggaaatatttctgcgctggctgatgcggaaaatatttcacgtaagattattacccgctgtatcaacaccgccaaattgcctaaatcagttgttgctcttttttctcaccccggtgaactatctgcccggtcaggtgatgcacttcaaaaagcctttacagataaagaggaattacttaagcagcaggcatctaaccttcatgagcagaaaaaagctggggtgatatttgaagctgaagaagttatcactcttttaacttctgtgcttaaaacgtcatctgcatcaagaactagtttaagctcacgacatcagtttgctcctggagcgacagtattgtataagggcgataaaatggtgcttaacctggacaggtctcgtgttccaactgagtgtatagaagaaattgaggccattcttaagaacttgaaaagcccgcacctggacccccactaccaagacgtgattgactcgcgtgacgtgatcgcccgtattgaggagttgcaggggtaccgagctcgaattcgtaatcatggtcatagctgtttcctgtgtgaaattgttatccgctcacaattccacacaacatacgagccggaagcataa

SEQ ID NO: 135880 - DNA, 2061 bp, Homo sapiens
tcacggttccgaaccccaagcaccaccggttcgttcatccagcgccgaccgtgtcaacgccagcgagtacccaacatccagcgaggagacatcaggtcgctcgtccagataggtcatcaacgccgttgcctgcgcggatagcgcttcgggtgttttgcccgacaccatccacggcaccaccggaacatccacgacagaacccgaacccggccccgcagactgactcggcactcccgggggctgttcgaggatgacgtgcgcgttagtaccactgatcccgaacgacgacacccccacccgacgaacacgaccactcctgggccagggcgtgttctccgtaaggagttgaaccgtccccgccgaccaatccacctccggcgacggcgattccacgtgcaacgtgcgtggcagctgcccgtgccgcatcgccatcaccatcttgatcacaccagccacacccgccgccgcttgcgtatgaccgatgttcgacttgaccgaccccaaccacaacggccggccaggatcacgatcacggccgtaggtggcgatcagcgcctgcgcctcgatcggatcacctgtcagatatgcttcaagaacaagtatgtctttattaccattaattctttcatcaactagatcaggctcgaaccctttaagatcaacgttcttgagcagatcacgaagcatatcgaaaaactgcagtgcggaggtgtagtcaaacaactcagcaggcgtgggaacaatcagcacatcagcagcacatacgacattaatcgtgccgatacccaggttaggcgcgctgtcaataactatgacatcatagtcatgagcaacagtttcaatggccagtcggagcatcaggtgtggatcggtgggcagtttaccttcatcaaatttgcccattaactcagtttcaatacggtgcagagccagacaggaaggaataatgtcaagccccggccagcaagtgggctttattgcataagtgacatcgtccttttccccaagatagaaaggcaggagagtgtcttctgcatgaatatgaagatctgtacccatccgtgatacattgaggctgttcccttccacgagcaaaacacgtagccccttcagagccagatcctgagcaagatgaacagaaactgaggttttgtaaacgccacctttatgggcagcaaccccgatcaccggtggaaatacgtcttcagcacgtcgcaatcgcgtaccaaacacatcacgcatatgattaatttgttcaattgtataaccaacacgttgctcaacccgtcctcgaatttccatatccgggtgcggtagtcgccctgctttctcggcatctctgatagcgatatgagtcgtctggcggcctttctttttctcaatgtatgagaggcgcattggagttctgctgttgatctcattaacacagacctgcaggaagcggcggcggaagtcaggcatacgctggtaactttgaggcagctggtaacgctctatgatccagtcgattttcagagagacgatgcctgagccatccggcttacgatactgacacagggattcgtataaacgcatggcatacggattggtgatttcttttgtttcactaagccgaaactgcgtaaaccggttctgtaacccgataaagaagggaatgagatatgggttgatatgtacactgtaaagccctctggatggactgtgcgcacgtttgataaaccaaggaaaagattcatagcctttttcatcgccggcatcctcttcagggcgataaaaaaccacttccttccccgcgaaactcttcaatgcctgccgtatatccttactggcttccgcagaggtcaatccgaatatttcagcatatttagcaacatggatctcgcagataccgtcatgttcctgtagggtgccatcagattttctgatctggtcaacgaacagatacagcatacgtttttgatcccgggagagactatatgccgcctcagtgaggtcgtttgactggacgattcgcgggctatttttacgtttcttgtgattgataaccgctgtttccgccat

SEQ ID NO: 135881 - DNA, 2406 bp, Homo sapiens
atgagactgggatttgaatcaaggggtgagatagcaaaagatcaagctaaacttgatctagcagggcaaaaagaaagggataaccaaagctcaacattgggggaagcagaaaccccattgattatttgctggtcgactctagaggatccccactatgatgtcatagttattgacagcgcgcctaacctgggtatcggcacgattaatgtcgtatgtgctgctgatgtgctgattgttcccacgcctgctgagttgtttgactacacctccgcactgcagtttttcgatatgcttcgtgatctgctcaagaacgttgatcttaaagggttcgagcctgatgtacgtattttgcttaccaaatacagcaatagtaatggctctcagtccccgtggatggaggagcaaattcgggatgcctggggaagcatggttctaaaaaatgttgtacgtgaaacggatgaagttggtaaaggtcagatccggatgagaactgtttttgaacaggccattgatcaacgctcttcaactgatacttcgttatcgacaccagctgccccgatggtggattcgttaattgcgcgcgtaggagtaatggctcgcggtaatgccattactttgcctgtatgtggtcgggatgtgaagtttactcttgaagtgctccggggtgatagtgttgagaagacctctcgggtatggtcaggtaatgaacgtgaccaggagctgcttactgaggacgcactggatgatctcatcccttcttttctactgactggtcaacagacaccggcgttcggtcgaagagtttccttgtaccctctggcaggaggagcgactcaagccttcgcgaaagaaaataaccaaaaagcatacaaagaaacgtacggcgtctctcatattacacgccatgatatgctgcagatccctaaacagcagcaaaacgaaaaataccaagtgcctcaattcgatcaatcaacgattaaaaatattgagtctgcaaaaggacttgatgtgtgggacagctggccgctgcaaaacgctgacggaacagtagctgaatacaacggctatcacgttgtgtttgctcttgcgggaagcccgaaagacgctgatgacacatcaatctacatgttttatcaaaaggtcggcgacaactcaatcgacagctggaaaaacgcgggccgtgtctttaaagacagcgataagttcgacgccaacgatccgatcctgaaagatcagacgcaagaatggtccggttctgcaacctttacatctgacggaaaaatccgtttattctacactgactattccggtaaacattacggcaaacaaagcctgacaacagcgcaggtaaatgtgtcaaaatctgatgacacactcaaaatcaacggagtggaagatcacaaaacgatttttgacggagacggaaaaacatatcagaacgttcagcagtttatcgatgaaggcaattatacatccggcgacaaccatacgctgagagaccctcactacgttgaagacaaaggccataaataccttgtattcgaagccaacacgggaacagaaaacggataccaaggcgaagaatctttatttaacaaagcgtactacggcggcggcacgaacttcttccgtaaagaaagccagaagcttcagcagagcgctaaaaaacgcgatgctgagttaggggtctatgctcttgctgtttcctctgtccggggtaccgagctagagctgggacttacaccggcgttcggtcgaagagtatctggtgtcatagaaattgccgatgggagtcgccgtcgtaaagctgctgcacttaccgaaagtgattatcgtgttctggttggcgagctggatgatgagcagatggctgcattatccagattgggtaacgattatcgcccaacaagtgcttatgaacgtggtcagcgttatgcaagccgattgcagaatgaatttgctggaaatatttctgcgctggctgatgcggaaaatatttcacgtaagattattacccgctgtatcaacaccgccaaattgcctaaatcagttgttgctcttttttctcaccccggtgaactatctgcccggtcaggtgatgcacttcaaaaagcctttacagataaagaggaattacttaagcagcaggcatctaaccttcatgagcagaaaaaagctggggtgatatttgaagctgaagaagttatcactcttttaacttctgtgcttaaaacgtcatctgcatcaagaactagtttaagctcacgacatcagtttgctcctggagcgacagtattgtataagggcgataaaatggtgcttaacctggacaggtctcgtgttccaactgagtgtatagagaaaattgaggccattcttaaggaacttgaaaagccagcaccctga

SEQ ID NO: 135882 - DNA, 3189 bp, Homo sapiens
  misc_feature (1)...(3189): n = a,t,c or g
atggagaaattgctactggaaaatgacagcttaagtaaggatgtaagccgcctagaaactgtgtttgtacctcctgagaaacatgaaaaagagataatagctctgaaatccaatattgttgaacttaagaaacagctgtctgaacttaagaaaaaatgtggtgaagaccaggagaaaatacacgctctcacatctgaaaacactaacttgaagaagatgatgagtaatcagtatgtgccagttaaaacccatgaagaggttaaaatgacactgaatgacacgttagccaaaactaacagagaattattagatgtgaagaaaaaatttgaagatataaatcaggaatttgtaaaaataaaagataagaatgaaatattaaaaagaaacctggaaaacactcagaaccaaataaaagctgagtacatcagcctggcagagcacgaggcaaagatgagctcgctaagtcagagcatgagaaaggtgcaggatagtaatgctgaaatcttggccaactacagaaaaggccaagaagagattgtgacactgcatgccgaaattaaagcacagaagaaggagctcgacacaatacaagaatgcattaagataatgaagcgtgcgcctgttattccaaaacatacgctcaatactcaaccggttgaagatacttcgttatcgacaccagctgccccgatggtggattcgttaattgcgcgcgtaggagtaatggctcgcggtaatgccattactttgcctgtatgtggtcgggatgtgaagtttactcttgaagtgctccggggtgatagtgttgagaagacctctcgggtatggtcaggtaatgaacgtgaccaggagctgcttactgaggacgcactggatgatctcatcccttcttttctactgactggtcaacagacaccggcgttcggtcgaagagtatctggtgtcatagaaattgccgatgggagtcgccgtcgtaaagctgctgcacttaccgaaagtgattatcgtgttctggttggcgagctggatgatgagcagatggctgcattatccagattgggtaacgattatcgcccaacaagtgcttatgaacgtggtcagcgttatgcaagccgattgcagaatgaatttgctggaaatatttctgcgctggctgatgcggaaaatatttcacgtaagattattacccgctgtatcaacaccgccaaattgcctaaatcagttgttgctcttttttctcaccccggtgaagctatctgcccggtcaggatgttcagaatgaaactcatggaaacacttaaccagtgcataaacgctggtcatgaaatgacgaaggctatcgccattgcacagtttaatgatgacagcccggaagcgaggaaaataacccggcgctggagaataggtgaagcagcggatttagttggggtttcttctcaggctatcagagatgccgagaaagcagggcgnctaccgcacccggatatggaaattcgaggacgggttgagcaacgtgttggttatacaattgaacaaattaatcatatgcgtgatgtgtttggtacgcgattgcgacgtgctgaagacgtatttacaccggtgatcggggttgctgccataaagactgggaccacggtccatatcgtatcgtcgtccagtttattaggcggggaccatggtccatctcgtatcggcggtctattattagtctgtgactacgggcctctcgtatcgtcgtctgggatcagcggtcctactcgtatcgtcggtctgattattagtctgggaccaggataccacttgtgttttcggtctgattatcggactgggatcacggatccactttatattggtgatgcgactattcgcgtgagtctacgagtatattctttgccgtcaaggtcaaggattgaacatgtcgtcgctaactgtggaatgatccctaaacagcagcaaaacgaaaaataccaagtgcctcaattcgatcaatcaacgattaaaaatattgagtctgcaaaaggacttgatgtgtgggacagctggccgctgcaaaacgctgacggaacagtagctgaatacaacggctatcacgttgtgtttgctcttgcgggaagcccgaaagacgctgatgacacatcaatctacatgttttatcaaaaggtcggcgacaactcaatcgacagctggaaaaacgcgggccgtgtctttaaagacagcgataagttcgacgccaacgatccgatcctgaaagatcagacgcaagaatggtccggttctgcaacctttacatctgacggaaaaatccgtttattctacactgactattccggagtaatggctcgcggtaatgccattactttgcctgtatgtggtcgggatgtgaagtatactcttgaagtgctccggggtgatagtgttgagaagacctctcgggtatggtcaggtaatgaacgtgaccaggagctgcttactgaggacgcactggatgatctcatcccttcttttctactgactggtcaacagacaccggcgttcggtcgaagagtatctggtgtcatagaaattgccgatgggagtcgccgtcgtaaagctgctgcacttaccgaaagtgattatcgtgttctggttggcgagctggatgatgagcagatggctgcattatccagattgggtaacgattatcgcccaacaagtgcttatgaacgtggtcagcgttatgcaagccgattgcagaatgaatttgctggaaatatttctgcgctggctgatgcggaaaatatttcacgtaagattattacccgctgtatcaacaccgccaaattgcctaaatcagttgttgctcttttttctcaccccggtgaactatctgcccggtcaggtgatgcacttcaaaaagcctttacagataaagaggaattacttatgcagcaggcatctaaccttcatgagcagaaaaaagctggggtgatatttgaagctgaagaagttatcactcttttaacttctgtggctaaaacgtcatctgcatccagaactagtttaagctcacgacatcagtttggctcctggagcgacagtatttgtataagggcgataaaatggtgcttaacctggacatgtctcgtggttcaactggagtgtttagatcgcttgcatgcctgcaggtcgactctagaggatcccccatag

SEQ ID NO: 135883 - DNA, 2408 bp, Homo sapiens
atgcagggcatgcaagccctagctaggacagttgatggtaaggaagaaagcctcaaccttgatcaagcttttcaatgggctggaaaaagttcttcttttgggacctgtcccaataaatttcgatcgtcgattaaccccgctggagatagaatattaagcggggcctgttatccaaaactacgtcaatactcaaccggtggagaaacttcgtattcgacaccagctgccccgatggtggattcgttaattgcgcgcgtaggagtaatggctcccggtaatgccattactttgcctgtatgtggtcgggatgtgaagtttactcttgaagtgctccggggtgatagtgttaagaagacctctcgggtatggtcaggtaatgaacgtgaccaggagctgcttactgaggacgcactggatgatctcatcccttcttttctactgactggtcaacagacaccggcgttcggtcgaagagtatctggtgtcatagaaattgccgatgggagtcgccgtcgtaaagctgctgcacttaccgaaagtgattatcgtgttctggttggcgagctggatgatgagcagatggctgcattatccagattgggtaacgattatcgcccaacaagtgcttatgaacgtggtcagcgttatgcaagccgattgcagaatgaatttgctggaaatatttctgcgctggctgatgcggaaaatatttcacgtaagattattacccgctgtatcaacaccgccaaattgcctaaatcagttgttgctcttttttctcaccccggtgaactatctgcccggtcaggtgatgcacttcaaaaagcctttacagataaagaggaattacttaagcagcaggggggatcctctagagtcggcgacaactcaatcgacagctggaaaacgcggggccgtgttctttaaagccagccgataagtttgacgcccaacgatccggatctgaaaagatcagacgcaagaatggtccggtttctgcaacttttacatctgacggaaaaatcggtttattttacactgactatcccggtaaacattacggcaaacaaagcctgacaacagcgcaggtaaatgtgtcaaaatctgatgacacactcaaaatcaacggagtggaagatcacaaaacgatttttgacggagacggaaaaacatatcagaacgttcagcagtttatcgatgaaggcaattatacatccggcgacaaccatacgctgagagaccctcactacgttgaagacaaaggccataaataccttgtattcgaagccaacacgggaacagaaaacggataccaaggcgaagaatctttatttaacaaagcgtactacggcggcggcacgaacttcttccgtaaagaaagccagaagcttcagcagagcgctaaaaaacgcgatgctgagttagcgaacggcgccctcggtatcatagagttaaataatgattacacattgaaaaaagtaatgaagccgctgatcacttcaaacacggtaactgatgaaatcgagcgcgcgaatgttttcaaaatgaacggcaaatggttgttcaaatactgcatgctgctgctatttttcaaaattccttttgaatccatagatcccccttctgagttttcttgcagttcattgttaaaccaggttgcttgtgctgtacatcaatgcttcacacactttagcatagaaaagaaccccctgacaccggcgttcggtcgaagagtatctggtgtcatagaaattgccgatgggagtcgccgtcgtaaagctgctgcacttaccgaaagtgattatcgtgttctggttggcgagctggatgatgagcagatggctgcattatccagattgggtaacgattatcgcccaacaagtgcttatgaacgtggtcagcgttatgcaagccgattgcagaatgaatttgctggaaatatttctgcgctggctgatgcggaaaatatttcacgtaagattattacccgctgtatcaacaccgccaaattgcttaaatcagttgttgctcttttttctcaccccggtgaactatctgcccggtcaggtgatgcacttcaaaaagcctttacagataaagaggaattacttaagcagcaggcatctaaccttcatgagcagaaaaaagctggggtgatatttgaagctgaagaagttatcactcttttaacttctgtgcttaaaacgtcatctgcatcaagaactagtttaagctcacgacatcagtttgctcctggagcgacagtattgtataagggcgataaaatggtgcttaacctggacagttgctcatactatcctatgtatatcaccaatgtaacaacagctgtttttattgctgctgtcattgtgctggaaaagcgcaaacatgtttgtacagctttctaa

SEQ ID NO: 135884 - DNA, 3774 bp, Homo sapiens
atgaaactcatggaaacacttaaccagtgcataaacgctggtcatgaaatgacgaaggctatcgccattgcacagtttaatgatgacagcccggaagcgaggaaaataacccggcgctggagaataggtgaagcagcggatttagttggggtttcttctcaggctatcagagatgccgagaaagcagggcgactaccgcacccggatatggaaattcgaggacgggttgagcaacgtgttggttatacaattgaacaaattaatcatatgcgtgatgtgtttggtacgcgattgcgacgtgctgaagacgtatttccaccggatctggctctgaaggggctacgtgttttgctcgtggaaggtaacgacccccagggaacagcctcaatgtatcacggatgggtaccagatcttcatattcatgcagaagacactctcctgcctttctatcttggggaaaaggacgatgtcacttatgcaataaagcccacttgctggccggggcttgacattattccttcctgtctggctctgcaccgtattgaaactgagttaatgggcaaatttgatgaaggtaaactgcccaccgatccacacctgatgctccgactggccattgaaactgttgctcatgactatgatgtcatagttattgacagcgcgcctaacctgggtatcggcacgattaatgtcgtatgtgctgctgatgtgctgattgttcccacgcctgctgagttgtttgactacacctccgcactgcagtttttcgatatgcttcgtgatctgctcaagaacgttgatcttaaagggcaattatacatccggcgacaaccatacgctgagagaccctcactacgttgaagacaaaggccataaataccttgtattcgaagccaacacgggaacagaaaacggataccaaggcgaagaatctttatttaacaaagcgtactacggcggcggcacgaacttcttccgtaaagaaagccagaagcttcagcagagcgctaaaaaacgcgatgctgagttagcgaacggcgccctcggtatcatagagttaaataatgattacacattgaaaaaagtaatgaagccgctgatcacttcaaacacggtaactgatgaaatcgagcgcgcgaatgttttcaaaatgaacggcaaatggtacttgttcactgattcacgcggttcaaaaatgacgatcgatggtattaactcaaacgatatttacatgcttggttatgtatcaaactctttaaccggcccttacaagccgctgaacaaaacagggcttgtgctgcaaatgggtcttgatcccaaacgatgtgacattcacttactctccacttcgcagtgcctcaagccaaagggatcttatgtgaagaagataattatacggccggcgacaaccatatgatgagagcccctcactgcgaagaagacagagcccataaattcgttgtattcgacgccaacgcgggaacagaaagcggacaccaaggagaatcttctttatttaacagagcgtgcggcggcggcggcacgttcttcttcagtaaagaaagccagaagcttcagcagagcgctaaaaaacgcgattgcataaacgctggtcatgaaatgacgaaggctatcgccattgcacagtttaatgatgacagcccggaagcgaggaaaataacccggcgctggagaataggtgaagcagcggatttagttggggtttcttctcaggctatcagagatgccgagaaagcagggcgactaccgcacccggatatggaaattcgaggacgggttgagcaacgtgttggttatacaattgaacaaattaatcatatgcgtgatgtgtttggtacgcgattgaaacgtgctgaagacgtatttccaccggtgatcggggttgctgcccataaaggtggcgtttacaaaacctcagtttctgttcatcttgctcaggatctggctctgaaggggtccctgctccttcctaagaatgactttctcttcaaactaggccttgagggtcatttacctttgggaaaaatccactccccacctacaggggctgatgttgccagaggatccagtggccttcccaagtctgagctatttcttccagagagaaatacccaggagcttcagcaagacagtgaagaggggcctctggcccttcaagtcctgcaaagcaatctcatggattttgccgatttcggaaccaccatcaaacaggattttcgcctgctggggcaaaccagcgtggaccgcttgctgcaactctctcagggccaggcggtgaagggcaatcagctgttgcccgtctcactggtgaaaagaaaaaccaccctggcgcccaatacgcaaaccgcctctccccgcgcgttggccgattcattaatgcagctggcacgacaggtttcccgactggaaagcgggcagaacaatgacggtatctgcgagatccatgttgctaaatatgttgaaatattcggattgacctctgcggaagccagtaaggatatacggcaggcattgaagagtttcgcggggaagttagtggttttttatcgccctgaagaggatgccggcgatgaaaaaggctatgaatcttttccttggtttatcaaacgtgcgcacagtccatccagagggctttacagtgtacatatcaacccatatctcattcccttctttatcgggttacagaaccggtttacgcagtttcggcttagtgaaacaaaagaaatcaccaatccgtatgccatgcgtttatacgaatccctgtgtcagtatcgtaagccggatggctcaggcatcgtctctctgaaaatcgactggatcatagagcgttaccagctgcctcaaagttaccagcgtatgcctgacttccgccgccgcttcctgcaggtctgtgttaatgagatcaacagcagaactccaatgcgcctctcatacattgagaaaaagaaaggccgccagacgactcatatctcccggaagtttactctgaagtggtccgggggtgatagtgttgagaagacttctcgggtatggtcaggtaatgaacgtgcccaggagctgcttactgaggacgcactgaatgatctcatcccttcttttctactgactggtcaacagacaccggcgttcggtcgaagagtatctggtgtcatagaaattgccgatgggagtcgccgtcgtaaagctgctgcacttaccgaaagtgattatcgtgttctggttggcgagctggatgatgagcagatggctgcattatccagattgggtaacgattatcgcccaacaagtgcttatgaacgtggtcagcgttatgcaagccgattgcagaatgaatttgctggacatatttctgcgctggctgatgcggaaaatatttcacgtaagattattacccgctgtatcaacaccgccaaattgcctaaatcagttgttgctcttttttctcaccccggtgaactatctgcccggtcaggtgatgcacttcaaaaagcctttacagataaagaggaattacttaagcagcaggcatctaaccttcatgagcagaaaaaagctggggtgatatttcaagctgaagaagttatcactcttttaacttctgtgcttaaaacgtcatctgcatcaagaactagtttaagctcacgacatcagtttgctcctggagcgacagtattgtataagggcgataaaatggtgcttaacctggacagttctcgtgtccaactgagttatagagaaaatgaggccaaataa

SEQ ID NO: 135885 - DNA, 1855 bp, Homo sapiens
atgaaactcatggaaacacttaaccagtgcataaacgctggtcatgaaatgacgaaggctatcgccattgcacagtttaatgatgacagcccggaagcgaggaaaataacccggcgctggagaataggtgaagcagcggatttagttggggtttcttctcaggctatcagagatgccgagaaagcagggcgactaccgcacccggatatggaaattcgaggacgggttgagcaacgtgttggttatacaattgaacaaattaatcatatgcgtgatgtgtttggtacgcgattgcgacgtgctgaagacgtatttccaccggtgatcggggttgctgcccataaaggtggcgtttacaaaacctcagtttctgttcatcttgctcaggatctggctctgaaggggctacgtgttttgctcgtggaagccttgcaccagggattttctaaatctttctttctccccgcctatggcaggaccaccctggacgttctacagtccacagagttcagcccatcagggagtgagactggaagcccatgtgagaagtggggcctggtgccggggtctggagaaggggcttacacaggtccctgggcagccggggtctgggctgtgggcaggggtctgggtctaccagctgtgctctgcctgcagcccctctgtcgctcagaaatcccagacatacaaccagccaagctggaattgcgtgaatatgttcgccgaagcactggacatcatagcgatgctttacctgaattactgcccgccaaatacagtaatggctacgaattaaaagaagctctgcactatattcacgaaccaccgattgatgccaatatggtacaactcaatcaaggctcacatcctgcacagcagcgattgatttttgaagaactggtcgcgcatcaaatcagcttacttacacgtcgtgcttatattcgacaaatagcagcacctcgctttagcagcagcaaagttttagcaaagcgccttttagatgccctgcctttccagatgaccaacgcacaaaaaagggtttctaaagaaattctacggacaccggcgttcggtcgaagagtatctggtgtcatagaaattgccgatgggagtcgccgtcgtaaagctgcggcgcttaccgaaagtgattatcgtgttctggttggcgagctggatgatgagcagatggctgcattatccagattgggtaacgattatcgcccaacaagtgcttatgaacgtggtcagcgttatgcaagccgattgcagaatgaatttgctggaaatatttctgcgctggctgatgcggaaaatatttcacgtaagattattacccgctgtatcaacaccgccaaattgcctaaatcagttgttgctcttttttctcaccccggtgaactatctgcccggtcaggtgatgcacttcaaaaagcctttacagataaagaggaattacttaagcagggggccttttacccttattgaccggataaaagctggggtgatatttgaggctgacgaaagtatcactcttttaacttctgtgcttaaaacgtcatctgcatcaagaactagtttaagctcacgacatcagtttgctcctggagcgacagtattgtattatcgtcgataaaatggtgcttcaacctggacaggtctcgtgttcctaactgagtgtatagagaaaattgaggccattcttaagggaactgaaaaccagccccctgtgcgacacctcattgctgtcctcacagccaagcccaacccagcttttcaacaagactcagcgtcatttatgagcatctctaggctcatccgtaaccactttccagctcccgtggctatacccatgtga

SEQ ID NO: 135886 - DNA, 3542 bp, Homo sapiens
  misc_feature (1)...(3542): n = a,t,c or g
accgttcagctggatattacggcctttttaaagaccgtaaagaaaaataagcacaagttttatccggcctttattcacattcttgcccgcctgatgaatgctcatccggaattccgtatggcaatgaaagacggtgagctggtgatatgggatagtgttcacccttgttacaccgttttccatgagcaaactgaaacgttttcatcgctctggagtgaataccacgacgatttccggcagtttctacacatatattcgcaagatgtggcgtgttacggtgaaaacctggcctatttccctaaagggtttattgagaatatgtttttcgtctcagccaatccctgggtgagtttcaccagttttgatttaaacgtggccaatatggacaacttcttcgcccccgttttcaccatgggcaaatattatacgcaaggcgacaaggtgctgatgccgctggcgattcaggttcatcatgccgtttgtgatggcttccatgtcggcagaatgcttaatgaattacaacagtactgcgatgagtggcagggcggggggtnaaaacatacgctcaatactcaaccggttgaagatacttcgttatcgacaccagctgccccgatggtggattcgttaattgcgcgcgtaggagtaatggctcgcggtaatgccattactttgcctgtatgtggtcgggatgtgaagtttactcttgaagtgctccggggtgatagtgttgagaagacctctcgggtatggtcaggtaatgaacgtgaccaggagctgcttactgaggacgcactggatgatctcatcccttcttttctactgactggtcaacagacaccggcgttcggtcgaagagtatctggtgtcatagaaattgccgatgggagtcgccgtcgtaaagctgctgcacttaccgaaagtgattatcgtgttctggttggcgagctggatgatgagcagatggctgcattatccagattgggtaacgattatcgcccaacaagtgcttatgaacgtggtcagcgttatgcaagccgattgcagaatgaatttgctggaaatatttctgcgctggctgatgcggaaaatatttcacgtaagattattacccgctgtatcaacaccgccaaattgcctaaatcagttgttgctcttttttctcaccccggtgaactatctgcccggtcaggtgatgcacttcaaaaagcctttacagataaagaggaattacttaagcagcaggcatctaaccttcatgagcagaaaaaagctggggtgatatttgaagctgaagaaggtccccggtcaggtgatgcacttcaaaaagcctttacagataaagaggaattatttaagcagcaggcatctaaccttcatgagcagaaaaaagctggggtgatatttgaagctgaagaagttatcactcttttaacttctgtgcttaaaacgtcatctgcatcaagaactagtttaagctcacgacatcagtttgctcctggagcgacagtattgtataagggcgataaaatggtgcttaccctggacagctctcgtgtcccaactgagtgtatagagaaaattgaggccattcttaaggaacttgaaaagccagcaccctgatgcgtccacgttttagtctacgtttatctgtctttacttaatgtcctttgttacaggccagaaagcataactggcctgaatattctctctgggcccactgtcccacttgtatcgtcggtctgataatcagactgggaccacggtcccactcgtatcgtcggtctgattattagtcgtggaccacggtcccactcgtatcgtcggtctgattattagtctgggccaacggtcccactcgtatcgtcggtctgataatcggtaccgggaccaacggtccccctcgtatcgtcggtctgattattagtactgggaccatgggcccactcgtatcgtcggtctgattattagtcgtggcgcacggtcccactcgtatcgacggtcttgattattagtctgtccaggttaagcaccattttatcgcccttatacaatactgtcgctccaggagcaaactgatgtcgtgagcttaaactagttcttgatgcagatgacgttttaagcacagaagttaaaagagtgataacttcttcagcttcaaatatcaccccagcttttttctgctcatgaaggttagatgcctgctgcttaagtaattcctctttatctgtaaaggctttttgaagtgcatcacctgaccgggcagatagttcaccggggtgagaaaaaagagcaacaactgatttaggcaatttggcggtgttgatacagcgggtaataatcttacgtgaaatattttccgcatcagccagcgcagaaatatttccagcaaattcattctgcaataggcttgcataacgctgaccacgttcataagcacttgttgggcgataatcgttacccaatctggataatgcagccatctgctcatcacccagctcgccaaccagaacacgatatcgctttcggtaagtgcagcagctcagtttctgttcatcttgctcaggatctggctctgaaggggctacgtgttttgctcgtggaaggtaacgacccccagggaacagcctcaatgtatcacggatgggtaccagatcttcatattcatgcagaagacactctcctgcctttctatcgatccacacctgatgctccgactggccattgaaactgttgctcatgactatgatgtcatagttattgacagcgcgcctaacctgggtatcggcacgattaatgtcgtatgtgctgctgatgtgctgattgttcccacgcctgctgagttgtttgactacacctccgcactgcagtttttcgatatgcttcgtgatctgctcaagaacgttgatcttaaagggttcgagcctgatgtacgtattttggtagtgagggtctctcagcgtatggttgtcgccggatgtataattgccttcatcgataaactgctgaacgttctgatatgttttccgttctccgtcaaaaatcgttttgtgatcttccactccgttgattttgagtgtgtcatcagattttgacacatttacctgcgctgttgtcaggctttgtttgccgtaatgtttaccggaatagtcagtgtagaataaacggatttttccgtcagatgtaaaggttgcagaaccggaccattcttgcgtctgatctttcaggatcggatcgttggcgtcgaacttatcgctgtctttaaagacacggcccgcgtttttccagctgtcgattgagttgtcgccgaccttttgataaaacatgtagattgatgtgtcatcagcgtctttcgggcttcccgcaagagcaaacacaacgtgatagccgttgtattcagctactgttccgtcagcgttttgcagcggccagctgtcccacacatcaagtccttttgcagactcaatatttttaatcgttgattgatcgaattgaggcacttggtatttttcgttttgctgctgtttagggatctgcagcat

SEQ ID NO: 135887 - DNA, 2619 bp, Homo sapiens
atgaagcgtgcgcctgttattcaaaaacatacgctcaatactcaaccggttgaagatacttcgttatcgacaccagctgccccgatggtggattcgttaattgcgcgcgtaggagtaatggctcgcggtaatgccattactttgcctgtatgtggtcgggatgtgaagtttactcttgaagtgctccggggtgatagtgttgagaagacctctcgggtatggtcaggtaatgaacgtgaccaggagctgcttactgaggacgcactggatgatctcatcccttcttttctactgactggtcaacagacaccggcgttcggtcgaagagtatctggtgtcatagaaattgccgatgggagtcgccgtcgtaaagctgctgcacttaccgaaagtgattatcgtgttctggttggcgagctggatgatgagcagatggctgcattatccagattgggtaacgattatcgcccaacaagtgcttatgaacgtggtcagcgttatgcaagccgattgcagaatgaatttgctggaaatatttctgcgctggctgatgcggaaaatatttcacgtaagattattacccgctgtatcaacaccgccaaattgcctaaatcagttgttgctcttttttctcacccccgtcaggcaccgtgtatgaaatctaacaatgcgctcatcgtcatcctcggcaccgtcaccctggatgctgtaggcataggcttggttatgccggatctggctctgaaggggctacgtgttttgctcgtggaaggtaacgacccccagggaacagcctcaatgtatcacggatgggtaccagatcttcatattcatgcagaagacactctcctgcctttctatcttggggaaaaggacgatgtcacttatgcaataaagcccacttgctggccggggcttgacattattccttcctgtctggctctgcaccgtattgaaactgagttaatgggcaaatttgatgaaggtaaactgcccaccgatccacacctgatgctccgactggccattgaaactgttgctcatgactatgatgtcatagttattgacagcgcgcctaacctgggtatcggcacgattaatgtcgtatgtgctgctcacgccctgattgttcccacgcctgctgagttgtttgactacacctccgcactgcagtttttcgatatgcttcgtgatctgctcaagaacgttgatcttaaagggttcgagcctgatgtacgtattttgcttaccaaatacagcaatagtaatggctctcagtccccgtggatggaggagcaaattcgggacgcctgccgaagcatggttgtaaaaaatgttgaacgtgaaacggataaagttggtaaagacaccttaaaaggcttttacagtttaaaagagcggcctttggggaatcactttttaggacccaacaacagaccttttggcaaaataatgaagcacaagacaccggcgttcggtcgaagagtatctggtgtcatagaaattgccgatgggagtcgccgtcgtaaagctgctgcacttaccgaaagtgattatcgtgttctggttggcgagctggatgatgagcagatggctgcattatccagattgggtaacgattatcgcccaacaagtgcttatgaacgtggtcagcgttatgcaagccgattgcagaatgaatttgctggaaatatttctgcgctggctgatgcggaaaatatttcacgtaagattattacccgctgtatcaacaccgccaaattgcctaaatcagttgttgctcttttttctcaccccggtgaactatctgcccggtcaggtgatgcacttcaaaaagcctttacagataaagaggaattacttaagcagcaggcatctaaccttcatgagcagaaaaaagctgggggattttgccgatttcggaaccaccatcaaacaggattttcgcctgctggggcaaaccagcgtggaccgcttgctgcaactctctcagggccaggcggtgaagggcaatcagctgttgcccgtctcactggtgaaaagaaaaaccaccctggcgcccaatacgcaaaccgcctctccccgcgcgttggccgattcattaatgcagctggcacgacaggaaacagctatgaccatgattacgaattcgagctcggtaccctcccgcaagaggcccggcagtaccggcataaccaagcctatgcctacagcatccagggtgacggtgccgaggatgacgatgagcgcattgttagatttcatacacgggtcaccgtcgacagcgacacacttgcatcggatgcagcccggttaacgtgccggcacggcctgggtaaccaggtattttgtccacataaccgtgcgcaaaatgttgtggataagcaggacacagcagcaatccacagcaggcatacaaccgcacaccgaggttactccggtctacagtgtctttcagatgcagggatggtgctcaggataggccaagcctgtgtgaaaaccctgcagacagccattctcagggcagttgggctgccctgcactgccaaggtggtcttcccggggccttatgtccacaactgtatgggctccagggctcgcctagtttcatctggttga

SEQ ID NO: 135888 - DNA, 3311 bp, Homo sapiens
atggatgccaagatgcattcaggtggaacagctccccccgggacattgagtcagcgtcagccaagtagtaattccaaaaccaacggctcaaaactcaacccgttgaaagatactttgttatcgacaccaagctgccccgaaggggaattggttaatgcggcgcgtaggagtaatggttccggtaatgccattactttgcctgtatggggtcgggatgtaaagtttactcttgaagtgctccggggtgatagtgttgagaagacctctcgggtatggtcaggtaatgaacgtgaccaggagctgcttactgaggacgcactggatgatctcatcccttcttttctactgactggtcaacagacaccggcgttcggtcgaagagtatctggtgtcatagaaattgccgatgggagtcgccgtcgtaaagctgctgcacttaccgaaagtgattatcgtgttctggttggcgagctggatgatgagcagatggctgcattatccagattgggtaacgattatcgcccaacaagtgcttatgaacgtggtcagcgttatgcaagccgattgcagaatgaatttgctggaaatatttctgcgctggctgatgcggaaaatatttcacgtaagattattacccgctgtatcaacaccgccaaattgcctaaatcagttgttgctcttttttctcaccccggtgaactatctgcccggtcaggtgatgcacttcaaaaagcctttacagataaagaggaattacttaagcagcaggcatctaaccttcatgagcagaaaaaagctgggtgtgacaatctaaaaacttgtcacacttcacatggatctgtcatggcggaaacagcggttatcaatcacaagaaacgtaaaaatagcccgcgaatcgtccagtcaaacgacctcactgaggcggcatatagtctctcccgggatcaaaaacgtatgctgtatctgttcgttgaccagatcagaaaatctgatggcaccctacaggaacatgacggtatctgcgagatccatgttgctaaatatgctgaaatattcggattgacctctgcggaagccagtaaggatatacggcaggcattgaagagtttcgcggggaaggaagtggttttttatcgccctgaagaggatgccggcgatgaaaaaggctatgaatcttttccttggtttatcaaacgtgcgcacagtccatccagagggctttacagtgtacatatcaacccatatctcattcccttctttatcgggttacagaaccggtttacgcagtttcggcttagtgaaacaaaagaaatcaccaatccgtatgccatgcgtttatacgaatccctgtgtcagtatcgtaagccggatggctcaggcatcgtctctctgaaaatcgactggatcatagagcgttaccagctgcctcaaagttaccagcgtatgcctgacttccgccgccgcttcctgcaggtctgtgttaatgagatcaacagcagaactccaatgcgcctctcatacattgagaaaaagaaaggccgccagacgactcatatctttaatgatgacagcccggaaagcgaggaaaataacccggcgctggagaataggtgaagcagcggatttagttggggtttcttctcaggctatcagagatgccgagaaagcagggcgactaccgcacccggatatggaaattcgaggacgggttgagcaacgtgttggttatacaattgaacaaattaatcatatgcgtgatgtgtttggtacgcgattgcgacgtgctgaagacgtatttccaccggtgatcggggttgctgcccataaaggtaacgacccccagggaacagcctcaatgtatcacggatgggtaccagatcttcatattcatgcagaagacactctcctgcctttctatcttggggaaaaggacgatgtcacttatgcaataaagcccacttgctggccggggcttgacattattccttcctgtctggctctgcaccgtattgaaactgagttaatgggcaaatttgatgaagcgcagcctaacctgggtatcggcacgattaatgtcgtatgtgctgctgatgtgctgattgttcccacgcctgctgagttgtttgactacacctccgcactgcagtttttcgatatgcttcgtgatctgctcaagaacgttgatcttaaagggttcgagcctgatgtacgtattttgcttaccaaatacagcaatagtaatggctctcagtccccgtggatggaggagcaaattcgggatgcctggggaagcatggttctaaaaaatgttgtacgtgaaacggatgaagttggtaaaggtcagatccggatgagaactgtttttgaacaggccattgatcaacgctcttcaactgatacttcgttatcgacaccagctgccccgatggtggattcgttaattgcgcgcgtaggagtaatggctcgcggtaatgccattactttgcctgtatgtggtcgggatgtgaagtttactcttgaagtgctccggggtgatagtgttgagaagacctctcgggtatggtcaggtaatgaacgtgaccaggagctgcttactgaggacgcactggatgatctcatcccttcttttctactgactggtcaacagacaccggcgttcggtcgaagagtatctggtgtcatagaaattgccgatgggagtcgccgtcgtaaagctgctgcacttcccgaaaagtaattatggtgttctggttgccgagctggatgatgagcagatgcctgcatatcccagattgggtaacgattatcgcccaacaagtgcttatgaacgtggtcagcgttatgcaaccagattgcagaatgaatttgctgggaaatatttcttgcgctggctgatgcggaaaatatttcacattattacccgctgtatcaacaccgccaaattgcctaaatcagttgttgctcttttttctcaccccggtgaactatctgcccggtcaggtgatgcacttcaaaaagcctttacagataaagaggaattacttaagcagcaggcatctaaccttcatgagcagaaaaaagctggggtgatatttgaagctgaagaagttatcactcttttaacttctgtgcttaaaacgtcatctgcatcaagaactagtttaagctcacgacatcagtttgctcctggagcgacagtattgtataagggcgataaaatggtgcttaacctggacaggtctcgtgttccaactgagtgtatagagaaaattgaggccattcttaaggaacttgaaaagccagcaccctga

SEQ ID NO: 135889 - DNA, 2372 bp, Homo sapiens
atgaaactcatggaaacacttaaccagtgcataaacgctggtcatgaaatgacgaaggctatcgccattgcacagtttaatgatgacagcccggaagcgaggaaaataacccggcgctggagaataggtgaagcagcggatttagttggggtttcttctcaggctatcagagatgccgagaaagcagggcgactaccgcacccggatatggaaattcgaggacgggttgagcaacgtgttggttatacaattgaacaaattaatcatatgcgtgatgtgtttggtacgcgattgcgacgtgctgaagacgtatttccaccggtgatcggggttgctgcccataaaggtggcgtttacaaaacctcagtttctgttcatcttgctcaggatctggctctgaaggggctacgtgttttgctcgtggaaggtaacgacccccagggaacagcctcaatgtatcacggatgggtaccagatcttcatattcatgcagaagacactctcctgcctttctatcttggggaaaaggacgatgtcacttatgcaataaagcccacttgctggccggggcttgacattattccttcctgtctggctctgcaccgtattgaaactgagttaatgggcaaatttgatgaaggtaaactgcccaccgatccacacctgatgctccgactggccattgaaactgttgctcatgactatgatgtcatagttattggacagcgcgcctaacctgggtatcggcacgattaatgtcgtatgtgctgctgatgtgctgattgttcccacgcctgctgagttgtttgactacacctccgcactgcagtttttcgatatgcttcgtgatctgctcaagaacgttgatcttaaagggttcgagcctgatgtacgtattttgcttaccaaatacagcaatagtaatggctctcagtccccgtggatggaggagcaaattcgggatgcctggggaagcatggttaataaaaaatgttgtacgtgaaacgaatgaagttggtaaagctgccccgatggtggattcgttaattgcgcgcgtaggagtaatggctcgcggtaatgccattactttgcctgtatgtggtcgggatgtgaagtttactcttgaagtgctccggggtgatagtgttgagaagacctctcgggtatggtcaggtaatgaacgtgaccaggagctgcttactgaggacgcactggatgatctcatcccttcttttctactgactggtcaacagacaccggcgttcggtcgaagagtatctggtgtcatagaaattgccgatgggagtcgccgtcgtaaagctgctgcacttaccgaaagtgattatcgtgttctggttggcgagctggatgatgagcagatggctgcattatccagattgggtaacgattatcgcccaacaagtgcttatgaacgtggtcagcgttatgcaagccgattgcagaatgaatttgctggaaatatttctgcgctggctgatgcggaaaatatttcacgtaagattattacccgctgtatcaacaccgccaaattgcctaaatcagttgttgctcttttttctcaccccggtgaactatctgcccggtcaggtgatgcacttcaaaaagcctttacagataaagaggaattacttaagcagcaggcatctaaccttcatgagcagaaaaaagctggggtgatatttgaagctgaagaagttatcactcttttaacttctgtgcttaaaacgtcatctgcatcaagaactagtttaagctcacgacatcagtttgctcctggagcgacagtattgtataagggcgataaaatggtgcttaacctggacaggccaaaagtagataaaaccacaaagatggggaaaaaacagagaagaaaaactggaaactctaaaaagcagagcgcctctcctcctccaaatgaatgcagctcctcaccagcaacggaacaaagctggatggagaatgactttgacgagctgagagaagaaggcttcagacgatcaaattactccgagctatgggaggacattcaaaacaaaggcaaacaagttgaaaactttggaaaaaatttagaagaatgtataactagaataaccaatacagagaagtgcttaaaggagctgttggagctgaaaaccaaggctcgagaactacatgaagaatgcagaagcctcaggagccgatgtgatcaactgatagaaagggtatcagtgatggaagacccactgaatgaaatgaagcaagacgggaagtttagagaaaaaagaataaaaagaaatgagcaaagcctccaagaaatatgggactatgtgaaaagaccaaatctacgtctgattggtgtacctgaaagctga

SEQ ID NO: 135890 - DNA, 7060 bp, Homo sapiens
atgaaactcatggaaacacttaaccagtgcataaacgctggtcatgaaatgacgaaggctatcgccattgcacagtttaatgatgacagcccggaagcgaggaaaataacccggcgctggagaataggtgaagcagcggatttagttggggtttcttctcaggctatcagagatgccgagaaagcagggcgactaccgcacccggatatggaaattcgaggacgggttgagcaacgtgttggttatacaattgaacaaattaatcatatgcgtgatgtgtttggtggcgtttacaaaacctcagtttctgttcatcttgctcaggatctggctctgaaggggctacgtgtttgtgctcgtggaaggtaacgacccctcagggaacagcctcaatgtatcacggatgggtaccagatcttcatattcatgcagaagacactctcctgcctttctatcttggggaaaaggacgatgtcacttatgcaataaagcccacttgctggccggggcttgacattattccttcctgtctggctctgcaccgtattgaaactgagttaatgggcaaatttgatgaaggtaaactgcccaccgatccacacctgatgctccgactggccattgaaactgttgctcatgactatgatgtcatagttattgacagcgcgcctaacctgggtatcggcacgattaatgtcgtatgtgctgctgatgtgctgattgttcccacgcctgctgagttgtttgactacacctccgcactgcagtttttcgatatgcttcgtgatctgctcaagaacgttgatcttaaagggttcgagcctgatgtacgtattttgcttaccaaatacagcaatagtaatggctctcagtccccgtggattgaggagcaaatatcggatgcctggggaagcatggttctaaaaaatgttcacgccatagtgactggcgatgctgtcggaatggacgatatcccgcaagaggcccggcagtaccggcataaccaagcctatgcctacagcatccagggtgacggtgccgaggatgacgatgagcgcattgttagatttcatacacgggtcaccgtcgacagcgacacacttgcatcggatgcagcccggttaacgtgccggcacggcctgggtaaccagcggaatggtggtgtcctgattgaagacaaattcgagtgcttcttctccctcactgcggtctttgctacaagagcctactatgctgtctatcatttgacgggtgccagacactcagacatcgtggtcgcacacgggtacgctggttgcaatgtcaggtttgttgcacttctgggcacaaataccaccttggagacctacttatctaatcaaggttctaatggcttttcttgtctgcattttggagaggatgtgggacaggagaggatccccatctgcgagatccatgttgctaaatatgctgaaatattcggattgacctctgcggaagccagtaaggatatacggcaggcattgaagagtttcgcggggaaggaagtggttttttatcgccctgaagaggatgccggcgatgaaaaaggctatgaatcttttccttggtttatcaaacgtgcgcacagtccatccagagggctttacagtgtacatatcaacccatatctcattcccttctttatcgggttacagaaccggtttacgcagtttcggcttagtgaaacaaaagaaatcaccaatccgtatgccatgcgtttatacgaatccctgtgtcagtatcgtaagccggatggctcaggcatcgtctctctgaaaatcgactggatcatagagcgttaccagctgcctcaaagttaccagcgtatgcctgacttccgccgccgcttcctgcaggtctgtgttaatgagatcaacagcagaactccaatgcgcctctcatacattgagaaaaagaaaggccgccagacgactcatatcgtattttccttccgcgatatcacttccatgacgacaggatagtctgagggttatctgtcacagatttgagggcggttcgtcacatttgttctgacctactgagggtaatttgtcacagttttgctgtttccttcagcctgcatggattttctcatactttttgaactgtactttttaaggaagccaaatttgagggcagtttgccacagtggatttccttctctttcccttcgtcatgtgacctgatatcgggggttagttcgtcatcattgatgagggttgattatcacagtttattactctgaattggctatccgcgtgtgtacctctacctggagtttttcccacggaggatatttcttcttgcgctgagcgtaagagctatctgacagaacagttcttctttgcttcctcggccaggtcgcctcgttaagctcggttacacggcctgcggggaggcgctagtaataatgagcgcctgaggtagggccttcttcctatctccctttggtagtgttgctcttattttaaacaactttgcgggttttttgaggaccttgcggattttgttgttgctttgcagtaaattgcaagatttaataaaaaaaccgcaaagcaaatgattaaaaggatggtctagaatgacactcatggtagacacttaaccagtgccataaacgctggtcatggaatgacgaaggctatcgccatttgcacaagtttaatgatgacagccccggaagcgaggaaaataacccggcgctggagaataggtgaagcagcggatttagttggggtttcttctcaggctatcagagatgccgagaaagcaaggccgattccggcacccggatatggaaaattcgggcccgggttgagcaacgtgttggttataccattgaacaaatttatcttagcgcgtgatgtgtttggtacgcgattgccacgtgctgaagactgtatttccaccggtgatcggggttgctgcccataaaggtggcgtttacaaaacctcagtttctgttcatcttgctcaggatctggctctgaaggggctacgtgttttgctcgtggaaggtaacgacccccagggaacagcctcaatgtatcacggatgggtgccagatcttcatattcatgcagaagacactctcctgcctttctatcttggggaaaaggacgatgtcacttatgcaataaagcccacttgctggcctggggcttgacattattccttcctgtctggctttgctccgtattgaagctgagtataatgggcaaactgtcaggaaggtaccctgcccaccgatccacacctgatgctccgactggccattgaaactgttgctcatgactatgatgtcatagttattgacagcgcgcctaacctgggtatcggcacgattaatgtcgtatgtgctgctgatgtgctgattgttcccacgcctgctgagttgtttgactacacctccgcactgcagtttttcgatatgcttcgtgatctgctcaaaaccgttgatcttaaagggttcgagcctgatgtacgtattttgcttaccaaatacagcaatagtaatggctctcagtccccgtggatggaggagcaaattcgggatgcctggggaagcatggttctaaaaaatgttgtacgtgaaacggatgaagttggtaaaggtcagatccggatgagaactgtttttgaacaggccattgatcaacgctcttcaactgatacttcgttatcgacaccagctgccccgatggtggatttgttaattgcgcgcgtaggagtaatggctcgcggtaaagccatacttttgcctgtatgtggtcgggaagtaaagtttactcttaaagtgctccggggtgatagtgttgagaagacctctcgggtatggtcaggtaatgaacgtgaccaggagctgcttactgaggacgcactggatgatctcatcccttcttttctactgactggtcaacagacaccggcgttcggtcgaagagtatctggtgtcatagaaattgccgatgggagtcgccgtcgtaaagctgctgcacttaccgaaagtgattatcgtgttctggttggcgagctggatgatgagcagatggctgcattatccagattgggtaacgattatcgcccaacaagtgcttatgaacgtggtcagcgttatgcaagccgattgcagaatgaatttgctggaaatatttctgcgctggctgatgcggaaaatatttcacgtaagattattacccgctgtatcaacaccgccaaattgcctaaatcagttgttgctcttttttctcaccccggtgaactatctgcccggtcaggtgatgcacttcaaaaagcctttacagataaagaggaattacttaagcagcaggctgtagagtgttctctagaccagggccgcatagtattcccagaaggaaaaggtaccacattttctttacccaatccacccatgatgggccatcaagttgattcccacgcttttgcttttgtaaccagtactgcaatgaataaacacatgctcctctcgggttccgaatttagggcttatacgggccccttgacccccaaaaaaaacttgatttgggtgaatggttcacgtagtgggcccatcgcccttaaaagcgggtttttcgcccctttgaccgtggaagtcccacgttctttaaaaagtgaattcctggttccaaactgggaacaacacctcacccctatctcgggctattcttttgatttataagggattttgccggatttcgggaaccacccatcaaacaggaattttcgcctgttggggcaaaccagcgtggaccgcttgctgcaactctctcagggccaggcggtgaagggccaatcagctgttgcccgtctcactggtgaaaagaaaaaccaccctggcgcccaatacgcaaaccgcctctccccgcgcgttggccgattcattaatgcagctggcacgacaggtttcccgactggaaagcgggcagtgagcgcaacgcaattaatgccccggaactctcaacctaaacacatttcagaaagaagttggattcgagatctagtgggcgccgaacctgaggtcgcagactccaagattggagacaggagtctgggaagcagccctggtttggcggccactggtccaagttctcgggaggactcttttaaaggccagagatggggaggggcaactgagtcccagagtcttcccgcagcttggcttccagggaggggctggcggcggactgtgattcgacccagagtcctcctgtcacctcctgcgagggattttgccgatttcggaaccaccatcaaacaggattttcgcctgctggggcaaaccagcgtggaccgcttgctgcaactctctcagggccaggcggtgaagggcaatcagctgttgcccgtctcactggtgaaaagaaaaaccaccctggcgcccaatacgcaaaccgcctctccccgcgcgttggccgattcattaatgcagctggcacgacaggtttcccgactggacagcgggcagccccggaactctcaacctaaacacatttcagaaagaagttggattcgagatctagtgggcgccgaacctgaggtcgcagactccaagattggagacaggagtctgggaagcagccctggtttggcggccactggtccaagttctcgggaggactcttttaaaggccagagatggggaggggcaactgagtcccagagtcttcccgcagcttggcttccagggaggggctggcggcggactgtgattcgacccagagtcctcctgtcacctcctgcgagggattttgccgatttcggaaccaccatcaaacaggattttcgcctgctggggcaaaccagcgtggaccgcttgctgcaactctctcagggccaggcggtgaagggcaatcagctgttgcccgtctcactggtgaaaagaaaaaccaccctggcgcccaatacgcaaaccgcctctccccgcgcgttggccgattcattaatgcagctggcacgacaggtttcccgactggaaagcgggcaccacgttggccggcttccccggtcaagttataaatggggggtccctttagggttccgattaagtgctttcggccacctgcaccccaaaaaacttgatttggttgatggttcacacacgggcgttcggttgaagaggaatctggtgtcatagaaatgcccgatgggagtcgcccgtcgtaaagcttgctgcactttaccgaaaagtgattatcgtgttctggtgccgaagctggatgatgagcagatggctgcattatccagattgggtaacgataatcgcccaacaagtgcttatgaacgtggtcagcgttatgcaagccgattgcagaatgaatttgctggaaatatttctgcgctggctgatgcggaaaatatttcacgtaagattattacccgctgtatcaacaccgccaaattgcctaaatcagttgttgctcttttttctcaccccggtgaactatctgcccggtcaggtgatgcacttcaaaaagcccttacagataaagaggaattacttaagcagcaggcatctaaccttcatgagcagaaaaaagctggggtgatatttgaagctgaagaagttatcactcttttcacttctgtgcttaaaacgtcatctgcatcaagaactagtttaagctcacgccatcagtttgctcctggagcgacagtattgtataagggcgataaaatggtgcttaacctggacaggtctcgtgttccaactgagtgtatagagaaaattgaggccattcttaaggaacttgaaaagccagcacctgatgggggcagccctagatcctcaaaccatccactagattatgtgttagaaattgtagcatatgaggcacggcgcttatttcgtgacaaaattgttggcgcaaaggaacttcatttatttgacatcattttaacatcagtgcctcaaggagattggggctcagacatattagacaatatgtcaggactactactggccacaaaaggtgctcaacaaatgtttgtgatccgcaatgcctacttcaagtcatcttaa

SEQ ID NO: 135891 - DNA, 2484 bp, Homo sapiens
atgaagcgtgcgcctgttattccaaaacatacgctcaatactcaaccggttgaagatacttcgttatcgacaccagctgccccgatggtggattcgttaattgcgcgcgtaggagtaatggctcgcggtaatgccattactttgcctgtatgtggtcgggatgtgaagtttactcttgaagtgctccggggtgatagtgttgagaagacctctcgggtatggtcaggtaatgaacgtgaccaggagctgcttactgaggacgcactggatgatctcatcccttcttttctactgactggtcaacagacaccggcgttcggtcgaagagtatctggtgtcatagaaattgccgatgggagtcgccgtcgtaaagctgctgcacttaccgaaagtgattatcgtgttctggttggcgagctggatgatgagcagatggctgcattatccagattgggtaacgattatcgcccaacaagtgcttatgaacgtggtcagcgttatgcaagccgattgcagaatgaatttgctggaaatatttcggcgctggctgatgcggaaaatatttcacgtaagattattatccgctggatcaacaccgccaaattggctaaatcagttgttgctcttttttctcacccggggaaatatctgcccggtcaagaagcttgcatgcctgcaggcatatggtgcaagctgttggtagatctaccattctggggtctggagcacagtggctcttctctcacagcttcactaggcagtggcccaagtggcactttgtgtgagggctccaaccccacgtttgccttctgcactgcccttgtagaagtttttcataagggctccattcctgcagtagacttctgcctggacatccaggtcgactctagaggatcccctttcgatatgcttcgtgatctgctcaagaacgttgatcttaaagggttcgagcctgatgtacgtattttgcttaccaaatacagcaatagtaatggctctcagtccccgtggatggaggagcaaattcgggatgcctggggaagcatggttctaaaaaatgttgtacgtgaaacggatgaagttggtaaaggtcagatccggatgagaactgtttttgaacaggccattgatcaacgctcttcaactgatacttcgttatcgacaccagctgccccgatggtggattcgttaattgcgcgcgtaggagtaatggctcgcggtaatgccattactttgcctgtatgtggtcgggatgtgaagtttactcttgaagtgctccggggtgatagtgttgagaagacctctcgggtatggtcaggtaatgaacgtgaccaggagctgcttactgaggacgcactggatgatctcatcccttcttttctactgactggtcaacagacaccggcgttcggtcgaagagtatctggtgtcatagaaattgccgatgggagtcgccgtcgtaaagctgctgcacttaccgaaagtgattatcgtgttctggttggcgagctggatgatgagcagatggctgcattatccagattgggtaacgattatcgcccaacaagtgcttatgaacgtggtcagcgttatgcaagccgattgcagaatgaatttgctggaaatatttctgcgctggctgatgcggaaaatatttcacgtaagattattacccgctgtatcaacaccgccaaattgcctaaatcagttgttgctcttttttctcaccccggtgaactatctgcccggtcaggtgatgcacttcaaaaagcctttacagataaagaggaattagttaagcagcaggcatctaacttacaaagcagaaaaaaatacagcaagatggccaggccactctatactgtattcaaggaaacccagagggcaactactcatctagtagaatcccacaccagtggcagaaacagccttcaaaacaataaagcaggccctagtacaagcgccagccttaagctttcccacaggacaaaacttctcttatttgtcatagagagagcaggagtagctcttgcactccttactcagacttgtgggacaaccccagaaccagtggcatatctaaattattacccgctgtatcaacaccgccaaaatgccctaaatcagttgtgcttcttttttctcacccccggtgaactatctgcccggtcaggtgatgcacttcaaaaagcctttacagataaagaggaattacttaagcagcaggcatctaaccttcatgagcagaaaaaagctggggtgatatttgaagctgaagaagttatcactcttttaacttctgtgcttaaaacgtcatctgcatcaagaactagtttaagctcacgacatcagtttgctcctggagcgacagtattgtataagggcgataaaatggtgcttaacctggacaggtctcgtgttccaactgagtgtatagagaaaattgaggccattcttaaggaacttgaaaagccagcaccctga

SEQ ID NO: 135892 - DNA, 10771 bp, Homo sapiens
  misc_feature (1)...(10771): n = a,t,c or g
atgaaactcatggaaacacttaaccagtgcataaacgctggtcatgaaatgacgaaggctatcgccattgcacagtttaatgatgacagcccggaagcgaggaaaataacccggcgctggagaataggtgaagcagcggatttagttggggtttcttctcaggctatcagagatgccgagaaagcagggcgactaccgcacccggatatggaaattcgaggacgggttgagcaacgtgttggttatacaattgaacaaattaatcatatgcgtgatgtgtttggtacgcgattgcgacgtgctgaagacgtatttccaccggtgatcggggttgctgcccataaaggttgcgtttacaagacctcagtttctgttcatcttgctcaggatctggctctgaaggggctacgtgttttgctcgtggaagatcttcatattcatgcagaagacactctcctgcctttctatcttggggaaaaggacgatgtcacttatgcaataaagcccacttgctggccggggcttgacattattccttcctgtctggctctgcaccgtattgaaactgagttaatgggcaaatttgatgaaggtaaactgcccaccgatccacacctgatgctccgactggccattgaaactgttgctcatgactatgatgtcatagttattgacagcgcgcctaacctgggtatcggcacgattaatgtcgtatgtgctgctgatgtgctgattgttcccacgcctgctgagttgtttgactacacctccgcactgcagtttttcgatatgcttcgtgatctgctcaagaacgttgatcttaaagggttcgagcctgatgacgatgtcacttatgcaataaagcccacttgctggccggggcttgacattattccttcctgtctggctctgcaccgtattgaaactgagttaatgggcaaatttgatgaaggtaaactgcccaccgatccacacctgatgctccgactggccattgaaactgttgctcatgactatgatgtcatagttattgacagcgcgcctaacctgggtatcggcacgattaatgtcgtatgtgctgctgatgtgctgattgttcccacgcctgctgagttgtttgactacacctccgcactgcagtttttcgatatgcttcgtgatctgctcaagaacgttgatcttaaagggttcgagcctgatgtacgtattttgcttaccaaatacagcaatagtaatggctctcagtccccgtggatggaggagcaaattcgggatgcctggggaagcatggttctaaaaaatgttgtacgtgaaacggatgaagttgggatttggctctgtgactcaagcttgtatgcaccggggtgtgacaatctaaaaacttgtcacacttcacatggatctgtcatggcggaaacagcggttatcaatcacaagaaacgtaaaaatagcccgcgaatcgtccagtcaaacgacctcactgaggcggcatatagtctctcccgggatcaaaaacgtatgctgtatctgttcgttgaccagatcagaaaatctgatggcaccctacaggaacatgacggtatctgcgagatccatgttgctaaatatgctgaaatattcggattgacctctgcggaagccagtaaggatatacggcaggcattgaagagtttcgcggggaaggaagtggttttttatcgccctgaagaggatgccggcgatgaaaaaggctatgaatcttttccttggtttatcaaacgtgcgcacagtccatccagagggctttacagtgtacatatcaacccatatctcattcccttctttatcgggttacagaaccggtttacgcagtttccgcttagtgaaacaaaagaaatcaccaatccgtatgccatgcgtttataccaattcctgtgtcagtatcggaagccggatggctcaggcatcgtctctctgaaaatcgactggatcatagagcgttaccagctgcctcaaagttaccagcgtatgcctgacttccgccgccgcttcctgcaggtctgtgttaatgagatcaacagcagaactccaatgcgcctctcatacattgagaaaaagaaaggccgccagacgactcatatcgatctggctctgaaggggctacgtgttttgctcgtggaaggtaacgacccccagggaacagcctcaatgtatcacggatgggtaccagatcttcatattcatgcagaagacactctcctgcctttctatcttggggaaaaggacgatgtcacttatgcaataaagcccacttgctggccggggcttgacattattccttcctgtctggctctgcaccgtattgaaactgagttaatgggcaaatttgatgaaggtaaactgcccaccgatccacacctgatgctccgactggccattgaaactgttgctcatgactatgatgtcatagttattgacagcgcccataaccgggggtatcggcacaataaatgtcgtatgtgctgatgatgtgatgattgttcccacgcctgctgagttgtttgactacacctccgcactgcagtttttcgatatgcttcgtgatctgctcaagaacgttgatcttaaagggttcgagcctgatgtacgtattttgcttaccaaatacagcaatagtaatggctctcagtccccgtggatggaggagcaaattcgggatgcctggggaagcatggttctaaaaaatgttgtacgtgaaacggatgaagttggtaaagctgccccgatggtggattcgttaattgcgcgcgtaggagtaatggctcgcggtaatgccattactttgcctgtatgtggtcgggatgtgaagtttactcttgaagtgctccggggtgatagtgttgagaagacctctcgggtatggtcaggtaatgaacgtgaccaggagctgcttactgaggacgcactggatgatctcatcccttcttttctactgactggtcaacagacaccggcgttcggtcaaaggagtatcgggggtcaaagaaattgccgatgggattcgccgtcgtaaagctgctgcacttaccgaaaagtgattatcgtgttctggtgggcgagctggatgatgagcagatggctgcattatccagattgggtaacgattatcgcccaacaagtgcttatgaacgtggtcagcgttatgcaagccgattgcagaatgaatttgctggaaatatttctgcgctggctgatgcggaaaatatttcacgtaagattattacccgctgtatcaacaccgccaaattgcctaaatcagttgttgctcttttttctcaccccggtgaactatctgcccggtcaggtgatgcacttcaaaaagcctttacagataaaggaggatttacttaagcagcaggcatctaaccttcatggagcagaaaaaagctggggttgttattttgaagctgaagaagttatcactcttttaacttctgtgcttaaaacgtcatcttgcatcaagaactagtttaagctcacgacatcagtttgctcctggagcgacagtattgtataagggcgataaaatggtgcttaacctggacaggtctcgtgttccaactgagtacagatacggtgtcttcttaaatgttcttcttccggcaacaaagtattttcagttgcacgatccaagcctacgtaacatggaacttaattactctctggcttcagaggatctggttttgaaggggctacgtgttttgctcgtggaaggtaacgacccccagggaacagcctcaatgtatcacggatgggtaccagatcttcatattcatgcagaagacactctcctgcctttctatcttggggaaaaggacgatgtcacttatgcaataaagcccacttgctggccggggcttgacattattccttcctgtctggctctgcaccgtattgaaactgagtataatgggcaaatttgatgaaggtaaactgcccaccgatccacacctgatgctccgactggccattgaaactgttgctcatgactatgatgtcatagttattgacagcgcgcctaacctgggtatcggcacgattaatgtcgtatgtgctgctgatgtgctgattgttcccacgcctgctgagcagttagatataagctgcgtcacgccagttttttgactattcttcgtgatctgctcaagaacgttgatcttaaagggttcgagcctgatgtacgtatggtgctccggggtgatagtgttgagaagacctctcgggtatggtcaggtaatgaacgtgaccaggagctgcttactgaggacgcactggatgatctcatcccttcttttctactgactggtcaacagacaccggcgttcggtcgaagagtatctggtgtcatagaaattgccgatgggagtcgccgtcgtaaagctgctgcacttaccgaaagtgattatcgtgttctggttggcgagctggatgatgagcagatggctgcattatccagattgggtaacgattatcgcccaacaagtgcttatgaacgtggtcagcgttatgcaagccgattgcagaatgaatttgctggaaatatttctgcgctggctgatgcggaaaatataatcacgtgcgcctttattccaaaacatacgcccaatatcaaccggttgaaagatatttcgttaacgacaccagttgccccgatggtggattcgttatttgcgcgcgtaggagtaatggctcgcggtaatgccaatactttgccctgtatgtggtcgggatgtaaagtttactcttgaagtgctccggggtgatagtgttgacaagacctctcgggtatggtcaggtaatgaacgtgaccaggagctgcttactgaggacgcactggatgatctcatcccttcttttctactgactggtcaacagacaccggcgttcggtcgaagagtatctggtgtcatagaaattgccgatgggagtcgccgtcgtaaagctgctgcacttaccgaaagtgattatcgtgttctggttggcgagctggatgatgagcagatggctgcattatccagattgggtaacgattatcgcccaacaagtgcttatgaacgtggtcagcgttatgcaagccgattgcagaatgaatttgctggaaatatttctgcgctggctgatgcggaaaatatttcacgtaagattattacccgctgtatcaacaccgccaaattgcctaaatcagttgttgctcttttttctcaccccggtgaactatctgcccggtcaggtgatgcacttcaaaaagcctttacagataaagaggaattacttaagcagcaggcatctaaccttcatgagcagaaaaaagctggggtgatatttgaagctgaagaagttatcactcttttaacttctgtgcttaaaacgtcaggggattttgccgatttcggaaccaccatcaaacaggattttcgcctgctggggcaaaccagcgtggaccgcttgctgcaactctctcagggccaggcggtgaagggcaatcagctgttgcccgtctcactggtgaaaagaaaaaccaccctggcgcccaatacgcaaaccgcctctccccgcgcgttggccgattcattaatgcagctggcacgacaggtttcccgactggaaagcgggcagcataggcttggttatgccggtactgccgggcctcttgcgggatatcgtccattccgacagcatcgccagtcactatggcgtgctgctagcgctatatgcgttgatgcaatttctatgcgcacccgttctcggagcactgtccgaccgctttggccgccgcccagtcctgctcgcttcgctacttggagccactatcgactacgcgatcatggcgaccacacccgtcctgtggatctacccactaggattttgccgatttgggaccccccatcaaacaggattttcgccggttggggcaacccagcgtggaccggcttgctgcaactctctcagggcccagccggtgaagggcaatcagctgttgcccgtctcactggtgaaaagaaaaacccacccctggcgcccaatacgcaaaccgcctctccccgcgcgttggccgatttcattaatgcagcgggcacgacaggtttccccgactggaaagcgggcagtgagcgcaacgcaattaatagtctttccattatctttgatgccaggcctagcatcccaggtgcggaagtttgggcctctcatgatgcagcaatgagtgcccacagcacgtggcctgagcatttctcttggcaaatgtcattgcttgctgtgtgtggtgctacgggggtggattttgccgatttcggaaccaccatcaaacaggattttcgcctgctggggcaaaccagcgtggaccgcttgctgcaactctctcagggccaggcggtgaagggcaatcagctgttgcccgtctcactggtgaaaagaaaaaccaccctggcgcccaatacgcaaaccgcctctccccgcgcgttggccgattcattaatgcagctggcacgacaggtttcccgactggaaagcgggcaggattttgccgatttcggaaccaccatcaaacaggattttcgcctgctggggcaaaccagcgtggaccgcttgctgcaactctctcagggccaggcggtgaagggcaatcagctgttgcccgtctcactggtgaaaagaaaaaccaccctggcgcccaatacgcaaaccgcctctccccgcgcgttggccgattcattaatgcagctgggcacgacaggtttcccgactggaaagcgggcagtgagcgcaacgcaattaatggattttgccgatttcggaaccaccatcaaacaggattttcgcctgctggggcaaaccagcgtggaccgcttgctgcaactctctcagggccaggcggtgaagggcaatcagctgttgcccgtctcactggtgaaaagaaaaaccaccctggcgcccaatacgcaaaccgcctctccccgcgcgttggccgattcattaatgcagctggcacgacaggtttcccgactggaaagcgggcaggattttgccgatttcggaaccaccatcaaacaggattttcgcctgctggggcaaaccagcgtggaccgcttgctgcaactctctcagggccaggcggcatcccgaattttgttcctccatccacggggattgagagccattactattgctgtatttggtaagcaaaatacgtacatcaggctcgaaccttttaagatcaacgttcttgagcagatcacgaagcatatcgaaaaactgcagtgcggaggtgtagtcaaacaactcagcaggcgtgggaacaatcagcacatcagcagcacatacgacattaatcgtgccgatacccaggttaggcgcgctgtcaataactatgacatcatagtcatgagcaacagtttcaatggccagtcggagcatcaggtgtggatcgatagaaaggcaggagagtgtcttctgcatgaatatgaagatatagtacccatccgtgatacattgaggctgttccctgggggtcgttaccttccacgagcaaaacacgtagccccttcagagccagatcctgagcaagatgaacagaaactgaggttttgtaaacgccacctttatgggcagcaaccccgatcaccggtggaaatacgtctcagggttccttagatcngaggattttgccgatttcggaaccaccatcaaacaggattttcgcctgctggggcaaaccagcgtggaccgcttgctgcaactctctcagggccaggcggtgaagggcaatcagctgttgcccgtctcactggtgaaaagaaaaaccaccctggcgcccaatacgcaaaccgcctctccccgcgcgttggccgattcattaatgcagctggcacgacaggtttcccgactggaaagcgggcaggatatggctttaaaaggggctaccgtgtattgctggtggaagggtaacgaccccccagggaacagcctcaatgtatcacggatgggtaccagatcttcatattcatgcagaaaaacactctcgctgcctttctatgttggggaaaaggacgatgtcacttatgcaataaagcccacttgctggccggggcttgacattattccttcctgtctggctctgcaccgtattgaaactgagttaatgggcaaatttgatgaaggtaaactgcccaccgatccacacctgatgctccgactggccattgaaactgttgctcatgactatgatgtcatagttattgacagcgcgcctaacctggtttttcgatatggcttcgtgatctgctcaagaacgttgatctctccagggttcgagcctgatgtacgtattttgcttaccaaatacagcaatagtaatggctctcagtccccgtggatggaggagcaaattcgggatgcctggggaagcatggttctaaaaaatgttgtacgtgaaacggatgaagttggtaaagggccaggcggtgaagggcaatcagctgttgcccgtctcactggtgaaaagaaaaaccaccctggcgcccaatacgcaaaccgcctctccccgcgcgttggccgattcattaatgcagctggcacgacaggtttcccgactggaaagcgggcagtgagcgcaacgcaattaatggattttgccgatttcggaaccaccatcaaacaggattttcgcctgctggggcaaaccagcgtggaccgcttgctgcaactctctcagggccaggcggtgaagggcaatcagctgttgcccgtctcactggtgaaaagaaaaaccaccctggcgcccaatacgcaaaccgcctctccccgcgcgttggccgattcattaatgcagctggcacgacaggtttcccgactggaaagcgggcacgccttacatatctccctcatcacaccaagtttccctactgaggggaagagccagtttgtgctgcaactaagaccttcgttacgaggagcactcttgagtttgctggatcactacgaatggaactgttttgtcttcctgtatgacacagacagggnagtaatggctcgcggtaatgccatttctttgcctgtatgtggtcgggatgtgaagttactctttgaagtgctccggggtgatagtgttgagaagacctctcgggtatggtcaggtaatgaacgtgaccaggagctgcttactgaggacgcactggatgatctcatcctttcttttctactgactggtcaacagacaccggcgttcggtngaagagtatctggtgtcatagaaattgccgatgggagtcgccgtcgtaaagctgctgcacttaccgaaagtgattatcgtgttctggttggcgagctggatgatgagcagatggctgcattatccagattgggtaacgattatcgcccaacaagtgcttatgaacgtggtcagcgttatgcaagccgattgcagaatgaatttgctggaaatatttctgcgctggctgatgcggaaaatatttcacgtaagattattacccgctgtatcaacaccgccaaattgcctaaatcagttgttgctctcccctctcaccccggtgaactatctgcccggtcaggtgatgcacttcaaaaagcctttacagataaagaggaattacttaagcagcaggcatctaaccttcatgagcagaaaaaagctgggacggtttttcgccttttgacgttggagtccacgtctttaatagtggactcttgtcccaaactgaaacaacactcaaccttatctcgggttattcttttgatttataagggattttgccgatttcggaaccaccatcaaacaggattttcgcctgctggggcaaaccagcgtggaccgcttgctgcaactctctcagggccaggcggtgaagggcaatcagctgttgcccgtctcactggtgaaaagaaaaaccaccctggcgcccaatacgcaaaccgcctctccccgcgcgttggccgattcattaatgcagctggcacgacaggtttcccgactggaaagcgggcagtgagcgcaacgcaattaattgttgagaagccttctcgggtatggtcaggtaatgaacgtgaccagaagctgtttactaaggacgcactggatgatctcatccttttttttctactgactggtcaacagacacgggcggtcggtcgaagagtatctggtgtcatagaaattgccgatgggagtcgccgtcgtaaagctgctgcacttaccganagtgattatcgtgttctggttggcgagctggatgatgagcagatggctgcattatccagattgggtaacgattatcgcccaacaagtgcttatgaacgtggtcagcgttatgcaagccgattgcagaatgaatttgctggaaatatttctgcgctggctgatgcggaaaatatttcacgtaagattattacccgctgtatcaacaccgccaaattgcctaaatcagttgttgctcttttttctcaccccggtgaactatctgcccggtcaggtgatgcacttcaaaaagcctttacagataaagaggaattacttaagcagcaggcatctaaccttcatgagcagaaaaaagctggggtgatatttgaagctgaagaagttatcactcttttaacttctgtgcttaaaacgtcatctgcatcaagaactagtttaagctcacgacatcagtttgctcctggagcgacagtattgtggagtggatcctcaccagagagccggttttcagccctaagttga

SEQ ID NO: 135893 - DNA, 2860 bp, Homo sapiens
atggcgcaacgccctatgaggaaactgaggctcagggaaagtaataacggccagggttcgcggcttgacgatccgatcgaggcgcaggcgctgatcgccacctacggccgtgatcgtgatcctggccggccgttgtggttggggtcggtcaagtcgaacatcggtcatacgcaagcggcggcgggtgtggctggtgtgatcaagatggtgatggcgatgcggcacgggcagctgccacgcacgttgcacgtggaatcgccgtcgccggaggtggattggtcggcggggacggttcaactccttacggagaacacgccctggcccaggagtggtcgtgttcgtcgggtgggggtgtcgtcgttcgggatcagtggtactaacgcgcacgtcatcctcgaacagcccccgggagtgccgagacccgctatggcaatccgggacagtttccctctttgcccgcctcctgctgaggccttcaacacctctggaggaagggctgctacagtcaagtcttcaggagaaagcaagaagggaccagtctctacggatgtgcctagtcatccctcggtatccacaggggatgggttccaggacctcatgggtaccaaatccaaggatgccaagttccttcggcatattttcgaacggttgttgggtgaatctgtggctatcagagatgccgagaaagcagggcgactaccgcacccggatagtggaatttcgagaccgggttgaccaaccgggttgtttctccatttggccaaattattctatatgcgtaatgtgtttggtccgcgattgccacgtgctaaagacgtatttccaccggtgatcggggttgctgcccataaaggtggcgtttacaaaacctcagtttctggttcatcttgctcaggatctggctctgaaggggttacgtgttttgctcgtgaaaggtaacgacccccaaggaaccagcctcaatggtatcgcgggagggggacccagctcttcataatcagtgcagaacacagctcttatgcctctcatatcttgttgaaaaggacgatgtcacttatgcaataaagcccacttgctggccggggcttgaccattattccttcctgtctggctctgcaccgtattgaaactgagttaaatgggcaaatttgatgaagggaaactgcccaccgatccacacctgatgctccgactggccattgaaactggggctcatgctcatgactatgatgtcatagttattgacagcgcgcctaacctgggtatcggcacgattaatgtcgtatcgcccccctgatgtgctgacccgttcccacgcctgttgagctatgtttgattacaccttccgcactggcagtttttcgatatgcttcgtgatctgctcaagaacgcgtgatcttaaaaggggtcaaccctcgtgtcccttttttgctttacccaatccagcaatagtaatggctctcaattcccggtggatggaggagcaaattcgggatgcctggggaagcatggttctaaaaaatgttgtacgtgaaaccggttgaagttggtaaagggtcagaatccggatgagaacctgtttttgaacaggccattgatcaacgctcttcaactgatacttcgttatcgacaccagctgccccgatggtggattcgttaattgcgcgcgtaggagtaatggctcgcggtaatgccattactttgcctgtatgtggtcgggatgtgaagtttactcttgaagtgctccggggtgatagtgttgagaagacctctcgggtatggtcaggtaatgaacgtgaccaggagctgcttactgaggacgcactggatgatctcatcccttcttttctactgactggtcaacagacaccggcgttcggtcgaagagtatctggtgtcatagaaattgccgatgggagtcgccgtcgtaaagctgctgcacttaccgaaagtgattatcgtgttctggttggcgagctggatgatgagcagatggctgcattatccagattgggtaacgattatcgcccaacaagtgcttatgaacgtggtcagcgttatgcaagccgattgcagaatgaatttgctggaaatatttctgcgctggctgatgcggaaaatatttcacaatgaatttgctggaaatatttctgcgctggctgatgcggaaaatatttcacgtaagattattacccgctgtatcaacaccgccaaattgcctaaatcagttgttgctcttttttctcaccccggtgaactatctgcccggtcaggtgatgcacttcaaaaagcctttacagataaagaggaattacttaagcagcaggcatctaaccttcatgagcagaaaaaagctggggtgatatccccacctgaagaagttatcactcttttaacttctgaaattaaaacgtcatctgcatcaagaactagtttaagctcacgacatcagtttgctcctggagcgacagtattgtataagggcgataaaatgtttatcacagttaaaattgctaaacgcagtcaggcaccgtgtatgaaatctaacaatgcgctcatcgtcatcctcggcaccgtcaccctggatgctgtaggcataggcttggttatgccggtactgccgggcctcttgcgggatatcgtccattccgacagcatcgccagtcactatggcgtgctgctagcgctatatgcgttgatgcaatttctatgcgcacccgttctcggagcactgtccgaccgctttggccgccgcccagtcctgctcgcttcgctacttggagccactatcgactacgcgatcatggcgaccacacccgtcctgtggatctacccactagtcaattcaccatcttgttga

SEQ ID NO: 135894 - DNA, 420 bp, Homo sapiens
tttcgtccgagatggaccctgggctcggcgtcctccggaaaactgcactgtgaggcggggcgatggggaagggccgaagccccgccagcccagctaaagcagacggctcgcactgcgacccgaagacggcaccgaaagcgaaggaagctcctgctcctcctaaagccgaagccaaagcgaaggccttaaaggccaagaaggcagtgttgaaaggtgtccgcagccacacgcaaaaaagaagatccgcatgtcactcaccttcaggcggcccaagacactgcgactccggaggcagcccagatatcctcggaagagcacccccaggagaaacaagcgtcgccactatgctatcatcaaagttccgctgaccactgagtcggccgtgaagaagatagagaaaacaacacgcttgtgttcact

SEQ ID NO: 135895 - DNA, 414 bp, Homo sapiens
ctgtttttaataatctgcttattacccgctctgtagtgtggaaacaaattattcatgcacaaggtcctccacgtgttccttgtctctggggagcctggaagcacacaggctggctccactcgctccactggcgtgtgtcacactccttctctgccacgtcaacctctggcatggccatctggacatgaagcctgccctcagggataaagccacagtccagctcaaaggcttcaagtaggatccaggtcgcaccgacaatgtgatccctgtgctgggcccgattcgggtcgcagtgcgagccgtatgcttaagctgggctggcggggcttcggccattccccatcgcaccgcttcacagtgcagttttccggaggacgccgagctcagggtccatatcgggctcgcatagtcgcg

SEQ ID NO: 135896 - DNA, 370 bp, Homo sapiens
cggacttctggagaccttaactgagtcaagtgtatggtcttaaagttatttaagcaatatcatcagaagcctataaccagagtacctgtcatagtcttttctgtgagtctcagagggagtcctgtcttggagacgaacattctgacctgtagttgattgcaggagctttcaggaaagcatcagggggaaataatatcttcaggcggcccaagacactgtgactccggaggcagcccagatagcctcagaagagcacccccaggagaaacaagcttggccactatgctatcatcaagtttccgctgaccactgagtcggccgtgaagaagatagaagaaaccaacacgcttgtgttcactgtgctcgtgcc

SEQ ID NO: 135897 - DNA, 1773 bp, Homo sapiens
atgagcgtgctggtcgccaccgcctatatggaagaggccgaacgcttcgactggctggtagcgatgaatgccggagaagtgctggcaactggcagcgccgaagagctacggcagcaaacgcaaagcgctacgctggaagaagcatttataaatctgttaccgcaagcgcaacgccaggcgcatcaggcggtagtgatcccaccgtatcaacctgaaaacgcagagattgccatcgaagcgcgcgatctgaccatgcgttttggttccttcgttgccgttgatcacgttaatttccgcattccacgcggggagatttttggttttcttggttcgaacggctgcggtaaatccaccaccatgaaaatgctcaccggactgctgcccgccagcgaaggtgaggcgtggctgttcgggcaaccggttgatccaaaagatatcgatacccgccgtcgggtgggctatatgtcgcaggcgttttcgctctataacgaactcaccgtgcggcaaaaccttgagttacatgcccgtttgtttcacatcccggaagcggaaattcccgcaagagtggctgaaatgagcgagcgttttaagctcaacgacgttgaagatattctgccggagtcattgccgctcggcattcgccagcggctttcgctggcggtggcggtgattcatcgcccggagatgttaatcctcgatgagcctacttctggtgtcgatccggtggcgagggatatgttctggcagttgatggtcgatctctcgcgccaggacaaagtgactatcttgatctccacccactttatgaacgaagcggaacgttgcgaccgcatctcactgatgcacgccggaaaagtgcttgccagcggtacaccgcaggaactggttgagaaacgcggagccgccagtctggaagaggcatttatcgcctatttgcaggaagcggcagggcagagcaacgaagccgaagcgccgcccgtggtacacgacaccacccacgcgccgcgtcagggatgtagcactgcgcccatacagccgccacgaaggcagccacacgcaaaaaagaagatccgcatgtcactcaccttcaggcggcccaagacactgcgactccggaggcagcccagatatcctcggaagagcacccccaggagaaacaagcttggccactatgctatcatcaagtttccgctgaccactgagtcggccgtgaagaagatagaagaaaacaacacgcttgtgttcactgtggatgttaaagccaacaagcaccagatcagacaggctgtgaagaagctctatgacagtgatgtggccaagcatacagaagaacgaagacacgacgaacagaacaacatactaacacgagaagccaagaacagaaacgacaacacacgaaacagagcacgcacagaaacaaacacagagacgcagaagaattcagggtaccaagccctgataagttttcacagttactattcagacactagtgataataaagcccacctagtgagctatcaatcaggtcaatgcacctacgaccgcttagggtggaatttgctcattcgcatgacatgccgatcgctccaacatacatacgacatacagagtactcagattgcgtcgtgcttccaccccgtttcggtgcgagtaaatctccgcctctattgcgccaattacggtggtattagtgccgtgtttatgccgttacggaaggaattgttgattttaacaagaagtagcaatagcaaggtttctcaactgcgcatctga

SEQ ID NO: 135898 - DNA, 605 bp, Homo sapiens
agtgcggtggaattccctggctgtgggtgtggtaccgaggcttcagcgggtgccgcccgcctagagggagtggagcggtgagcacgtcaggggtggggggcgcaggtcaagctttcaccagtttttaattctttgatggggtaaatttgagcaattttctcgacttgtcgacattcgttattaactgagcaggaatcaggagaggaacccggtcctctccacacagcccagcagagagcctacgactagatttgcatctttacgtcctgcgcggaggctgctacacacatgcagaagtcatgctggtggcctggacagtgaagggagagaagtggatttgggagacatttaggagatggcaccaaaagcgaaggaagctcctgctcatcctaaagccgaagccaaagcgaaggctttaaaggccaagaaggcagtgttgaaaggtgtccgcagccacacgcaaaaaagaagatccgcatgtcactcaccttcaggcggcccaagacactgcgactccggaggcagcccagatatcctcggaagagcacccccaggagaaacaagcttggccactatgctatcatcaagtttccgctgaccactga

SEQ ID NO: 135899 - DNA, 1727 bp, Homo sapiens
ctgagcattccgtgtgtccagaggtagggttagcagggatagatggacttcctgcttattttctgttcacatttccactgaccttcaatcctgtagactgcaaagattgagccagctgagcccccaaagagactcagcagtgcagaatgtgggcctgagtgggaggactgcccagccgcacaccttccagctctgttcttcccgggccctggatgcttcttgccacgctgtcctctgaaatgacgctctgccccagcagacctgtgcgggcccagcacagggatcacattgtcggggtgacctggatcctacttgaagcctttgagctggactgtggctttatccctgaggccaggcttcatgtccagatggccatgccagaggttgacgtggcagagaaggagtgtgacacaggccagtggagcgagtggagccagcctgtgtgcttccaggctccccagagacaagacggcaccgaaagcgaaggaagctcctgctcctcctaaagccgaagccaaagcgaaggctttaaagcccaagaaagcagttgttgaaaggtgtccgcacacacacgcaaaaaagaggatccgcatgtcacccaccttcaggcggcccaagactctgcgactccggaggcagcccagatatcctcggaagagcacccccaggagaaacaagcttggccactatgctatcatcaaagtttccgctgaccactgagatcggccgggaaaaagaataaaaaaaacaacacgcctttggttcactgtgggtgttaaaggccaacaaggcaccagattcagacaggctgtgaagaaggctctatgacagtgatgtgggccaaggtcaccaccctgatttgtcctgataaagagaagaaggcatatgttcgacttgctcctgattatgatgctttggatgttgccaacaaaattgggatcatctaaactgagtccagctggctaactctaaatatatgtgtatcttttcagcataaaaaaataatgtttttcataagaatgacaacttaattagaatcaaatctataagctttaagattttacgtttctagtaagtataatattagcttatttgactagaactcaagcagaataggaatttatgcttgttttatattcaataatgataattttgaagatatagttgttttattacaccaaaaatactatattaatcttatttaactaagttttatccaaatcatgttaacttaagaaacatttgatcagttcctatatttctaggagtttggtgaatatttatttataaatgcttatttttttccaagccaagtttggaataggaggcacttttaggagggtttccataaatggaattttgtaatgctctctggagttaagaaaatatcacatatacataacgtacattaatagatacacaaacacaaatagagatttcatagctttcatcctgaaatttcagccatgaatcaggcataaatattctgatggttaatttcagacatctacttgatcggattgagagacacacatagctggtcaaacacgatttcagccatgaatcaggcataaatattctgatggttaattttagacatctacttgagtggattaagagacacacgtagctggtcaaacatgatttcagccatgaatcagccataaatattctgatggttaattttagacatctacttgagtggattaagagacacaccctgtatt

SEQ ID NO: 135900 - DNA, 333 bp, Homo sapiens
tttttttttattttttgagggctgagtggcagcgctgttatttgtgggggccttcaaggtagggtcgtggggggcagcggggaggaagagccgagaaactgtgtgaccggggcctcaggtggtgggcattgggggctcctcttgcagatgcccattggcatcaccggtgcagccattggtggcagcgggtaccggtcctttcttgttcaacatagggtaggtggcagccacgggtccaactcgcttggcgctccattttgtgttccaggagcatgtggttctgtggcgggagcccacgcaggccctgaggatgttctcgatgcagctgcgctg

SEQ ID NO: 135901 - DNA, 1650 bp, Homo sapiens; identical to SEQ ID NO: 127453

SEQ ID NO: 135902 - DNA, 751 bp, Homo sapiens
cgcgaatttcaccacctttgctcagccactgttccagcgcgctacgctcaaaggagatatgaaccacttccatatcatgcagttttaacggtttttgcagcagtagagtcagagtggaagcagtaacgttaacaggaagttgatactgctgacgacggctgaaaatgccgcccagacgaattaccgttaaggctgttttatcgctttgttgctgctggagttgcaggtgacgttgcacaatcgcgccaaggcgagtcaacatcccttgctgttgccaggcgtgaccggtcatcaatacatcaatttgttgttgtatcaaattcaggctttgcgcgtcataccacaggcaatctttcagcaaaatgagatctaccggggcaacagcactgcgaccgctaaaaaaggcgctggcctgcaataatcggatcgcttttttccagcgacgatccgagacataaggcgcatccggtaatttatccagttgctggcgcagcataaaaatcagctcaaatacatgatcgggcagcgtaatttcacctatcgccgctacctgataccgaatatttgctgtgctatgatccgtccagtaataatgagctggcccaggtgatctatcaggcgatggagagctaccataatccgtggcaatacagcccaatgtctttattgccgtcagctctataacatgcaactggctgccttttgggaaatgtggctcaacatattggatgtgccaatccatgtagcctgc

SEQ ID NO: 135903 - DNA, 639 bp, Homo sapiens
tttttttcactgccacatagattttaatttgcctaaagatgatagcgattttgagctgtggttagggataactgttcccacagtagacctattaccaacatgagttgctggctttcatttaataggactccaagctggcaaacaaaccccaccatcttcccaacagccacatcatgagatctagcagcaccagcctcttgaagtggcttctcagtggaaggtttgctccgtttcagtgaagcttctctctcaaagctctgacgtcaccagggtgcccctcgagggtctggatagactgtccgaaaggtcaggttcactctcggttctctagagtggtattctttgggcactcgatgctgccagtcagcttgtgtcgctccttccatgattaacaaggtaccatgatccaagggtatcttcactctttccacatatgtgtagtctccattctcttcctagaaaacagcatttgttgtaataaatgttttgcctgtgtaatcaagatgcaacagaacctgacagaggtcaaaaaaaaatggaaacctctgctcagccagactgtgggaatccatatatagctctgtcatttggcagctgcttgactgttggcaagttacctcatctctctgtaccctgact

SEQ ID NO: 135904 - DNA, 1086 bp, Homo sapiens
atgcgtgtcgtcctcttgcttactctgaagacgctgcaattgaagtacccgaaggcagcttcgaagggcggttgtgctgcacttacattgctggtcggagtgagtaccggtcctggaagctttggactcatcctgcgtcgggcgaattcagagctgctgtctttgcggcttagagtagagatatttgcctgcgcatcgcatgctaacggggtgtatgtcttgccggaagatgatcgcatcaaagcgattaatgaaatccgcatggcgatccatcaggttagcccctttcgtgaagagccagtggattgcgttctgtgggttaaaaacagccaacttatgcctaatgattacaacccaaacaacgtggcaccacccgaaaaaaaactgctgcaaaaatccattgaaatagatggttttacccaacccattgtggtcacacatacggataaaaatgccatggaaatcgtggatggttttcaccgccatgaaattggtaaaggctcatcatcattaaaattacgcttaaaaggttatttgccggtgacctgtctggaaggtacgcgtaatcaacgcatcgccgcgactattcgtcataatcgcgctcgtggacgccatcaaatcaccgccatgtcggaaatcgtccgtgaacttagccagttgggatgggacgataataaaattggcaaagagctgggaatggacagcgacgaagtgctgcgcctgaagcaaattaacggcctgcaagcagtcgtatgccgaccgtcaatattcccgcgcctggacgctaaagctggcgcaggcgttcagctgctgccagcaacgtcgattccttcttggcaaaacagagacgaatcagtttatgtgggaaaggatcggccaacaccgacagcggaatcgccgtacgccgtgctcctgcgtcagccactggcaaaactcaacatcatccaggaccagtgatgaacatggttgagaatatgctcgatcaggcattcaaaaagcttaatcctcacgagcatcctgttctgcactctgaccagggatggcagtatcgtatgagaagatatcaaaatatccttaaagaacatg

SEQ ID NO: 135905 - DNA, 766 bp, Homo sapiens
agcggccgcaaggaggccaactactaacggttcgctgactcaggcgggcaccgtgagcctgggcctggacgccgagggccaggaggtgttcgtacccttcagcgcggtgctgcccatggtggcgcccaacgacctcgtgttcgatggctgggacatctcgtcgctgaacctggccgaggcgatgcggcgcgcgaaggtgctggactgggggctgcaggagcaactgtggccgcacatggaggccctgcggcccccggccttgctgtttacatccccgaattcatcgcggccaaccagagcgcgcgcgcggagcaaccctcatcccaggctcgcgtgcgcagcagctggagcagatccgcagggacatccgagacttccggtctagcgcggggctggacaaagtcatagtgctgtggacggcgaacacggagcgcttctgtgaggtgattccaggcctcaacgacacagccgagaacctgctgcgcaccattgagctcggtctggaggtgtcgcccgtccacgctctttcgccgtggccagcatcctgggagggctgtgcctttccttcaatgggtctccgcagaacaccctggtgcccggagctcttgagctcgcgtggcagcaccggattcttgtgggcggagatgacttcaagtcaggccagaccaaagtcaagtccgtgcttgtggacttcctcattggctccggcctcaagaccatgtccatcgtgagttacaaccacctgggcaacaacgatggggagaac

SEQ ID NO: 135906 - DNA, 2259 bp, Homo sapiens
atggaaatcgtggatggttttcaccgccatgaaattggtaaaggctcatcatcgattaaaattacgcttaaaaggttatttgccggtgacctgtctggaaggtacgcgtaatcaacgcatcgccgcgactattcgtcataatcgcgctcgtggacgccatcaaatcaccgccatgtcggaaatcgtccgtgaacttagccagttgggatgggacgataataaaattggcaaagagctgggaatggacagcgacgaagtgctgcgcctgaagcaaattaacggcctgcaagagttgtttgccgaccgtcaatattcccgcgcctggacgctaaagctggcgcaggcgttcagctgctgccagcaacgtcgattccttcttggcaaaacagagacgaatcagtttatgtgggaagggatcggcgcaaaacaccgacagcggaatcgccgctacgccgtgctcctgcgtcagccactggcaaaactcaacatcatccaggctcggtaccccaatcaacatcgtcagcacgccggagagtgcaatccccactgccaggctggtggcgatatcgttgatcggtgtcccgcgcgatgcttcaccaagggtgatagtaaggatggttccccaccacaagccacctggcccttccataatagcgcgacgatgaccgcaaaacgcctgagcgaagcaagccagtgcggtagcaagaaaagcatattgcgtgagcgaattatctatcgtccgtcgattactcgatatccctttcaatcaacaatgaatcatccccttccggagcagacattgggctgtattgccacggattatggtagctctccatcgcctgatagatcacctgggccagctcattattactggacggatcatagcacagcaaatattcggtatcaggtagcggcggaagagaatggagagtacacatatgtggaaagagtgaagatacccttggatcatgggaccttgttaatcatggaaagagcgacacaagctgactggcagctggagcagatccgcagggacatccgagacttccggtctagcgcggggctggacaaagtcatagtgctgtggacggcgaacacggagcgcttctgtgaggtgattccaggcctcaacgacacagccgagaacctgctgcgcaccattgagctcggtctgggaggtgtcgccctccacgctcttcgccgtggccagcatcctggagggctgtgccttcctcaatgggtctccgcagaacaccctggtgcccggagctcttgagctcgcgtggcagcaccgggtttttgtgggcggagatgacttcaagtcaggccagaccaaagtcaagtccgtgcttgtggacttcctcattgggttccggcttcaaagaccatgtccatcgtgagttacaaccacctgggcatacaacgatggggagaacctatcggcgccattgcagttccgctctaaggaggtggtccaggagcaacgtggtggacgacatggttgcagagcaaccccagtgctctatacgcccggcgaagagcctgaccactgcgtggtcatcaagtatgtgccgtacgtgggtgacagctagcgcgcgctgggatgagtatacctcggagctgatgctgggcggaaccaacacactggtgcttgcacaacacgtgtgacggactcgctgctgggccgcacccatcatgctgggacctaggcgctgcttgaccgagctgttgccagcgcgtgactttcttggcacttgacattgggaccccgagccgcagacctttccaccccgtgcttgtccctgctcaagctttcttcttcaaaggcgccaccttaagtccgcccggcaagcccggttggtcaatgcggctttttccgccagcgcagctgcaatcgagaacattcctcagggcctgcgtggggctcccgccacagaaccacatgctcctggaacacaaaatggagcgcccagggcccagcctcaagcgagtttggaccccgtggctgccaccctaccctatgttgaacaagaaagggcccggttcccgctgccaaccaatggctgcaccggttgatgccaatgggcatctgcaagaggagcccccaatgcccaccacctgacggccccggtcacacagtttcttcggctctttcttcccgcttgccccccacggaccctacctttgaaggcccccacaaataaagggcgctgccacttcagccctccttccacctggggttcttggggcctgtgacct

SEQ ID NO: 135907 - DNA, 1908 bp, Homo sapiens
atggactacatggtaccagtgggaatggactggctgtgcagagagactgcaggcatgcgagtgtccatcaagaaagggtctgttgtttttcctcttaaccctgaattggtcatgaaagtagttaggcaaagatccacaattgtaaccccttctggcttcaaagccggagcttttaactttgaacgcttcaaggaagcatcaaatcagacactggggagcacatttctatattctctaagctgtcctaagcctaatcttggatcccagcctctggactttgataccaaaaaatcctatacgctaaaggtagaggcagccaatgtccatattgacccacgcttcagtggcagggggccctttaaagacacggcgacagtcaaaatcgtggttgaagatgctgatgagcctccggtcttctcttcaccgacttacctacttgaagttcatgaaaatgctgctctaaactccgtgattgggcaagtgactgctcgtgaccctgatatcacttccagtcctataagactctacagaatccccggggacgatgccaaatgcgttcaattcaaccgtgaaggcgtgaaagcactgaaagccaaaccggttgaaaaagccgcgccagcacccgctgccgcagcaccaaaagcggctccaactccggcaaaaccaatgggggaacagctagcactctacaggatggccgggtccaatgccgatcgaattcaaggtcgtatggacccaacccgtgggcagtcagccgctgaatggctacaaaccgcagaagaagccgatatcgcctgggtattgaaaacctatggtgaagagcgttttgccaaacgcattgcccgcgccattgtcgagcgtaaccgcgaacagccgatgacccgcaccaaagaactggcggaagtcgtggctgctgcaacgccggtgaaagataagtttaaacatcccgcgacccgtaccttccaggcggtgcgcatttgggtaaacagtgaactggagaagatagagcaggcgctaaaaagctcgctcaacgtgctggccccgggtgggcggctttcgatcatcagcttccactcgctggaagaccgtattgtgaaacgttttatgcgtgaaaacagccgcggtccgcaagttccggcagggttaccgatgactgaagagcagctcaaaaaactgggtggccgtcagctgcgagcactaggcaagttaatgccgggcgaagaagaggtggctgagaaccttcgtgcccgtagttcagttctgcgtattgcacagcctgttggcagctttgcctgcagcttatgtcaaccgccatcccgggcagtaaaaagacgtaaactttcccagaatcctgccgatattatcccacaactgctggatgaacagagatggaaggatgatgtcgtgcttatcttattaggttacctggttgttctcggtacagttttcggcggttatttgatgaccggtggaagccttggagcactctatcaacccgctgaactggtgattattgccggtgcagggattgggtcgtttatcgtcggcaataatggcaaagcgattaaaggcacgctgaaggcgctgccgttgctgtttcgtcgctccaaatacaccaaagcaatgtatatggatctgctggctctgctttatcggttgatggcgaaatcgcggcagatggggatgttttcgctggaacgtgatattgaaaatccccgtgagagcgagatcttcgccagctacccacgcatcctcgcggatagcgtcatgcttgattttatcgtcgattatctgcgcctgattatcagcggtcacatgaacaccttcgaaatcgaagctctgatggatgaagagattgagacgcccgaaagcgaggagaaatcccccggaacagtctggcctggtcgg

SEQ ID NO: 135908 - DNA, 1833 bp, Homo sapiens
atggggtttcgccatgttggccaggctggtctcaaactcctgacctcagtctattattgtgcaaaaatccaacaatccaacaacaatgtcaaggtcagagtgtcgtcatggtgtatcttgagtagggaggaggtgaaagctgctggagttgaggtccaagagagaggctggcatgttggagagatcatcatccaggatggtgacttgctctcagtgggctgctacaagaaacccggtagtggcgttgccaatttacggtttcatcgaacgttgcctggtaccgtttggctgaaccacatctggaacgtacctttccagatgcagattggtgaatacaccaacgcagcaggtcaggttttccacggcgacattccgcgttatatggcgggtgaccggactgcgggtaaactgtctggtggcttcctgttcaaaatgtacggtctgccacgtgccgcaattgctatctggcactctgctaaaccagaaaaccgcgcgaaagtgggcggtattatgatctttgcggcgctgacctcgttcctgaccggtatcaccgagccgatcgagttctccttcatgttcgttgcgccgatcctgtacatcatccacgcgattctggcaggcctggcattcccaatctgtattcttctggggatgcgtgacggtacgtcgttctcgcacggtctgatcgacttcatcgttctgtctggtaacagcagcaaactgtggctgttcccgatcgtcggtatcggttatgcgattgtttactacaccatcttccgcgtgctgattaaagcactggatctgaaaacgccgggtcgtgaagacgcgactgaagatgcaaaagcgacaggtaccagcgaaatggcaccggctctggttgctgcatttggtggtaaagaaaacattactaacctcgacgcatgtattacccgtctgcgcgtcagcgttgctgatgtgtctaaagtggatcaggccggcctgaaaaaactgggcgcagcgggcgtagtggttgctggttctggtgttcaagcgattttcggtactaaatccgataacctgaaaaccgagatggatgagtacatccataaaaaaccttctcgtccggacgcttcgcaaccggacacgcagacggatgaacaggattttttaactcgccatcctgatgcggttgtattcagccctaaaaagcgccagtggggaacgcaggatgatttgacctgcgcacagtggctctggaaaaaaatcatcgccctgtacgagcaggccgccgaatgtgacggcgaggtggttcgtcccaaagaaccgaactggacagcctgggcaaacgaaattcgcgtgatgtgtgtgcaggatggtcgtactcacaaacaaatgtgcgagatgtacagccgcgtcagccgcgatccgttttggtgccgtaacgtgctcagcccgtcgaaggtgcgggaaaaatgggatgagctttccctgcggttatcgccgtccgtcagcacgtacacagaaaaacgcgaagacccgtacttcaaagccagttacgacaatgtggaatacagccagatcccggcaggattcaggggacctgtgcgcaatttctatgtcggcactaacgacccgcgggtgattttgtgcctgcaccgccaggcggaagaactggagtccaggggcttataccgtcgtgctgcaacggtgtggatggcggcattccgtgaaagccactcccagccagaacgaaacaattttctggcgcgtcgtgaacggtgtttacggaaaagcagtaagcgggctgcatcaggtgaagagtggtatctctcagggaattacgtgggggcttaa

SEQ ID NO: 135909 - DNA, 1560 bp, Homo sapiens
atgttccagctaatgaaggcttcgtccggcggggaggcagcttgtatgcctgcaggtctgatggaaaactataaacatactacggtgctgctggatgaagccgttaatggcctcaatatccgtcctgatggcatctacattgatgggacttttggtcgcggtgcttggcgaagaggggcgtttgctggcgatcgatcgcgacccgcaggctatcgccgttggaagactattgatgatccgcgcttctccatcatccacggacctttctccgcgctgggcgaatacgttgccgagcgcgatcttatcggcaagatcgacggcattctcctcgatcttggcgtctcttcaccgcaacttgatgatgctgaacgtggcttttcctttatgcgcgatggtccgctggacatgcgtatggacccaacccgtgggcagtcagccgctgaatggctacaaaccgcagaagaagccgatatcgcctgggtattgaaaacctatggtgaagagcgttttgccaaacgcattgcccgcgccattgtcgagcgtaaccgcgaacagccgaatgaccctgaactggaggagatagagcaggcgctaaaaagctcgctcaacgtgctggccccgggtggtggcgtttcgatcatcagcttccactcgctggaagaccgtattgtgaaggttttatgcgtgaacaccagttttgtgttgtcgtgcgttctggagtcggtctcaaaacatgatccgtcagataaaaaaccttctcgtccggacgcttcgcaaccggacacgcagacggatgaacaggattttttaactcgccatcctgatgcggttgtattcagccctaaaaagcgccagtggggaacgcaggatgatttgacctgcgcacagtggctctggaaaaaaatcatcgccctgtacgagcaggccgccgaatgtgacggcgaggtggttcgtcccaaagaaccgaactggacagcctgggcaaacgaaattcgcctgatgtgtgtgcaggatggtcgtactcacaaacaaatctgcgagatgtacagccgcgtcagcgcgatccgttctggtgccgtaaccccgtcgaagctgcgggaaaaatgggatgagctttccctgcgcttatcgccgtccgtcagcacgtacacagaaaaacgcgaagacccgtacttcaaagccagttacgacaatgtggactacagccagatcccggcagattcagggggttactcacggcagcgcgttctgcagtcagcaagcaagttacgtcagagtgggcgtgtggctcaccgttgtgaaggagatacacacagacatttcccgcgcctgactgagagagcgcaggatccggaaccacaaccagttcgtgaaaccagacctgtgcgcaatttctatgtcggcactaacgacccgcgggtgattttgtgccgctttcatgcctgcaggtccttgctcgtcgcccgctattcccatccgccgctagaccccactattccccactgtttccctactgaagccctgctgtacccccatcaaaacctgctgtaccccatctga

SEQ ID NO: 135910 - DNA, 1881 bp, Homo sapiens
tcagaatttgtggcgggccgccgtggcttgtgagttgggcccttgggtgaaaaaggggaagccggggaagagaagggacacgggatgaatcgcgttacgaatcacctgccggaatgcctgcgcgagcgaatgactcaggcggcgattgcggtggtagaagatccgtttgagatccgtcttgagcgcctgaacgaagagtatttcttgcgtatgcatcatgattttacccacgcgtacggcgacgaacagggctggcaggagtattgcgaatacctgcatcacggactttcggcgattaagcgtcgggcttgggggccttgatcccaaaatggggccccgggggccgttaaaagtgagagaagccggggaatacgcttccacctgcacataatagatttttccggtgcgtttacccggctgggttaaacgcgcctgcaacgcgccgttattggtcagcaccagcaacccttcgctatcgcggtcaaggcgacctgctgcataaacaccctgaaccgggatgaattcttttaatgttttgcgtccggcttcatcggtgaactgcggaagaacatcgtagggtttattgaacaggatcacacgcgtgggctggttttcaggttgacgcctggtagaacgttgcgagctgaatcgcttaacctggtgatttgcctgccgatgaacttccagccgtatgacagcgatgcagactgggtgattactggcgtgccgttcgatatggccacttctggtcgtgcgggtggtcgccacggtccggcagcgatccgtcaggtttcgacgaatctggcctgggaacacaaccgcttcccgtggaatttcgacatgcgtgagcgtctgaacgtcgtggactgcggcgatctggtatatgcctttggcgatgcccgtgagatgagcgaaaagctgcaggcgcacgccgagaagctgctggctgccggtaagcgtatgctctctttcggtggtgaccactttgttacgctgccgctgctgcgtgctcatgcgaagcatttcggcaaaatggcgctggtacactttgacgcccacaccgatacctatgcgaacggttgtgaatttgaccacggcactatgttctataccgcgccgaaagaaggtctgatcgacccgaatcattccgtgcagattggtattcgtaccgagtttgataaagacaacggctttaccgtgctggacgcctgccaggtgaacgatcgcagcgtggatgacgttatcgcccaagtgaaacagattgtgggtgatatgccggttacctgactttatataactgcggaggaccgagctgacagtttcattcgcttcgacccgctcaatcacctttggatcgatgccgtgcccggtatctcgcaccgcaatgcgtacccgatttccgcactctgcaacgctgatggtgacaacgcctttacctttgcaaggctgaataccgtggacaatggcgttctccaccaacggctggatcagcaggctgggaatgcagcaattcacctcttcatcaatatcatagataaccgtcagcttgtcaccaaagcgggcctgctcaatggcaatatagtcgtttaaattttgatacagctcttttttgatatcgatttgctcatcgtcttttaattcaatgttatagcgcagataacgcgacagattaaagatcaactggcgagcggtatccggattcagacggattgacgatgaaatagcgttcagagcgttaaacagaaaatggggattaattttgctttgcagccgcccgaagctctgccttatttccatttcacgtagctgctcggcgcgtgaaacctccagttgcgtggagatgatttgcgacaggggatcctctagatcgacctcaggcat

SEQ ID NO: 135911 - DNA, 1842 bp, Homo sapiens
atgcagactttctttttctatccctttgaaagcctgctcagggtggacaagactggtgggacaatggcctggcacccgaacaggagggagtgcaaggcatgggaccaggtccctttccctggggaggaggctctgactgagcttgtacaactgacatccctcagccagtgcgacttcatccattcacagagcacgatgagcctgcacagcccaggcactgaccaggcacggagagaaggatgtgaactagacattgccgaccatcatcagtaccataccccggcatccacacaaaaggtgaacgcacactttcaaaagaggaggcatcacagcgagcctggcaaaaccaaaaatgtgtcaatcaactatgagggcctgaagaccaccaaagataactgctactgggaaggtctcccatggtttgccatcaacttcaaccccaccaaccccttctgctcagctttgagggattcatccttcattcttgggcaaggagaggaggcaatgcacccctctagtgtgaaggtgatcttgggcacactgaaggccaaggtcaatcggcatcatgtcccaggaaagggagacagaatttcggacccagggttgctggtaaacttcttggatcctcttcctgcctactttttcccccatgagcggctgacgggcccatttggtgctaggtgtgccctgaccctggcccgagtcccgccccacttccggcgacgtaatccatccgaggagctcttcctccccgggagcccgatggaaatccggatacctaaaacgagccggagagacttgattgggccattcacgcctcaggatgaggctagcgtggcacagtggcttacacgattgtccctacgctttgagaaccacgatccctgcaagtccaaacacctcaagttagaacccttccattatactttcctcagcatggaatggaagcagacaggcaaaactgttctgctgaaggtatacagctggaagaagctgactggatttgaggtaactgcctgtggggagttacacttggaaatgacagatctgagatggaagagacctccgggcactgacgatccatccccttccttcggacagggaaatattatgcccagtttacagatagggcaactaaggcagcaggaggaaacaagcaaagcagcggacaagcggcaagaatttcaatgcagcaaaagagaccttggccaaagcttgctggcggagctgccccaacaagttgtgcagtatttcaagcataaaaactgccccccaccaactcggagcccgcctgagctccagtgcccagcagcacatgctcaggcccagtttatgaaaccagacagaggacccctctctgaaagttcagccccgatccaggtccctcctttattccacataacacctctttctcctttatccacctgctcccgcttggacctccagatcacttcctcaggtgtggtggccgtggtccccacatcaggcttcatgtgggggcagatccagccatctctgctgtctgccccttcttgcctaacggtgggacctctttgggaagtcagacccctttctggagttttaaagccaggagacgatggcaagtggatgctggtccacaggactgaggtggtgatcaagtacacactggacctgtgtggaagccattcacagtgcccttggtgtccctgtgtgatggggactggagaagcccatccagctggagttcagtgcatcaaccccaagaagcagaggaagaagaagaactataaaaactcggcatcatcatcctgcgatcctgcaagccctggccaggcttctccagagtacgtgctgcggtga

SEQ ID NO: 135912 - DNA, 672 bp, Homo sapiens
atgcgttggttggtgtcaccgattgaggacacaggacacaaagcacttctgtttgcttgtcttgcattgcaccgggcctgcgtgagtggtcattgtctgagccctaagtgcgtgggcgttgacggtcggtcccacgaaatggttgcccctggactgtttctcgactggctacttgacgggacgggggtctgggacgggaccagcactaatgtggaaggggcccaggaacatgcagtactcatcctcctcatcatcacggacggggtcatcagtgacatggaggagaccggcatgccgtggtgcaggcttccaagctgcccatgtccatcatcatcggggcgtgggcaatgcggacttcgctgccatggagttcctggatggggacgccgcatgctgcgctcccacacgggggaggaggcagcccgcgatattgtcagttcgttccctttcgagagttccgcaacaatgtcagaggaggtttatgaccctcgatctctatatgaaaggctacaggaacaaaggacaggaagcagcaggactgcccgacaagaagctgtggtgggctccaaggtcacagtgagccaacctggacacagacaggagacgacagttttggaacatctagtccagtatgtgggattcagtatctgctgcaaggagcttatggtgtag

SEQ ID NO: 135913 - DNA, 2514 bp, Homo sapiens
ctgttgtcgatccacggaatcaggctaccgccagcggcacgccaaagttatccaccggcagctcaccgctacgggtaaggttgtgactttgcgttcgatatcgagaatagcagaggacggggtcggagttcatctgccacatggccatacagatggcccatctgggttaataaccacgcatatgtcgcgcaccaccgccggaagcggcctgggtcgccggagtgaatttcacgttcagcaacgtaccgttaacagcagcgtgttatcgagcttactgactgacttcagtaccgctgttggccttgtgcgtcctggcccagcatgggtgacaagccgccgtctgccagctttctccggcaaaacgaccgtctggcgtcgcgccaaccaccgatcccaacggaccgcacacgctaggcgtataagcggcgatagtgcttgccaaggtcgatataatgttggtgtgtacttccagagggccatcgggttctttccggcagattcgcactgcgcgacatggggcgacgcgcggcaaggcactatccggcaagggttcgcttcatcagccataatccggcgaatgatccacgccgcccccgacgacttaaaggccgttcaagcagcggatcgtcaggctgtaagcgcaatttgccgccttgccgtggcgagcaaacgcggtatacgctgccgccatatcttccattttgcaccagcgccgccgagaatgagtgaaagattcggcgcagcaccgtgggcaaatataacggcaatccaacattgcgtaactttgccgcaaaccgttcggtccataggcttccagcacctgcacagcagttttgcgccagttcttccagacgtcgttgaagaccgcatccaacgtagtagtgattttgtcgcttttgcttttaccgagcatcatcgcgaaaacagcggtgccagttgcggcatttgtcggggggccagccagagggttcttcccttgactcttttacctgctcacgggaccacacaccttgccggccatccgttcgagcactttattacgcgcggcttcggcacgctccggcaacgatccgggcgaagacggctgggcgcttgcggcaaaaccgccagcatgccgcctcggaatagcttaaattcgcaggcgattttccgagataagccaattgccgaacgatccctgcaagtaccgcaaagggacgcgtcgtcatcccagcttcatcatcctcttcagcaatctcttcaagctgctggcgatgataatctcccacatgaattcgactttctctggctgtttcgcttcttcagcctgcagaccgggttttcaatgataaagatccggctggtaattgttgtccagctcgctgataataatacgcgcgttttcaacggatcggtgccgtcaatcggatcgatatcgatgaggtgcaacaggacgggcaacgttccaggtgcttcaggaagcgaatgcccagacctgcgccttcgcagcgccttcaatcagtcctggaatatcggcaacaacgaagctcttttgttgtccattcgtaccacacccagacttggcaccagagtggagcccaaggccaatgccggggctcgagccccaggcaaggccgtgacccaaatggaggcttttaaacccgagccagagagtttcacgaacgccaggtacagtgcgatgagaataatcggcaccagggtaatgccgccgccatcggcatattgccaatcgccccctgctgggaataaacatattgccgataaaatatcctggaggaccaaccagctgcgggacgataaatcgcccagtgtgagtgagaagtgtcagcagcgagccgaaatagacaatgccaaacacattagcgggccaagcagcagtaaaaacagccccagccccggattatccagaagaaaccggacaccttacccagacctggacgtgaaggtgattgcatacattcatcgccattcacctctcctcaaccagcggcaccatcacatccgcgaccaggaaaccatcacctgttgtccgggccggaatttctctgatctcgctctggctacctacgccgacgagcattacggggtgatctggccgcgggacaagaagaaccgcttatcgccaactcatgggttgcggtgtataccgtacaaggatggggaaaattcttttaaagaatggcgaacaaataacactgcatggcaacttattatattcttaaagccaatggatattcactcttatcactgtgaaggcagcaaaagagaccttggccaaagctgtgctggcggagctgccccaacaagttgtgcagtatttcaagcataaaaacctgccccccaccaactcggagcccgactgagctccagtgcccagcagcacatgctcaggcccagtttatgaaaccagacagaggacccctctctgaaagttcagccccgatccaggtccctcctttattccacataacacctctttctcctttatccacctgctcccgcttggacctccag

SEQ ID NO: 135914 - DNA, 693 bp, Homo sapiens
ggggagacgatggcaagtggatgctggtccacaggactgaggtgatcaagtacacactggaccctgtgtggaagccattcacagtgcccttggtgtccctgtgtgatggggacatggagaagcccatccaggtcatgtgctacgactatgacaatgacgggggccatgacttcatcggcgagttccagacctcaatgtcacagatgtgtgaggctcgagacagcgtcccgctggaagttcgagtgcatcaaccccaagaagcagaggaagaagaagaactataaaaactcgggcatcatcatcctgcgatcctgcaagataaaccgagactactccttccttgactacatcctggggaggctgccagcttcatgtttcaccgttgggaatagacttttacagcctccaacggggaatcccctcgacccttcctctttgcactatatcaaccctatgggcaccaacgaatatctgtcggccatctgggctgttgggcagatcattcaggactacgacagtgataagatgtttccagctctgggattcggggcccagttacccccagactggaaggtctcccatgagtttgccatcaacttcaaccccaccaaccccttctgctcaggtgtggatggtattgcccaggcggtactcaacttgcctgccccacatccgcttctacggtcctaccac

SEQ ID NO: 135915 - DNA, 2895 bp, Homo sapiens
  misc_feature (1)...(2895): n = a,t,c or g
atgtacagccaggaaggaaatcagttctgtaataggacagactgccaggaactcctgccaccgccaccggctcccatggcccacatacccagtgggggtgccccagcagcgggggcagcccccatgggcccccagtattgcgtgtgcaaggtggagctgtcagtgagtggccagaacctactggaccgggatgttacctccaagtccgaccccttctgtgtcctctttacagagaacaatggcagatggatcgagtacgacaggacagaaaccgcgatcaacaacctcaaccccgccttctccaagaagttcgtgcttgactaccacttcgaggaggtacagaagctcaagttcgcgctctttgaccaggacaagtccagtatgcggctggacgagcatgacttcctgggccagttctcctgcagcctgggcacgatcgtctccagcaagaagatcactaggcctctgctgctgctgaatgacaagcctgcggggaagggcttgattacgatcgctgcccaggagctgtccgacaaccgcgtcatcacactaagcctggcgtgcaggaggctggacaagaaggacctctttgggaagtcagacccctttctggagttttataagccaggagacgatggcaagtggatgctggtccacaggactgaggtggtgatcaagtacacactggaccctgtgtggaagccattcacagtgcccttggtgtccctgtgtgatggggacatggagaagcccatccaggtcatgtgctacgactatgacaatgacgggggccatgacttcatcggcgagttccagacctcagtgttcacagatgtgtgaggctcgagacagcgtcccgctggagttcgagtgcatcaaccccaagaagcagaggaagaagaagaactataaaaactcgggcatcatcatcctgcgatcctgcaaggtgaaccagcgtgggcaagcacgagccaggggccaggtttcaggccacacagaagggacagacagagcactggatctggagccagcgaggcctgtgttcaaatcccggctctgccacatcctggccctatggccttctgagcttcacctcaccaggcctcagtctcctcatctgtggaatggagatattaacgaggcagagcatgtccagggttactcttctctcacattcctgtgtggaggccagggaaggcacgagctgaccttccagggcctgtcctggtgggagaattgtcattgcgagttgctgccgcccacggtgggcatgcaaggggcagaggacattgggtggggacaccctgtcctctctggcatcagcgtcactgtgactcccatgataaaccgagactactccttccttgactacatcctgggaggctgccagctcatgttcaccgttggaatagactttacagcctccaacgggaatcccctcgacccttcctctttgcactatatcaaccctatgggcaccaacgaatatctgtcggccatctgggctgttgggcagatcattcaggactacgacaggccacgctcatttctcaagcctgatccttgggcaggcactgaggctgtaacggggcagcacgttatgttctctgtttatgagacccatgtggagtgggggagacagataggattgccagatgtcgcaaatcaaaatacaagacacccagttaagtttgaatttcaggtctcccatgagtttgccatcaacttcaaccccaccaaccccttctgctcaggtgtggatggtattgcccaggcgtactcagcttgcctgccccacatccgcttctacggtcctaccaatttctcccccatcgtcaaccacgtggcccggtttgcggcccaggccacacaacagcggacggccacgcagtacttcatcctcctcatcatcacggacggggtcatcagtgacatggaggagacacggcatgccgtggtgcaggcttccaagctgcccatgtccatcatcatcgtgggcgtgggcaatgcggacttcgctgccatggagttcctggatggggacagcccgcatgctgcgctccccacacgggggaggaggcagccccgcgatattgtgcagttcgttcccctttggagagttccgcaacgcagcaaaaagagaccttggccaaaagctgtgctggcggagctgcccccaacaagttgtgcagtatttcaaggcataaaaaccttgccccccaccaaacttnggagcccgcctgagctccagtgcccagcagcagcatgtcagctgagcctcctgccctcccccaggaaaaaggaaggctaattatgtttccttgtgggtggccttttttttaccggatcccctttttttattttttacaacccggacctccacccccaactttcctccaagcccaagctgggtttccttttgtttgggagttcaactggttgatgcttccaaggccaaactggcttcctctcctcctctccccacctttgccattcttaagtattgaatgtactttgtataattttagtggaattgttattgagaataaaatttttacaatcataactggctttttccaagtaactagctgcagactctgatgaaagaaacatgtccttggtgcatacgtgtcgtagcctgcacctaattaattcctgctgtttttttaatactgtgactgtgttctatttgttatatgctcagggtaacaaatgagtttcagacgtccctgcgtcagctccttcctcagcagggacctgacgggctcactgatctaagaaaggaaatggaaaatgaaaatccaccccacaagtctaataagttggtgtagtcacttctgcatggggacatgcattccagatgataacctgttaaatcactgccagttaacagtg

SEQ ID NO: 135916 - DNA, 984 bp, Homo sapiens
ctatgtgtcccagcgacgttggactctagaggatagctgtttttccagggtatgcaatggatttaacgacaccatcggttcctgaaaaatcatggcgatcttattaccgcgtacaccgcgcaacgtttgatcgctggcgtgaagcagcgattcgccatgaaaacgaatatcgccggagagatattcaaccggcggggaagggagcaggcgtaaaattgacagcgcggtaacgcttttgcctgaacctgactcacccaccagcgccagcgtttcgccagcctcaatctgtagtgaaacatcattgactactgtacgtacggtttgcgccttattaggatcaaatgcgtcgcggacggcttcaccaataaagatcagcaaagacaataatatcgccaccgacaagaaggcggtgatcccaagccacggggcctgaaggttatttttcccttgtaacagcagttcaccgagtgacggtgaaccgagcggtagaccgaagccgaggaaatcgagcgaggtcagggtggttatcgaactacataaaataaacggtaaaaaggtgagggtcgcgaccatggcattaggcaacatatgacgcaggatgatactgcgatcgctgacgccagcgcttttttctagagttgctggcagccgtcttttctctggtttacagccattggtaagaagcacacatgacaacctggactttccatcaacattgaagcgggagcggtaccgaggccgttcgctcgccgctactgggggaatctcggttgatttcttttcctcggggtacttagatgtttcagttcccccggttcgcctcattaaccgccgtgaaagggcggtgtcctgggcctctagacgaaggggacacgaaaattgcttatcacgcgttgcgtgatattttcgtgtagggtgagctttcattaatagaaagcgaacggccttattctcttcagcctcactcccaacgcgtaaacgcat

SEQ ID NO: 135917 - DNA, 1371 bp, Homo sapiens
atggtggaagagtattccggcgttacgctggacaagagtgaatcgcgcaccgactggctggccagaccgctgaccgaacgtcagtgtgaatacgcagcggcggatgtctggtatctgttaccgatcaccgccagcagcggtcaggcatttaccgtcaataaccctacgccgtactacgtgattatcagcaacgccagtgcgcagaaaaacggtaatccagctgcagggttctcgcctctggtcattgagccgaaaaccacggtaccgctgaatgtgaaaatggatagcgtaccggtgctgacttacgtcaacgactttggcgcacggatgccgctgttcttccagtgcaatggcaacagctgccagggcagccaggtagagttcggcaatatgattgctgataacgttgatggcaccaattatcggcaagatgcgaaatacacgttgaactgcacaaacagtcttgctaacgacttgcggatgcaacttaagggcaatacctcaacgattaacggcgaaacggtactcagtaccaatatcaccgggctgggcattcggatagaaaatagcgccgataactcattgtttgccgtcggtgaaaatagctggacgccatttaatatcaataaccagccacagttgaaggctgtacctgtgaaggcaagcggggcgcaacttgctgcgggcgacgccatagctcatgctgctgatgaagacatcacctttcacgggacattattgtcaccgccaacctgtagcatcagcggtggtaaaaccattgaagtcgaatttcgcgatctcattatcgacgacatcaacggcaactatggtcgtaaagaggtgccatatgaactcacttgtgactcgacgacccgtcatccagattgggagatgaccctcacctggactggtacacaaaccagttttaatgatgcagcaattgaaactgatgtacccggttttggtatcgagcttcagcacgatggtcagcgttttaaactcaatactccgcttgctatcaacgccactgattttacgcaaaagccgaagctggagaccgtacggtcgcttaacctcacaagccgaagatgtttctttcgattcatcatcgtgttgcgaaaatttgagagactcacgaacaactttgtgaccgaaaataactgttcttttggacactctctccgaacagattgtaacgatcaggcacccgcaggaattacaggtgctgatcatttctggtttggtcatacaccgttgcgacatcgcgtggatattggcaacctgcattatattgataccggtgctgtctttgggggcgaattgagagaagagaaactcatgattcccaaaattgtccagcttcctggctag

SEQ ID NO: 135918 - DNA, 564 bp, Homo sapiens
atgtgctatcgagcatcagcagctcataaaacaaaaattgtgcgcaatgccgacggcaccgaatccgccagcgaacagctttaccaggtcgttggcgcagggtgcaagatgccctggcagtcagaggcgatgaaggacgtgctaatctgcgataagcgtcggttaatgaggcgaaccgggggaactgaaacatctaagtaccccgaggaaaagaaatcaaccgagattcccccagtagcggcgagcgaacggggaggagcccagagcctgaatcagtgtgctaatactcctgatgaccgatgtgaccagtacggggggacagcgaaaaaaacggggcaggcgttgcacaaactgtacgggcaagaccgcggggaccacccaggggaagggaacccgggaagggccgcaaatatcgacaagagatcccaaaggaccagggaacacttaggggcaacgcggaaaccaacgcgttacagagaaggggtccatgggaccacaatgaccacaaggcggcacaccggaaggtcctatgcaaaaataaactgtcaggttgtgatagcatag

SEQ ID NO: 135919 - DNA, 726 bp, Homo sapiens
tcccctattcgggtaaccttgctacagaatataagtcgctgacccattatacaaaaggtacgcagtcacacgcctaagcgtgctcccactgcttgtacgtacacggtttcaggttctttttcactcccctcgccggggttcttttcgcctttccctcacgggactggttcactatcggtcagtcaggagtatttagccttggaggaatggtcccctcatatttcagccagggattgcacgtgtagcggcttactcatcgagctccccagcacgggcatttttgtgtacggggctgtcaccctgtatcgcgcgcctttccagacgcttccagtaacacacgcactgattcaggctctgggttgctccccgtatcgctcgccgctactgggggaatctcggttgatttcttttcctcggggtacttagatgtttcagttcccccggttcgcctcattaacctatggattcagttaatgatagtgtgtcgaaacacactgggtttccccattcggaaatcgccggttataacggttcatatcaccttaccgacgcttatcgcagattagcacgtccttcatcgcctctgactgccagggcatccaccgttgtacggttagtcgcttaacctcacaacccgaagatgtttctttcgattcatcatcgtgttgcgaaaatttgagagactcacgaacaactttcgttgttcagtgtttcaattttcagctt

SEQ ID NO: 135920 - DNA, 5962 bp, Homo sapiens; identical to SEQ ID NO: 132313

SEQ ID NO: 135921 - DNA, 1830 bp, Homo sapiens
ctatccaactgaatacccgtacagtagttcatcattcctgctaataacaatataccaaagagtgaagttgaaagccgatagcagggaaaaagaaccagccaccagcttatccaaatagttattaaaatatccgatactctcgctatgagttgagaaaccaccaagcgaaactgtggaaatcccgtgacaaatagcatcaaacaaaggcattcctgcaagtctataacagacaatacaagcaatacctaataaagaataagttatccacagtgtccgtgacgtatcggccaggcggggagtgagtttgtcatccttaaatggccccggcatttctgactgataaagctttgcaccaccaatacccaataatggcaatacagcaaccgccagaacaataactcctaaaccacctataaaatttaactgtgaccgatagtacaaatatgcccgaggtaatgaactaacatcatcaattacagttgctcctgttgttgttattccagaaaccccttcccctgtgggaaaataaaacctcttaaggggggcctgatagttgcattgccattcatgatgatcccctggcattcgtccattcagccattcaccattcacccattcaactggaattttggttgaatgccggaattgtgtccacaaattgtggatggatagttggttggctggctggatggctggctggatggctggctgatagttgcattgccattcatgacgatcccctggcattcgtccattcagccattcaccattcacccattcaactggaattctggtagaatgccggaatagtgtccacaaattgaggatggatagttggttggctggctggatggctggctggatggctggctgatagttgcattgccattcatgatgatcccctagcattcgtccattcaggcattcaccattcacccattcaactggaattttggttgaatgccggaattgcgtccacaaattgtggatggatagtgggatggctgactggatggctggctggatgactggcttgataccagctggagcctcctgtaataaggaacttatgacccctgtttgggagtctctcccattaagggagaccggggcaaggaacggcttttggaggatcttgtcaataacaaaacgttgcactgtctggggaatcccttgtaagtgtgcaagtagttcatcagtggtaaagtaaaatattaacactttaccgacggccagaataaccggcagcatggttgcggtgtgcgcagacaggctggcaaacaggtagtgtgcaaagtagaacaccagaaccagtacaatcaccgttgcgtttggtgagaatccttccaggtgcgtactcatggtaccggcgaaccagtcaataaaaccagaacgagtcaggccgttagccatcacaaccagagttgccaggttgaccagtgtgttccatgcgctgttatagcgggtaatgtctttccaaggcacaacgtgcagggccagcattagcgaaactgccagcagaccaaccgcagtagcattaatgacttcactgccaaatacccacaaacctgaagctgagtcaggagcagacgacatgactgctcgctgggaaagagattgctgagagttgcattgccattcatgatgatcccctggcattcgtacattcagccattcaccattcacccattcaactggaattttggttgaatgccggaattgtgtccacaaattgtggatggatagttgtgtggctggctggatggctggctggatggctcgctggatggatggagaatggctggcggcggctcggctgctttgaagcat

SEQ ID NO: 135922 - DNA, 942 bp, Homo sapiens
ctgccagctaaggttattaagaatggggcgatcgttataagaaaccacgccattgttcagcacaatgcgcggttcgttggcgggtaaggcgtgacgtgctgaaggttcatccggctccggcagttgcacaccttcaagctgttcactatcgccagttgcgcgacgagtgcttgttggagcagttcctcttgactcaccccgtttgttcttgatccgtttgcgattcgccagatcgacgcggtactggcgactcacgatcacaacgatcatatcgacgttaacgtcgctgctgccgtgatgcagaattgtgccgatgacgtaccgtttatcggaccgaaaacctgtgtggatttgtggattggcaacagttttcagttgtaaccagacgccaccttgcaaaatcaccatcccaaggctgagcaatccgcacaataaagggaatggcgtcagcagttgccagaagctgccgagatactccacgcgtaattgcggtgtgaaggcaaacggcacgccgagcaacaagttgccgaaggcgataccgaagactaccggcggcaccagactgccgatgaccagaccggcgtcccacattttacgccagcgtgcatcggcgatttttccgcgataatcaaaggccagcgggcggaagaacagtgagcacagcaccaggatcatcgccacataaaagccggaaaacgccgctgcatacactctgggccaggcggcaaataatgccccaccagcgaggatcaaccagacctggttgccttcccagtgtgcaccaacgctgtttatcactatccggcgttcatcatcattacgcgccaccagcggcagcagacagccgatccccatgtcaaatccgtcggagatcataaagaccaccaggatcacgccaatcagcagccaccagatgaagcgcaatgtttcataatcaaacat

SEQ ID NO: 135923 - DNA, 1522 bp, Homo sapiens
atgctgctggcatgggcgctgcttcccggcgtccatgagtttatcaatcgcagcgttgcggcgtttgcccgcgtggaccaacagggtatagaacgctttattcagtcttacggcgcactggcggcagttgtctcgttcttgttgatgattttgcaggccattgctgcaccgctacctgcgtttttgatcacctttgccaatgcgtcgctgtttggcgcgttctggggcggcttgctgtcgtggaccagttcgatggccggcgcggcgctttgcttttttatcgccagagtgatgggccgcgaagtggtggaaaaattaaccggcaaaaccgtgcttgacagtatggacggctttttcactcgctacggcaaacacaccattctggaacagcggatcgcccattaccgggcggttgagcagccaggaagaactgaccggatagcggctcatcacatccacttcggcgtgtggattgagaatgttgatggcatcaagtcccgagcacagaaccgtaggtcggataaggcgttttacgccgcatccggcaaccgttgcctgacgcgacgctgtgcgtcttatcaggcctacaagcggaacataaccgtaggtcggataaggcgtttacgccgcatccgacagccgttgcctgagtgcgacgctgtgcgtcttatcaggcctacaaaccggaacataacctcgagctatcacgaatcctgggttttagaagaccgcattattaaagatggttcttacaacatcgatcagggcgttggtgtgcgtgcaatcagcggtgaaaaaaccggattcgttacgctgaccaaatcagcctgtgcgtggaacagagtcgcaactgcgcgcaccatcgtccgtgatagtggtgatggcgagaacgaatacgctcgcgaacgacaggttcaaggctacggaactgctccggcagacgaaaccggagatttcaatatgcgtccagcaggccgtagcaataatcaggtgcgtcccgttaccctgactcgtaactatacaaaacatgcagaaggctcggtgctggtcgaatttggcgataccaaagtgttgtgtaccgcctctattgaagaaggcgtgccgcgcttcctgaaaggtcagggccaaggctggatcaccgcagagtacggcatgctgccacgttctacccacacccgtaacgctcgtgaagcggcgaaaggtaagcagggtggacgcacaatggaaatccagcgtctgatcgcccgtgctcttcgcgcggcagtagatttgaaagcgctgggtgagttcaccattacgctggactgcgacgtgcttcaggctgatggtggcacgcgtaccgcgtcgattacgggtgcctgcgtggcgctggtagatgcgctacagaagctggtggaaaacggcaagctgaaaaccaatccgatgaaagggatggtagccgcagtttctgtcggaattgtgaacggcgaagcggtttgcgatctggaatacgttgaagactctgccgcagagaccgacatga

SEQ ID NO: 135924 - DNA, 5145 bp, Homo sapiens
atgctgacatatcgcagtgttgaaatagacatcgatggagagaggagacgaaaaaatcagtccgcctttactcatgtgctgctgctgaaaagcccacaggagatccgcccaaccatcgacacacaaaaggcgttactactggtgcgtttcccggctgacttctcgcgcaaactggataccttccagaccgcgcctttgcagttgatcctcgacgggcgtaactccaacagtgcgcaaattgccgccaactacctgcaacagatcgtcaaaaattatcagcaggagctgctggaaggaaaaccgaaacctaacaacagcgagctggtggtacgcaactggtataacccgaatctcgactacaaatggtttgtggtgccgtcactgatcgccatgatcaccactatcggcgtaatgatcgtcacttcactttccgtcgcccgcgaacgtgaacaaggtacgctcgatcagctactggtttcgccgctcaccagctggcagatcttcatcggcaaagccgtaccggcgttaattgtcgccaccttccaggccaacattgtgctggcgattggtatctgggcgtatcaaatccccttcgccggatcgctggcgctgttctactttacgatgatggggaaacggtttagaaaggaccccggaaagagcaggcggagaaagctagctcggtaccatctctatcagttatcggcgtggccatcgccaggatgcggtacaacacgcccagcaattgctgaagatgatggggtacggcgtgtagcgtttcacctctttcaccaactgtgccgcaaccacctcggcactgacgcgcttttcaccgacgacaaaaaagcgttcggtgatattttcactttcgacttcaagcgagacggtattacccggcccctggtcgcgcggcagggttatgtcagtaccgaagagctggtagagcatttctccgtcagcccgcagactattcgccgcgacctcaatgagctggcggagcaaaacctgatcctgcgccatcatggcggtgcggcgctgccttccagttcggttaacacgccgtggcacgatcgcaaggccacccagaccgaagaaaaagagcgcatcgcccgcaaagtggcggagcaaatccccaatggctcgacgctgtttatcgatatcggcaccacgccggaagcggtagcgcacgcactgctcaatcacagcaatttgcgcattgtcaccaacaatctcaacgttgctaacacgttgatggtaaaagaagattttcgcatcattctcgccggtggcgaattacgcagccgcgatggcgggatcattggcgaagcgacgctcgattttatctcccagttccgccttgatttcggcattctggggataagcggcatcgatagcgacggctcgctgctggagttcgattaccacgaagttcgcaccaaacgcgccattattgagaactcgcgccacgttatgctggttgtcgatcactcgaaatttggccgtaacgcgatggtccatatgggcagcatcagcatgaacgatcaacaggtgacgtttaattatctgttagcgcaaggggagtaccgtatttccacattgctggcggtattgtttgctgcggggtttgctatcggttggttgatttgtggcctgttctggctgcgagttcgtgtttccctggcgcgcgctgaacccgctgcctatggctggtatatgggccgcagaagtgcgcaacaaaacaagcaagatgaagccaaccgcttgtcgcgtgattacgtagcgggggttaacttcctgcttagtaatcaacaggataaagcggtagacctgtttctcgatatgcttaaagaggatacaggcaccgttgaagcccaccttacgctcggaaacctgttccgttcgcgtggcgaagttgatcgcgctattcgcatccatcagaccctaatggaaagcgcctcgctgacctatgaacagcgtctgttggcgattcaacaactggggcgtgattacatggccgccgggttatatgaccgcgcggaagacatgttcaatcagctgaccgatgaaactgacttccgcattggcgcgctgcaacagttgctacaaatctaccaggctaccagtgagtggcagaaagcaattgatgcttgccgaacgcctggtgaagctggagaagatcgggtgattcgctttggtaaagcacgggcaacgcgatatgcactgctgcgtccttatcgcggaattgagcgtattcccgtctggcgggtggacgataccggaaaggcgcataaattcgccgacatccggttgtgctggccgcagggaagttgtctggaagaagatgtgctctacgccctgaccgtatttaacggtgaatatactggcggttggttggtcggggaggggaattatcagcgatggattactgcacaacaccctgcggaaattcctctggatcaaaaactcacccattacgaacagctggcaagtgatgcactggcaggagaaatcctaaccgcggtcagccaacgttggggtgacctgctaattgctgaatctattgccgcgcaaatcctgcgtgacggtgggatccacgccatcgagtcaacggtgcttgtaacaagtaacaggcaggtattcctcgaagcggaacgctttgactgcaaaggtaacgatggtcgcttgcctattgtgtcgctggaggcggtgcagagtgagtttatctcttctccgggatcgtggccgcaggcaatgcgccgtttgtgtgagcaacaacttgtcactcaccagagcgtggcgcaaacagaagtgatctgggcatttgggcgacttatcgccaacagcgatatgcacgcaggtaatttatcgttttatttatctgaaccgccatttgcgctgacgcccgtctacgacatgctgccgatggtctatgcaccaaacagcgctggaatgctgcgtgatgctgccattgaggtgaagtttgatcttaacgtcagtaaaagcgcttggttaacggcgatcccgctggcgcagcagttctggcaaacggtcgccagagatccgcgtatcagcgaggcgtttcgccacattgctgtcgactctagaggtcccccacaccgtgtggttgtactactaggtgcacactctggaagtccattctcgattggcggtaaccactggtggcggggaaatccacgctgcgactgcaaacgctgtcgcaaactggcccagcagatgtccacgctgtatgtcaccggcgaagagtcgctgcaacacggtcggcaaatgcgcgctcatcgccttggcctgccgactgacaatctcaatatgttgtcggaaaccagcatcgaacagatctgcctgattgccgaagaagagcaaccgaagctgatggtaattgactcgatccaggtgatgcatatggcggatgtacagtcatcgcctggtagcgtggcgcaggtgcgtgaaacggcggcttatttgacacgcttcgccaaaacgcgcggtgtggcgattgtcatggtggggcacgtaaccaaagatggttcgctggctggcccgaaagtgctggaacactgtatcgactgttcggtgcttttggatggcgatgccgactcccgttttcgcaccttgcgcagccataaaaaccgcttcggcgcggtgaatgagctgggcgtcttcgcgatgaccgaacaggggctgcgtgaagtcagcaacccttcggcaattttcttaagtcgcggcgatgaagtgacctccggtagctcagtgatggtggtatgggaaggaacgcgtccactgctggtggagattcaggcgctggtcgatcactcgatgatggcgaacccacgccgtgtggcatggggctggaacaaaagcgtcatgggaatcctgctggctgtgttgcaccgtcaaggtggtcttgaaatgggcgatcaagatgtgtttgtgaacgtggtcggcggcgtgaaggtgaccgaaaccagtggcgacttagagttactgctggcgatggtttccacaccgggcgaaagaacgctggcgcaggaacctgggacaaaaaaaaggcgactcatcagtcgccttaaaaatcagtttgccagcgccgccttctgcgtcgctacaatggattcgattccccctcgggccagagccaacaagatgagtagctcttcatgggtgaacggctcgccttctgccgtcccctgcacttcaatgatgcgcccgtcttcggtcatcactacgttcatgtcggtctctgcggccgagtcttcgacgtattccagatcgggggaaatatttctccagcgcgaggggcatatccaacaacaaatggggggaataaatgcccgcgcaaaagttgctggcttgatgatgcgccaggacgatagcgacacgctgaattctctgggcgtttttgtctgggcatggccggatggaccgcagttaatgtctgatcgtttaaaagagctggctaccgcaggttttactctaacgcagacgtatacccgtgcggtgaaaaatgctgatgaagttgcgcgcgtacgcaatgagtggtggaaagcggaattacccttcgtcaccgatggcgtagttgtacgagcggcgaaagagccagaatcccgccattggctaccgggccaggcagagtggctggtggcctggaaatatcaacctgtagctcaggttgccgaagtgaaggcaattcagtttgcggtgggtaagagcggtaaaatatcggtggttgcgtcactcgcacctgtcatgctggatgataaaaaagtccagcgggtgaatattggttccgtcaggcgctggcaggagtgggatattgcgcctggtgatcagattctcgtcagccttgccggtcagggtattcctcgcattgatgatgtggtgtggcgcggtgcagaacgtcaaaaccgacacgcagaaaaccgctttaactcgttgacctgctactttgcttctgatgtccgtcaggaacagtgcattccacgcttagtctggctgcggccaaaacaggtacttgggctggctgacatcggtgacgccgaacgccgcgcgctgcatcacagtcatcgctcagaacatatatcccactggctcacatcaaagcaaccctgcgcagtgtgtcagttttag

SEQ ID NO: 135925 - DNA, 1648 bp, Homo sapiens
aaaatctttccatataaaatcaacaacaccttccctggcaaaaagttcaaaaaatggtcattgcattcctgaaaaaatagtgtcaggattaatcaaaaccaatcacatattgattcgaattgaactatcataaaggtaaatggcgatgagtaaagtgaaaagtatcacccgtgaatcctggatcctgagcactttcccggagtggggtagttggttgaatgaagaaattgaacaagagcaggtcgctcctggcacatttacgatgtggtggcttggctgcaccgggatctggttgaaatcggaaggtggcaccaacgtttgcgttaatttatggtgcggcactggcaaacaaagtcacggtaacccgttaatgaaacagggtcaacagatgccgcccatggctggcgtgaaaaaactgcagccaaacctgcgtaccaccccgtttgttcttgatccgtttgcgattcgccagatcgacgcggtactggcgactcacgatcacaacgatcatatcgacgttaacgtcgctgctgccgtgatgcagaattgtgcagatgacgtaccgtttatcggaccgaaaacctgtgtggattcgtggattggctggggcgtaccgaaagagcgttgcatcgtggtcaaaccgggcgatgtagtacaagtgacagcacttgaaattcatgcgcctgatgctttcgaccgtacggcaccgatcacctggctggccgatcaaaagcggcggcgtaccgtcaaagggaggacgacgcgcccttgtaacaggtcagttaccgtccgtccacgccgccgcgatgctgttattggtcgcttttatcgtcatcagtctattactcaaaaaggccttttgctcatggttatgcccggttgtgcattccctttatggattgactcagaacttaatttaacgttcattgatgctctgtttgaaggggtttctggaataacaacaacaggagcaactgtaattgatgatgttagttcattacctcgggcatatttgtactatcggtcacagttaaattttataggtggtttaggagttattgttctggcggttgctgtattgccattattgggtattggtggtgcaaagctttatcagtcagaaatgccggggccatttaaggatgacaaactcactccccgcctggccgatacgtcacggacactgtggataacttattctttattaggtgcaggacttaaaaacagagtctttgaaagttacagatttgaacttgacccctatgaatctgcccacacacagaaaaatcctattcatccaggcgtgtgccccaaggtccaagaagttcccacttttagaatgaaggatgcgctacagaagctggtggaaaacggcaagctgaaaaccaatccgatgaaagggatggtagccgcagtttctgtcggaattgtgaacggcgaagcggtttgcgatctggaatacgttgaagactctgccgcagagaccgacatgaacgtagtgatgaccgaagacgggcgcatcattgaagtgcaggggacggcagaaggcgagccgttcacccatgaagagctactcatcttgttggctctggcccgagggggaatcgaatccattgtagcgacgcagaaggcggcgctggcaaactga

SEQ ID NO: 135926 - DNA, 392 bp, Homo sapiens
gtggaggtttatgactttccaataagtgaaatgttaatgagggttattaaccctcactagtgtctgtttggaagtagtgacattcttccaaaaatcttggaaaagttgttttgtagtgtgaatgagcatgagtcactgatctaagccctttcactggatgaagtgaaaagattttttttcaacaaaagagggagagagagaatcaagactctgataaacatagtactatttttaaaagaaatccaataacaataaagattgttctattctctgccttcccatttagatagggtttaaaccagcaggaggcatccgcagtgcaaaggattcccttgcttggctctctcttgtaaaggaggagcttggagatgagtggctgaagccagaactct

SEQ ID NO: 135927 - DNA, 495 bp, Homo sapiens
atgggccaaacagcagggggagaagcagtgtcaggggaaataattcctgaaaaaggtggtacctgtgctgaaccccaagatgtggagttatttgggcaaaaggcattccgggcaggaggcacagaacgtacaaagactcaaaaggttggatggcaccatctgcagagaagtgcaagatcagattttattaagacctctactggaaaagaaacagtaaatgccaccttcccggtagctatagtaatgctgcgggccattagagatttcttctggaaaactggaaacaagatagggtttaaaccagcaggaggcatccgcagtgcaaaggattcccttgcttggctctctcttgtaaaggaggagcttggagatgagtggctgaagccagaactctttcgaataggtgccagtactctgctctcggacattgagaggcagatttaccatcatgtgactggaagatatgcagcttatcatgatcttccaatgtcttaa

SEQ ID NO: 135928 - DNA, 1158 bp, Homo sapiens
atgtgcaaaatcacaccaaaccttattgcaatattgaagcagtatcacatcaaggaggtatttttttatttgatcttgattgaaaccgttttcgacacccataacgccaaagcggcggtatttgcggtgaaaacggagtttgaagcgctgggcgttgagctgccgaatatgatctccggcaccatcaccgacgcctccgggcgcacgctctccgggcagaccaccgaagcattttacaactcattgcgccacgccgaagctctgacctttggcctgaactgtgcgctggggcccgatgaactgcgccagtacgtgcaggagctgtcacggattgcggaatgctacgtcaccgcgcacccgaacgccgggctacccaacgcctttggtgagtacgatctcgacgccgacacgatggcaaaacagatacgtgaatgggcgcaagcgggttttctcaatatcgtcggcggctgctgtggcaccacgccacaacatattgcagcgatgagtcgtgcagtagaaggattagcgccgcgcaaactgccggaaattcccgtagcctgccgtttgatcaggcactgttctggatatgaggaatatagccgtgtacaaatcagaaaacaaccctacctttctaaaggttacattccagtaagacaaaaaaccaaggctgcttggctcctgaaagctgttacctttatagatcttactacactttcaggtgatgatacatcttccaacattcaaaggctctgttataaagccaaatacccaatccgggaagatctcttaaaagctttaaatatgcatgataaagtggccgctggatttccagctggacagactcatttgaagacacgattagaagagatcagattggctgtggaagatggagctacagaaatcgacgtggtaattaacagaagcttggtgctgacaggccagtgggaagggcatactccccagttgtttattcagcattaccatgcaacatatgacacagcagactgttccttccttctggtaatgctttgttgttgtggctttggtgcctacattcctgaggtcttcctttctgtttctgattacccctgcgtctcatttgcaagctccttcacctcctctgtcatccctgaagtgtccatgtttctcagaatctga

SEQ ID NO: 135929 - DNA, 1757 bp, Homo sapiens
  misc_feature (1)...(1757): n = a,t,c or g
ggcccgctccaacatcagaatggtaacagctttcaggagcctaccagccggcagctccggagctgcacgcgccagtgtccgcgcacaatcggggcaccgagctcgaccttagctggatctccaaaatacaagtgaatcacccggcagttctgaaggcgtgcggaacaaatccaggctcgcagaactcgtgaaaaaggactggcaggctgcttggctcctgaaagctgttacctttatagatcttactacactttcaggtgatgatacatctttcaacatttaaaggctctgttataaagccgggtacccaatccgggaagatctcttaaaagctttaaatatgcatgataaaggcattacttacagccgccgtttgtgttttatcccgcccgggtgttgtgatgctgtaaaaggcacttcaaggcctgcaggcttgttaatatccctgtgggcatcagtngggccgctggattttccagctgggacagactcattttgaagacacgattagaagagattcagattggctgtggaagatgggagcctacagaaaatcgacgtgggtaattaacagaagcttgggtgcctgacaggcccagtgggaaagccctgtatgatgagattcgtcagtttccgcaaggcctgtggggaggcttcatcttaaaactatattagccgacaggagaacttggaactcttactaatgtctataaaagccagtatgatagcaatgatggcaggatcagatttttattaagacctctactggaaaagaaacagtaaatgccaccttcccggtagctatagtaatgctgcgggccattagagatttcttctggaaaactggaaacaagatagggtttaaaccagcaggaggcatccgcagtgcaaaggattcccttgcttggctctctcttgtaaaggaggagcttggagatgagtggctgaagccaggaactctttcgaataggtgccagtacttctgctctcggacattgagagggcagatttaccattcatgtggactgggaagatatggcagcttattcatggatctttcccaatgtctttaaattcagttcacccagtttcccaggaaaagttcctttacgacaatgtttaaaaattatttttctacgtaattgctaaaattatttacattaaaaaattgggcagtaggtaactcggcattccctctcttttaaaatttcctacccgaacttaatgggaatgggaaaaggccaacctcatcccacatgtggtactccatttcaggcaccatctgaaatggatcttaattacttagaagatcctgcacctattaactttgtgaaagagtttctccctaaaaactttaagtaaaatgttaatggtagcctttgataacatcaaattcctaagggagaaaaaaaccaatattaaaccgcccaaagcagtgtgccctaggcagagggaaaatgcaacatgctcggcaaggcgctgctgttaacgacttcagggagtcactgattcaggcactaatttccctgctgtggaaaactcatcttttcatttttggcccgtgggatagggcgcttttattaattgttggtccctaatgaaatttctggacattgtcatatacaacgatgaatatcattaaaatttttaaaataataaagttcctatagtttatttttttaaaaaaacttaaaaattgttacaatacataatgaaaaaataatccattaaacataaaaagaggtttgatcaaaaaa

SEQ ID NO: 135930 - DNA, 1071 bp, Homo sapiens
tcagtctcgttggagcaggggatccacccattttccgcgagaaactgcctgtgtcgcatggatccctaagcagaactgggcagctgtcggccccagtgcctccagggtgggcgtcagcgtgcggtgatagtccgaggtctcccgccgcaaactgctggtccaccggattccccgcagctcggccgtgtggtccacgtggaagccgtgactgtgtggtttgatgtactccttgtctggttgttgtgtttgtgtgttgtatgtcatatattcgtgtgtggtgttgtcgctgtttgttcgtgggtgttgttggtacattcctccatctgcgtgttttgtgtgcttgcgtctcgctattattctctcgtcgatgttggtgtcgatcctcgtcgtttggtgtagtgttctacttcccgcttgattgtgtgtgttgtcgatgatacttagtgtcgtcgcgcagggtaagcaacgcaattgctgcaagccgttaggtcgccggcaggcgtaggcgcgtttacagcatattggtgcagtgggtgggtagggttccttgccgcggccccccccccccatgaattcgcccaccgccgccgcaatgtgaatccgcggagccccccaggtaaggaataccgtccaaccctcccgcgcggcgcagtagcccagctggaaaccgtttaaatcccgcgtctggcgtaggcagtcattcctcccaaatcctgtcgttgggaggtggtgtgccaagcttcccccaactgcccctactatgggaaaccccgtggtttcaatggtagccaccgccgattgcggcatgtcgttacatcgcgggaaggcgaagacgggtttacagcaaatccggcaaagcgaatagttcggcccgtggcgtaggcgggtgttcagcaaatcctgtaacacataggtgttgaggcaaggattttgcgaacacgggcgctgtagtcgcacaaattgccgtatgcctgcgcccgctagttcaatggagtagatgggtgaaatacggcgtcggcgtgtgtaggagggtaggtagtacgtgaccggtggccccccccccccccccat

SEQ ID NO: 135931 - DNA, 594 bp, Homo sapiens
atgattaagaaaatcggtgtgttgacaagcggcggtgatgcgccaggcatgaacgccgcaattcgcggggttgttcgttctgcgctgacagaaggtctggaagtaatgggtatttatgacggctatctgggtctgtatgaagaccgtatggtacagctagaccgttacagcgtgtctgacatgatcaaccgtggcggtacgttcctcggttctgcgcgtttcccggaattccgcaacgagaacatccgcgccgtggctatcaaaaacctgaaaaaacgtggtctcgccgaagttgctggttatcgagcggtgacggttcctacatgggtgcaatgcgtctgaccgaaatgggcttcccgtgcatcggtctgccgggcactatcgacaacgacatcaaaggcactgactacactatcggtttcttcactgcgctgagcaccgttgtagaagcgatcgaccgtctgcgtgacacctcttcttctcaccagcgtatttccgtggtggaagtgatgggccgttattgtggagatctgacgttggctgcggccattgccggtggctgtgaattcgttgtggttccggaagttgaattca

SEQ ID NO: 135932 - DNA, 831 bp, Homo sapiens
atgcagtctttgcttggtagcatagccaatcggaccagggatcagcctgtgaggttccaagacccgacgaagtgggtggcctacgtgggtgcgacctacctcagcggctcggaggccagcaccgtgcgggcccaggtggtccagatcgtcaagcaccccctgtacaacgcggacacggccgactttgacgtggctgtgctggagctgaccagccctctgcctttcggccggcacatccagcccgtgtgcctcccggctgccacacacatcttcccacccagcaagaagtgcctgatctcaggctggggctacctcaaggaggacttccgtaagcatcttcctcggcctgcaatggtcaagccagaggtgctgcagaaagccactgtggagctgctggaccaggcactgtgtgccagcttgtacggccattcactcactgacaggatggtgtgcgctggctacctggacgggaaggtggactcctgccagggtgactcaggaggacccctggtctgcgaggagccctctggccggttctttctggctggcatcgtgagctggggaatcgggtgtgcggaagcccggcgtccaggggtctatgcccgagtcaccaggctacgtgactggatcctggaggccaccaccaaagccagcatgcctctggcccccaccatggctcctgcccctgccgcccccagcacagcctggcccaccagtcctgagagccctgtggtcagcacccccaccaaatcgatgcaggccctcagtaccgtgcctcttgactgggtcaccgttcctaagctacaaggtattttcggggcagaaaggtag

SEQ ID NO: 135933 - DNA, 2405 bp, Homo sapiens
atgaacgccgcaattcgcggggttgttcgttctgcgctgacagaaggtcggaaaccgttggtacagctagaccgttacagcgtgtctgacatgatcaaccgtggcggacgttcctcggttctgcgcgtttcccggaattccgcgacgagaacatcccgccgtggctatcgaaaacctgaaaaaacgtggtatcgacgcgctggtgttatcggcggtgacggttcctacatgggtgcaatgcgtctgaccgaaatggcttcccgtgcatcgaatcgtgcgtgcgtctatcctgcttgcaggatcgacgggatgtacgactgccgctaccacatgaagtggatgctcagagaagcggtggcagagaaaagtgatgcgaaaaataagggggagcatgagcgggaggcaactggtgcacctgtacacaagtcgagtgcgtgtaggtacccggtcatctacttccttgcctttagtcgaaaccggcctgccagccacacacgcaaagcaagctctggtgagcgggcagctgaaagactgcgccacggtcctctgggctccggaactggcactttccacgactggtgtgtctcgcaagggcagcttggcggtcagcaaattgttcagatgttgacaaaacaacatggcagggcaaaacggcatttaaagatacggtatcgacatggcgcgttacaaaggcaatgtcgatacgctgaagattgttgtaacgatattcgctacaaagccgacagtttcatctttaacgtcgccggtcgccagaagagggctaaggcgcttaccctctccctactgtgccccatcagcgaccgggacagggacagcatccgttaccccaatgttggggttgctcccaatacttacgcgcgcattaaccgcaatttccacgcgcatcattaccacatgctgttcagcccgttcatcacctctatgctccgtacgtgcttgcgtccttgccgtgtgcccttttggtttggggttacccgtactgctgcctgtgcgtgcgccgtatgcgctggaggatctgtaaatgtggtgccttccatggccaaagcgactctgcaagtgggacgagtgaagggcatggagatgggagataatcctgatgatctggcgggcctatatccccacagtgttctcatgagaggaggtgggagggacaaccaaggaagtcccgctctggatgccgcgtgctgtcgagcggccagcattggcgtggtggccccagccttgtcgtcctcaccctgggagtccttttggggcttccacgtggaccacacggccgagctgcggggatccggtggaccagcagtttgcggcgggagacctcggactatcaccgcagctgacgcccaccctggaggcactgggatgggaactccagtgtcctcgtacatttccagctgcactttctgctgcgacccctccagacgctgagcctgggcctggaggaggagctattgcagcgagggatccgggcaaggctgcgggagcacggcatctccctggctgcctatggcacaattgtgtcggctgagctcaagggaggttccaggccttgtgcagtttggtggccgtccgagcctggggctggccgctgtccagggaactccttttcctgcgggaacagccagtgtgtgaccaaggtgaacccggagtgtgacgaccaggaggactgctccgatgggtccgacgaggcgcactgcgagtgtggcttgcagcctgcctggaggatggccggcaggatcgtgggcggcatggaagcatccccgggggagtttccgtggcaagccagccttcgagagaacaaggagcacttctgtggggccgccatcatcaacgccagcctctgaggagctgaaaccacaggttccaagacccgacgaagtgggtggcctacgtggtgcgacctacctcagcggctcggaggccagcaccgtgcgggcccagcaagaaggcctgatctcaggctggggctacctcaaggaggacttccgtaagcatctcctcggcctgcaatggtcaagccagaggtgctgcagaaagccactgggagctgctggaccaggcactgtgtgccagcttgtacggccattcactcctgacaggatggtgtgcgctggctacctggacgggaaggtggactcctgcagtgtcctgttcttgtttcgtggtaccatttctttctttttctctgaggatcgtaatttaatccgttatgttcttctatattctatatttgtggttaactgtatttcaggcaaaccacagcctggcccaccagtcctgagagccctgtgtcagcacccccaccaaatcgatgcaggccctcagtaccgtgcctcttgctgggtcaccgttcctaagctacaaggtattttcggggcagaaag

SEQ ID NO: 135934 - DNA, 1308 bp, Homo sapiens
tcaattggagtcagagccttttaatttcaggctaattcttctgctgttgtagtattcaatatattccgtaacagcatccttcagttcgcttatattactgaactcatcaagataaaaacactccgactttaaggttccaaagaaacactccaccacagcattatccagacaattgccttttctggacatgctttgtttaataccatgttctttaaggatattttgatatcttctcatacgatactgccatccctggtcagagtgcagaacaggatgctcgtgaggattaagctttttgaatgcctgatcgagcatattctcaaccatgttcatcactggtctttccgaaaggctgtaagaaataacttcgttgttgaagagatctattactggagacaaatacagcttgcgcccattgactgcaaattcagtaacatcggtaacccacttctcgtttggccgcgtagccttgaaatctctttggagaacattaggggcggtttgccctacctctcctctgtaagagcggtatcgcttgaccttaatcgctgctttaagtgagagggttcccatcaggcgctgaacagctttatggttaatctgtttcccttctcgatgaagagacagcgttacctttttcgtgggatgagctaaggctttcagctcttttagatacataagccgcgtttcaagaaatcgaacttgcctttcaagatcctcaatgcgtcggtcttttgacagctccaatgctgatgccgctttttctggatcaactgatattgcaatgtttcttttggtgccaatcttgagcgcgcgtaaaccagcttctccgcgctcttcatagaccttcagccacctggctacagaaccactaccagcaagcataaagtgagcagcagcctgattaagggacatgtgctgctcgatcacagctttcacgaccttaatacgcaactctggatcagcactaacgcctttaggtttgggaattaaacctttttctccatgtttttcatagagggcaacccatgtcctgacctgggttcgggggacaccaaaacgtgccgagatgatcctgtaaccatcatcagttgtgaagtagtgattcacgacttcaggcgcttgaggacatatggtcccggatgagcggaccttctccatggttgtcttctctctatcttgacctccattccgtcccctacatgtcaccttttcatgaaccaagtccaaataatcgacatgtaaaagcattcctatttctcgcctaaccagcagtcggggatcctctagatcgattaacggcatcat

SEQ ID NO: 135935 - DNA, 1059 bp, Homo sapiens
ttacttcgcttcgccgtttttcatttcgcccatagctttcagctttttggagatatcgcggcgttctttggagagctcggcatttttgatgatgtaatcgtcaacgcgatcttcatagtcacctttcatgctggcgatgatgccctggattgcttcaacgctcatccccggcttgatgtaatcgctcaggttgtccagcagcaggacgcgcttctggttgtcacggatctttttctcaacgtcctgaatttcacgttgcagtttgttcttacgacggaacagacgaacaaattccagtacgtcctggaatgaaggcttggtagtttccatttttatacccccttcccgccgattaggatcacccaactggggccacggatcgctaacaataacttgtgagtcatcggacaccacgctttgtcttatctcccgagctttcagcgcgcttaaacctggtttttgggcataatcccccgccagctgatgggccacggtaccgcccgtctccagcggtaacaccactttgcctatgcacttatcaaataactccgcagcccgatgaaatgctttaaaggcaacgttttcattttcagacatgatagattttccccagaaaaaagagattgaggcgaacataaggtgtgccttgaaaatgtcattaatggaaaatggctcgataacaagaggtaaaaacgtttccttggtaaggtttgaacttagatttttccagcattcttgagctggatcatataattcagggtattcttcctttatctccagttgcccattcactgtatggggccttgtttcccatgggacatcgcaggaatataacctcacacgagtacctattttctcagagctccagaattgctctcgcattctgcctagctcaatccgtatttccggatgatctttctctaagaacatcaatattccaccgcccattcgcattcggacatgggataggcgaagaacaccgcgctttcttgccagatccagattaaaatagatagctgacattccatgaaagggccaccggccacccagggacttcat

SEQ ID NO: 135936 - DNA, 432 bp, Homo sapiens
tcaatgggccaaagctgatagtgtctccagggaatagatgtcttcaacaatagagttatttcttccagcttttcggaaagaccagtgatgaacatggttgagaatatgctcgatcaggcattcaaaaagcttaatcatcacgagcatcatgttatgcactctgaccagggatggcagtatcgtatgagaagatatcaaaatatccagttgagttcctgcctgcacaagccaatattgctgggcataatgatgcaccagaagaacgagagccttttcaatggtaactatggttacttctgccaaacttctaacttcaggagaaatgttctccaacactgtgtcattttttaagtcgacgaacacaatctgagttcccatcctccacagctgcaggaaatctgtcagtttctctcctttacccttgcaagtcat

SEQ ID NO: 135937 - DNA, 1011 bp, Homo sapiens
atgccacagagtagagtttatgaccctatctgctacagctttaggtggtcagacaaccagaaagctgcaactggcaagcacgcaagcaagcacgcagcacagctaacacaggctacagcgcgcagagcagcatgcacaagcgaacaggcaggcacacgcagacagcacacagcagcaggcagcacgcaaagcagggcgcagcagcgcgcacaggcacgcagcaggaaggcagcagcagaaggagcagcgcgcacgcacgcaaaggcagcaaatagcagacgcaccacgatagttgctggtacacaggtgcatgaaagtactgttatgactggaccgctgtctcttcatcgagaagggaaacagattaaccataaagctgttcagcgcctgatgggaaccctctcacttaaagcagcgattaaggtcaagcgataccgctcttacagaggagaggtagggcaaaccgcccctaatgttctccaaagagatttcaaggctacgcggccaaacgagaagtgggttaccgatgttactgaatttgcagtcaatgggcgcaagctgtatttgtctccagtaatagatctcttcaacaacgaagttatttcttacagcctttcggaaagaccagtgatgaacatggttgagaatatgctcgatcaggcattcaaaaagcttaatcctcacgagcatcctgttctgcactctgaccagggatggcagtatcgtatgagaagatatcaaaatatccttaaagaacatggtattaaacaaagcatgtccagaaaaggcaattgtctggataatgctgtggtggagtgtttctttggaaccttaaagtcggagtgtttttatcttgatgagttcagtaatataagcgaactgaaggatgctgttacggaatatattgaatactacaacagcagaagaattagcctgaaattaaaaggtctgactccaattgaatatcggaatcagacctatatgcctcgtgttaactgtccaactttttag

SEQ ID NO: 135938 - DNA, 1353 bp, Homo sapiens
atgagaaacaaactctctttcgacttgcagttgagcgccagaaaagcggcaatcgctgaacggattgccgcccataaaattgcccgcagtaaagtgtcggtctttttaatggcgatgtccgctggcgtgtttatggcgatcggatttactttttacctttccgttatcgccgatgccccgtcttcacaggcattaacccatctggtgggcggcctttgctttacactcggctttattttgctggcggtttgcggcaccagcctgttcacctcgtcggtaatgacggtgatggcaaaaagtcggggcgttattagttggcgaacttggctgattaacgcacttctggtggcctgcggtaatctggcaggtattgcctgtttcagtttgttaatctggttttccgggctggtgatgagtgaaaacgcgatgtggggagtcgcggttttacactgcgccgagggcaaaatgcatcatacatttactgaatctgtcagcctcggcattatgtgcaatctgatggtttgcctggcgctgtggatgagttattgcgggcgttcgttatgcgacaaaatcgtcgccatgattttgcccatcaccctgtttgtcgccagtggctttgagcactgtatcgccaatttgtttgtgattccgttcgccattgccattcgccatttcgcccctccccccttctggcagctggcgcacagtagcgcagacaattttccggcactgacggtcagccattttattaccgccaatctgctcccggtgatgctgggtaatattatcggcggtgcggtgctgcgtcgccacatggacgtgacccggtacaaattgggtgaacgagttcacaaccgcgataatcggcttaccgaaatcggcgtcggtcattccggtggcgcgccacagcgcacgagcacccgccatattacgaccatgagtggtggtggcggaacggtcggaacgatccatacccggtttacgcgctacgcctgcagagataagaacgacatctgcgccttccagcgccggagtcgcatcttcaccagaaaaacctttgattttcacagcaatcgacagccacaccgggagtcactggagcgatatcatacacgtctgcgcaaagaaattgcagaattacgtgccaaaattgaacgcgtcccttttattgacaccttcgatttacgttacaagaactacgagaagcggcccgatccctccagccaggcagtgatgttttgcctgatggacgtttccggttcaatggatcaatccactaaagatatcgtggccgaaccggatcgccaacggctgttaccgctatcaggggcaggaatatcagttacccattaa

SEQ ID NO: 135939 - DNA, 735 bp, Homo sapiens
ttaaacacgaggcatataggtctgattccgatattcaattggagtcagaccttttaatttcaggctaattcttctgctgttgtagtattcaatatattccgtaacagcatccttcagttcgcttatattactgaactcatcaagataaaaacactccgactttaaggttccaaagaaacactccaccacagcattatccagacaattgccttttctggacatgctttgtttaataccatgttctttaaggatattttgatatcttctcatacgatactgccatccctggtcagagtgcagaacaggatgctcgtgaggattaagctttttgaatgcctgatcgagcatattctcaaccatgttcatcactggtctttccgaaaggctgtaagaaataacttcgttgttgaagagatctattactggagacaaatacagcttgcgcccattgactgcaaattcagtaacatcggtaacccacttctcgtttggccgcgtagccttgaaatctctttgaggagctactagaggcctctgggagctgacttcatctacactggtgctttcaaaaacatcatcatggcacatggcactggtgctgccattctcatccaccgtcattggctcaggacccataaagtcacaggaattctctggcaggggaaggttgggaatctgactggccaggtccatctgaatatgctgccacaacatcacagcaccggtgaacttctt

SEQ ID NO: 135940 - DNA, 845 bp, Homo sapiens
atgccggtccgcaggggccacgtcgctccccaaaacacttacctggacaccatcatccgcaagttcgagggccaaagtcggaagttcctgattgccaatgctcagatggagaactgcgccatcatttactgcaacgacggcttctgcgaactcttcggctactcccgagtggaggtgatgcagcaaccctgcacctgcgacttcctcacaggccccaacacaccaagcagcgccgtgtcccgcctagcgcaggccctgctgggggctgaggagtgcaaggtggacatcctctactaccgcaaggatgatgtggtgcccgtgaagaacgaggacggggctgtcatcatgttcattctcaacttcgaggacctggcccagctcctggccaagtgcagcagccgcagcttgtcccagcgcctgttgtcccagagcttcctgggctccgagggctctcatggcaggccaggcggaccagggccaggcacaggcaggggcaagtacaggaccatcagccagatcccacagttcacgctcaacttcgtggagttcaacttggagaagcaccgctccagctccaccacggagattgagatcatcgcgccccataaggatattttgatatcttctcatacgatactgccatccctggtcagagtgcagaacaggatgctcgtgaggattaagctttttgaatgcctgatcgagcatattctcaaccatgttcatcactggtctttccgaaaggctgtcctgtccctgggcgcggatgtgctgccggagtacaagctgcaggcgccgcgcatccaccgctggaccatcctgcactacagccccttcaaggccgt

SEQ ID NO: 135941 - DNA, 2100 bp, Homo sapiens
atggctgtttccaagatcaggacaggaaagctagccaaagtcaccatcgtggaccaccacgccgccacggcctctttcatgaagcacctggagaatgagcagaaggccagggggggctgccctgcagactgggcctggatcgtgccccccatctcgggcagcctcactcctgttttccatcaggagatggtcaactatttcctgtccccggccttccgctaccagccagacccctggaaggggagtgccgccaagggcaccggcatcaccaggaagaagacctttaaagaagtggccaaagtgcagaacaggatgctcgtgaggattaagctttttgaatgcctgatcgagcatattctcaaccatgttcatcactggtctttccgaaaggctgtaagaaataacttcgttgttgaagagatctattactggagacaaatacagcttgcgcccattgactgcaaattcagtaacatcgaccttcagccacctggctacagaaccactaccagcaagcataaagtgagcagcagcctgattaagggacatgtgctgctcgatcacagctttcacgaccttaatacgcaactctggatcagcactaacgcctttagcgccgtgaagatctccgcctcgctcatgggcacggtgatggcgaagcgagtgaaggcgacaatcctgtatggctccgagaccggccgggcccagagctacgcacagcagctggggagactcttccggaaggcttttgatccccgggtcctgtgtatggatgagtatgacgtggtgtccctcgaacacgagacgctggtgctggtggtaaccagcacatttgggaatggggatcccccggagaatggagagagctttgcagctgccctgatggagatgtccggcccctacaacagctcccctcggccggaacagcacaagagttataagatccgcttcaacagcatctcctgctcagacccactggtgtcctcttggcggcggaagaggaaggagtccagtaacacagacagtgcaggggccctgggcaccctcaggttctgtgtgttcgggctcggctcccgggcatacccccacttctgcgcctttgctcgtgccgtggacacacggctggaggaactgggcggggagcggctgctgcagctgggccagggcgacgagctgtgcggccaggaggaggccttccgaggctgggcccaggctgccttccaggccgcctgtgagaccttctgtgtgggagaggatgccaaggccgccgcccgagacatcttcagccccaaacggagctggaagcgccagaggtaccggctgagcgcccaggccgagggcctgcagttgctgccaggtctgatccacgtgcacaggcggaagatgttccaggctacaatccgctcagtggaaaacctgcaaagcagcaagtccacgagggccaccatcctggtgcgcctggacaccggaggccaggaggggctgcagtaccagccgggggaccacataggtgtctgcccgcccaaccggcccggccttgtggaggcgctgctgagccgcgtggaggacccgccggcgcccactgagcccgtggcagtagagcagctggagaagggcagccctggtggccctccccccggctgggtgcgggacccccggctgcccccgtgcacgctgcgccaggctctcaccttcttcctggacatcacctccccacccagccctcagctcttgcggctgctcagcaccttggcagaagagcccagggaacagcaggagctggaggccctcagccaggatccccgacgctacgaggagtggaagtggttccgctgccccacgctgctggaggtgctggagcagttcccgtcggtggcgctgcctgccccactgctcctcacccagctgcctctgctccagccccggtactactcagtcagctcggcacccagcacccacccaggagagatccacctcactgtagctgtgctggcatacaggactcaggatgggctgggccccctgcactatggagtctgctccacgtggctaagccagctcaagcccggagaccctgtgccctgcttcatccgggggtaa

SEQ ID NO: 135942 - DNA, 2196 bp, Homo sapiens
ttaagaagcgtcccaaggtggaaaaatgcaggctgtttccgtatgataccacccttggtaataccagttgtacacgaaagtagttgttgtgtgttgttgctgttgtgctgtttttttgtgcactggcctgcggtgtggggattgtgacgatgtggctggggtgctgcatatggccctatggacaatgttgctacggctacggtaatatggggagttgttgcctgtgcactgccagtaagggtggttgatgatggactgctggactgtgccaatggaccccagctgccttgctggacccggcatttcacccgacgagttgattccgaccagatttccgccgccatgctgtatgtgccgcagttgctgctgcacgtcagccgtccggttcgctgggacagcgatcacgtagtgctgctggatgatgaaacccaggcaattgccagtgagattgtgcgtcacgatctgtttgaccgggtgcatatcggccttgacttcttcgatgcctctatcaaccgcattgccgcgtgggtcattggtacacgcaatatgaaaaaagccctgctgcgtgcgttgctggaacctaccgctgagctgcgcaagctggaagcggcgggcgattacactgcgcgtctggcactgctggaagagcagaaatcgttgccgtggcaggcggtctgggaaatgtattgccaacgtcacgatacgccagcaggtagcgaatggctggagagcgtgcgggcttatgagaaagaaattttgagtcgccgcgggtaaacactgccggatgcggcgcgagcgccttatccggcctacgggtcggcaacagttgtaggcccccacaaacggggtctttttggggaaaaaagaaactccctccccctttttgcgggtctgtgactcccccccggggggatgggccttcccccctgctaaggatttatcatgaccgcgtattggctggcccagggcgtgggtgtcatcgcctttctgattggtatcacaacatttttcaatcgtgacgaacgtcgcttcaaaaagcagctttcggtctatagcgccgttattggcgtacatttttttcttctgggcacctatcccgctggtgccagtgccatcctgcagcatgcaagtgcctctttgctcgcccggggcctttctgcgggacctgctgtcatgtcgattgctcagcactgtgtgcatgtagcgctctgcacacgctgctgaatctgatggaacgcaaagacgttcagtttggtctggcgacgatgtgtatcggtctgggtcagggtattgcgacggtgtttgagcgggtttaaccacttgccggatgcggcgtgaacgccttatccggtctaccgatccggcaccaatgtaggcgtgggcgtacacacagagggttccagacccggatgtttctgtggggataaagcctttttgaaagcccctgattcgagccatatttctcaacccaggttcaatcactggttctttcccgaaagcctgtaagaaataacttcgttgttgaaagagatctataactggagacaaatacagcttgcgcccattgactgcaaattcagtaacatcggtaacccacttctcgtttggccgcgtagccttgaaatctctttggagaacattaggggcggtttgccctacctctcctctgtaagagcggtatcgcttgaccttaatcgctgctttaagtgagagggttcccatcaggcgctgaacagctttatggttaatctgtttcccttctcgatgaagagacagcgttaccctacggtatccgtatcggcctctattctcgtgataaatctcactaatacgctttttaacgtccgcatacttgtcaggcttgctgagagcctttagatgataataaaacgtactgcgcggtatctccgcagcctttttcgtgggatgagctaaggctttcagcttttttagatacataagccgcgtttcaagaaatcgaacttgcctttcaagatcctcaatgcgtcggtcttttgacagctccaatgctgatgccgctttttctggatcaactgatattgcaatgtttcttttggtgccaatcttgagcgcgcgtaaaccagcttctccgcgctcttcatagaccttcagccacctggctacagaaccactaccagcaagcataaagtgagcagcagcctgattaagggacat

SEQ ID NO: 135943 - DNA, 2109 bp, Homo sapiens
atgtcaaagccaaaatacccttttgaaaagcgccttgaagtcgtgaatcactacttcacaactgatgatggttacaggatcatctcggcacgttttggtgtcccccgaacccaggtcaggacatgggttgccctctatgaaaaacatggagaaaaaggtttaattcccaaacctaaaggcgttagtgctgatccagagttgcgtattaaggtcgtgaaagctgtgatcgagcagcacatgtcccttaatcaggctgctgctcactttatgcttgctggtagtggttctgtagccaggtggctgaaggtctatgaagagcgcggagaagctggtttacgcgcgctcaagattggcaccaaaagaaacattgcaatatcagttgatccagaaaaagcggcatcagcattggagctgtcaaaagaccgacgcattgaggatcttgaaaggcaagttcgatttcttgaaacgcggcttatgtatctaaaaaagctgaaagccttagctcatcccacgaaaaaggctgcggagataccgcgcagtacgttttattatcatctaaagggtttcaggaaggctgacaagtatggggacgttaaaaagcgtattagtgagatttatcacgagaatagagggcgatacggataccgtagggtaacgctgtctcttcatcgagaagggaaacagattaaccataaagctgttcagcgcctgatgggaaccctctcacttaaagcagcgattaaggtcaagcgataccgctcttacagaggagaggtagggcaaaccgcccctaatgttctccaaagagatttcaaggctacgcggccaaacgagaagtgggttaccgatgttactgaatttgcagtcaatgggcgcaagctgtatttgtctccagtaatagatctcttcaacaacgaagttatttcttacagcctttcggaaagaccagtgatgaacatggttgagaatatgctcgatcaggcattcaaaaagcttaatcctcacgagcatcctgttctgcactctgaccagggatggcagtatcgtatgagaagatatcaaaatatccttaaagaacatggtattaaacaaagcatgtccagaaaaggcaattgtctggataatgctgtggtggagtgtttctttggaaccttaaagtcggagtgtttttatcttgatgagttcagtaatataagcgaactgaaggatgctgttacggaatatattgaatactacaacagcagaagaattagcctgaaattaaaagcatcgagctgcatgctgtgcgcgcccacgcgcctggccccccgccgcggactccccgcgttgcccacgcagtccggtctcctgccccgcgacgcgcgcgcaccgccctctcgccagggctccgtgcgcttcgaccggcgccgcggccttctctacctgcggccgccgccgcccccgcccgggccgcgcaaggcccgcgccccgccgcccccgccgcctctgcgcctgggccgcccgctgtcgcgccgcttgtcgctggccagcccggcctgggtcttcaacgctgccgtggcgctggcggtgctggtggccgcgggcctcgtggtctcgggcgtctacatcttcttcctcatcccgcacgccacctcctccggccccccgcggccccagctcgtggcgctcgctccagcgcctggcttctcttggtttccgccgaggcccccgccggggtcgccctgggcccccgcctggacgccgcgccccacgggccctgacctggacacggccctgccaggaactgcagaagatgcgctggagcccgaggcgggccccgaggacccggcggaggccgagaggacgctggacaggcgatcggatggcacggaccatcaaaccccagacaatcctattttggtgggaaatctagcagatagagaagccaaacaagtagccctacaacctgtacaaggccagtttctgtgcctgtcctcgttctctcctctttactctccagaagaaaaggaggactaccaagcccaaaaccttcaaaaacaaggaccatgtctgactgcagaatacagccatatttttcttctcacagacagcctatggatggacgtgtga

SEQ ID NO: 135944 - DNA, 2001 bp, Homo sapiens
tcaatcaggcgaccaaagcgtgccagacccatcagaatcaaaaagatccccgagcagcaaggtcgcaaccagcagtcctgccagtccaaactgttgcgacacgggatagagaattaccacaaatgccgcagtcggaccggaaacgctaaagcgtgacccacccgtcagagcaatgacaatccccgcaacagctgcggtatataaaccgtactggggtgccacaccactaccaatagccaacgccatcgccagcgggatagcaataatcccgacggttatcccggcaatcaggtcacgggtaaaccgtgcggcagtatatttttctgacagggtcagagtacgcacgttcggcagtgatttgatttcatcgctcagcggaatggtatcgcagacaacgacttcatcaattacagagttacgcaggttgttcgccgcgttgccagagaagatcgggtgagtcgcgtacgcaaatacacgtttagcaccacgttctttcagagcttcagcagctttacacagcgtaccgccagtgtcgatcatatcatcgaccagtacgcagtcacgacctgcaacgtcaccgatgatatgcatcacctgtgaaacgttcgcacgcggacgacgtttgtcgatgattgccatatcggtatcgttcagcagcttagcgatagcgcgggcacgcacaacgccgccgatgtccggaatccttagagtatcaaaaagtggacagttaacacgaggcatataggtctgattccgatattcaattggagtcagaccttttaatttcaggctaattcttctgctgttgtagtattcaatatattccgtaacagcatccttcagttcgcttatattactgaactcatcaagataaaaacactccgactttaaggttccaaagaaacactccaccacagcattatccagacaattgccttttctggacatgctttgtttaataccatgttctttaaggatattttgatatcttctcatacgatactgccatccctggtcagagtgcagaacaggatgctcgtgaggattaagctttttgaatgcctgatcgagcatattctcaaccatgttcatcactggtctttccgaaaggctgtaagaaataacttcgttgttgaagagatctattactggagacaaatacagcttgcgcccattgactgcaaattcagtaacatcggtaacccacttctcgtttggccgcgtagccttgaaatctctttggagaacattaggggcggtttgccctacctctcctctgtaagagcggtatcgcttgaccttaatcgctgctttaagtgagagggttcccatcaggcgctgaacagctttatggttaatctgtttcccttctcgatgaagagacagcgttaccctacggtatccgtatcggcctctattctcgtgataaatctcactaaatacgctttttaacgtccgcatacttgtcaggcttgctgagagctttttcgtgggatgagctaaggctttcagcttttttagatacataagccgcgtttcaagaaatcgaacttgcctttcaagatcctcaatgcgtcggtcttttgacagctccaatgctgatgccgctttttctggatcaactgatattgcaatgtttcttttggtgccaatcttgagcgcgcgtaaaccagcttctccgcgctcttcatagaccttcagccacctggctacagaaccactaccagcaagcataaagtgagcagcagcctgattaagggacatgtgctgctcgatcacagctttcacgaccttaatacgcaactctggatcagcactaacgcctttaggtttgggaattaaacctttttctccatgtttttcatagagggcaacccatgtcctgacctgggttcgggggacaccaaaacgtgccgagatgatcctgtaaccatcatcagttgtgaagtagtgattcacgacttcaaggcgcttttcaaaagggtattttggctttgacat

SEQ ID NO: 135945 - DNA, 699 bp, Homo sapiens
tcaattgcgcgattcatatggcgcgccattttttgcgtgaacatgttttgctaaaagagggatatcttccggacggtcgcgtagcggcggcaattccagtgggaagacattcaggcgataaaagagatcgctgcgaaactggcgatcttcaaccatttgccacaaatcacggttggtggcggcaatgactctgacattcaccgggatcgttctactcccgccgagacgctcaatctcccgctcctgcaatacgcgcagcagtttaggctgaagttcagtaaacgcccctttgtcatgaccgaataactcactttccagaagactggcggggatggcagcgcagttgattttgaccagcggcttgtcgcgtcgcgggctctttgcccgttccggtttcaccacaaattcaacacccgtactgtcgctcttcggcacaatatcttccttgtggagccggtcttcccttgcctggctttgatagattatgtccccgttccctattccaaggactggccgtaaccgggggttcttgcggaccttcttgaatggcctgagaccagcttgatgtccaggaatagatggacgaaatgtgggacgggattccccaaaaggtaggttccaaagtcccgttttcacagggtttgacatacggggcaataaacgggtcaaaaacttgcagcgtacttctactgtggccat

SEQ ID NO: 135946 - DNA, 1970 bp, Homo sapiens
atgtttatggttctgccggttctgaccacgtacggcatggctctgcaaggtgccagcgaagcattaatcggtattgccatatttggtattacgctcgatcctgaagagcaatggcaacaaaaaccaaaagttgacaaatgggatctaattaaactgaagagcttctgcacagcaaaagaaactttttacgatattgatgaaggcgaaatcctgatggatggtcacgatctgcgcgagtataccctggcgtcgttacgtaaccaggttgctctggtgtcgcagaatgtccatctgtttaacgatacttcactaaaatcagccctgagcaataaccaaattgctgactggttacagattgccttatgggccgggcaagataaacagggtattaccgtttacaaccggtaccgtcatcaaaaattaccagcgcgtggttatgcagctgtcgccgtcgcttatcgtaacctgcaacaatggcaaaactcgcttacactgtggcaaaaggcgctctctctggagccgcaaaataaggattatcaacggggacaaattttaaccctggcagatgctggtcactatgatactgcgctggttaaacttaagcagcttaactctggagcaccggacaaagccaatttactcgcagaagcctatatctataaactggcggggcgtcatcaggatgaattacgggcgatgacagagtcattacctgaaaatgcatctacgcaacaatatcccacagaatacgtgcaggcattacgtaataatcaacttgctgccgcgattgacgatgccaatttaacgccagatattcgcgctgatattcatgccgaactgagcatcccccgcggctggcaaccgctgaatatcgccaccaccagcgtgctgctgacgctggccgataacgacacgccggtgtggctttctaccccattaaagaacgatatcgtcaaccagagcctgcgttttcataccaacgcgccgctggtcagccagccggaacaggcgaccttcgcggtgacggatgaggcgatttccagcgaacagctcaacgccctttccaccggcaccgccgttgcgccggaagcgggtcgccagcctgatcggcggacgcatgttgcgccttactggtgcgggtattgccgaagaacgaatgatcgctccgcagctgccggagtgcattctgcacgaactcaccgagcgcccgcatccgttcccgctcggcatcgacctgatcctgacctgtggcgagcgcctgctggctattccgcgaaccactcatgtggaggtgtgctgatgtacgttgccgtgaaagggggcgagaaggcgatcgacgccgcccacgccctgcaagagagccgacgccgaggcgataccgatttgcccgaactgagcgtcgcccagattgaacagcagcttaacctcgcggtagatcgcgtgatgaccgaaggcggcattgccgaccgcgaactggcggcgctggcgctgaaacaggccagcggcgataacgttgaagcgattttcctgctgcgcgcctaccgcaccacgttggcgaagctggcggtaagcgagccgctcgacaccaccgggatgcgtctcgaacgccgtatctccgccgtttataaagacattcccggcggccagctgcttggcccaacctacgactacacccatcgcctgctcgattttaccctgctggcaaacggcgaagcgccgacgctgaccaccgccgacagcgaacagcagccgtcgccgcacgttttcagcctgctggcgcgtcaggggctggcgaagtttgaagaggatagcggcgcacagccggatgacatcacccgcacgccgccggtttacccctgctcacgctcctcccgtttgcagcagttgatgcgcggcgacgaaggctatttgctggcgctggcctactccacccaacgcggttacgggcgcaatcacccgttcgcaggcga

SEQ ID NO: 135947 - DNA, 2448 bp, Homo sapiens; identical to SEQ ID NO: 121286

SEQ ID NO: 135948 - DNA, 3453 bp, Homo sapiens
ctatgcctgaccaatagcactctgttcctgatagcgccagccgttatggagcagttgaataagtaacgcctggcagcgtatcagcaactgatgagcagtagacggcacaggcaaaacgctggcagaaggtagcggtgccacaggcgtagtttctgcgtccagcgcccaggcacgggtttttgtcatcatcacccgtggttccagtgtcaattgcccttcaacaaaactgacaaagccagaaaccagacacacggggtcgtctgtttgttgcaaaagcgccgccatgcgttcaacggcataaggtgcgctggctgaggctggtaatgataacgtcagcacattatcttccccttcgccgctaatgacctgcgcatccagcgtctggcggctgctgtcccaaccgagcgaaatacactcagcgaccggcagaataaataagttatcgacctgattaagaagcagtacggtaaagccgtgctcctgccaaagtgacacaatcaaatcctgcatctcgagtcgcgttaaggcgtccagcgccccgagcggttcatcaagcaacaataatcccggtcgatgaatcaacgctcttgccagcgccactcgctgtttctgcccgccagaaagtgcggcaggccattcccctgcgcgattctccagtccgcagaccaacgctcgacgtgcggcatcgcgccactggcctttaaggcctaacccaacgttatcaatcaccgatttccacggtagcagacgcgcatcctgaaacatcattcgcgtgtcttcctgaatttcagaccagcggtgatggtgcccgctaacacatcgcctgcggttggcgtttccagacctgccagcaggcgcagcagggtacttttgccaccaccgctgacggcccaccaccgccacaaactgacctgccggaatatgtaaatccagttggttcaggacgatattttccgcgtaatgtttgcttactgcattgagcaacaatggcgtgcccgtggcctccttcaaatgataagccgggttccagcgcaaccagaggcgctctaacagctgcgcgctgacgtcagccagttggccgagcagggcgtaaagaataatagcgactaccaccacgtccgtttgcaaaaactcccgcgcattcatcgccagataaccaatgcctgaattggcagaaatggtttcggcaacaatcagcgtcagccacatcaggcccaacgcaaaacgcacgccgaccataattgagggcagggcaccaggcaggatcacatggataaacagcggtatgccggataatccatagctacgcgccatctccaccaacccgcgatcgatattacggatgccatgccaggtgttgatataaatggggaatagcgtaccgagcgccaccagaaagatttttgcggattcatcaatgccaaaccacaaaatcaccagcgggatcagcgccagatgcggcacgttgcgcaacatctgaattgaggtatccagcagccgttctccccagcgagatagcccgctaatcagtcccaaaatcaaccccagcgatccgccaattgaaaagccaatcagcgcccgccaggagctgatcgccagatgcatgcaaggtgatgccggcggcgaggccgacggacgccgctgggacggagccccaaaaagtggacagttaacacgaggcatataggtctgattccgatattcaattggagtcagaccttttaatttcaggctaattcttctgctgttgtagtattcaatatattccgtaacagcatccttcagttcgcttatattactgaactcatcaagataaaaacactccgactttaaggttccaaagaaacactccaccacagcattatccagacaattgccttttctggacatgctttgtttaataccatgttctttaaggatattttgatatcttctcatacgatactgccatccctggtcagagtgcagaacaggatgctcgtgaggattaagctttttgaatgcctgatcgagcatattctcaaccatgttcatcactggtctttccgaaaggctgtaagaaataacttcgttgttgaagagatctattactggagacaaatacagcttgcgcccattgactgcaaattcagtaacatcggtaacccacttctcgtttggccgcgtagccttgaaatctctacggtatcgtatcggctctatctcgttacagggatcggcgctgggacgtccgtggctacctccaacggagtaggtcgttgaggggaattccgcatttctcacacaatttataacgtaactgtcagaattgggtattattggggcaggttgtcgtgaaggaattcccgtcaccgcgtcttccagtcggctggcgcggtgtttcaccatcgccgacacctgcgcactctcttccaccagctcggcatttttctgggtgatcaggttaagctcatccactgcacgggtcaggctggaaagcccatcggcctgttccagcgttgaatggctaatctgggcgatcaactgggtgacgtttttcacctgctgcgaaccggattgcaccttatcagcactggcatcaatcagcttgcgaatatcgttggcagcattagcgctgcggctggctaaatgacgcacttcccctgccaccactgcaaaacctttgccctgttcgccggcacgcgccgcttccaccgccgcattcagggccagaatattggtctgaaacgcaatatcgttaatcagcgaagtaatggtgccaatgcgctgggtactgtcggcgatatcgtccattgtcttgatcaccgtggtcatcgcctccccaccctgcactgccgcattactggcagtgattgacagtttatcggcagccgacgccgtggcagagttctgtttcaccgacgccgccatttggttcatggtcgccaccgtttgctgaacgttatcaactgtctgctgggtatgttcgttcagttcatcggtgcctttcgccagcgtctcactgccatttctgacactggacacctggcttgagacatcgttaattagccaacggcacatcaggccaagttgccgttctccggtcgccaccttcagtgcctgatgggcaacattttctatcgggcgcacaatctgccacttcaagaacaggcgcttgccaacaataccactaacgcacagaggatatacgtcaccaccggggcagcaacaaaccaaagcatggccgccagcaagataaacatcagggtcatcactccacagcgcccgccagcgaagcggtaatgaaggcagtttacccagccagcctgtacgcaccaccaggcctttatgaatacgcttactggtacgtccggcgttcaacgctttgtacagcggctccaccgccgcgatctcttcatccgtcgcccgggtacgaatcgacatatagccactgatttttccctcgcgcaccat

SEQ ID NO: 135949 - DNA, 2491 bp, Homo sapiens
ttaaacacgaggcatataggtctgattccgatattcaattggagtcagaccttttaatttcaggctaattcttctgctgttgtagtattcaatatattccgtaacagcatccttcagttcgcttatattactgaactcatcaagataaaaacactccgactttaaggttccaaagaaacactccaccacagcattatccagacaattgccttttctggacatgctttgtttaataccatgttctttaaggatattttgatatcttctcatacgatactgccatccctggtcagagtgcagaacaggatgctcgtgaggattaagctttttgaatgcctgatcgagcatattctcaaccatgttcatcactggtctttccgaaaggctgtaagaaataacttcgttgttgaagagatctattactctcctctgtaagaagcggtatcgcttgaccttaatcgctgctttaagtgagagggttcccatcaggcgctgaacagctttatggttaatctgtttcccttctcgatgaagagacagcgttaccctacggtatacacgatcagaatggaacccgtaggcaatcgctacaccgtattcgccatcttccacgcggttgaggatgtaagccgtcgctacgcgggtatccggcgtgacgaggaacacaatggcgctgacggtggtaatggcgcgcacaaagctgtaaatcagcgccgagaggatcgccgggcgcagcagcggcagcaggatgtgcgtaatggtacgcagggaaccggcgcgcaggctgagtgaggcttcatcgagcgatttatcgatttggcccggtaatgactccaagtgcagctttcccttcaggcgggattcatacagcggccagccatccgtcatccatatcaccacgtcaaagggtgacagcaggctcataagacgccccagcgtcgccatagtgcgttcaccgaatacgtgcgcaacaaccgtcttccggagactgtcatacgcgtaaaacagccagcgctggcgcgatgttagccccgacatagccccactgttcgtccatttccgcgcagacgatgacgtcactgcccggctgtatgcgcgaggttaccgactgcggcctgagttttgttaagtgacgtaaaatcgtgttgaggccaacgcccataatgcgggctgttgcccggcatccaacgccattcatggccatatcaatgattttctggtgcgtaccgggttgagaagcggtgtaagtgaacgggccgttgatggtcatcgctgtttcgcctttattaaaggcagcttctgcgatggagtaatcggtgtctgcattcatgtgtttgtttttaatcaggtcaaccaggaaggtcagacccgctttcgcgccagcgttatccacgcccacgtctttaatgtcgtacttgccgttttcatacttgaacgcataacccccgtcagcagcaatcagcggccaggtgaagtacggttcttgcaggttgaacatcagcgcgctcttacctttcgctttcagttctttatccagcgccgggatctcttcccaggtttttggcgggttcggcagcagatctttgttataaatcagcgataacgctttgaatttcaggctaattcttctgctgttgtagtattcaatatattccgtaacagcatccttcagttcgcttatattactgaactcatcaagataaaaacactccgactttaaggttccaaagaaacactccaccacagcattatccagacaattgccttttctggacatgctttgtttaataccatgttctttaaggatattttgatatcttctcatacgatactgccatccctggtcagagtgcagaacaggatgctcgtgaggattaagctttttgaatgcctgatcgagcatattctcaaccatgttcatcactggtctttccgaaaggctgtaagaaataacttcgttgttgaagagatctattactggagacaaatacagcttgcgcccattgactgcaaattcagtaacatcggtaacccacttctcgtttggccgcgtagccttgaaatctctttggagaacattaggggcggtttgccctacctctcctctgtaagagcggtatcgcttgaccttaatcgccttgttgaacaggctggcattacgcattttctgttgcagttcgtcaggcattgctgccccgcgctgataatgccgggcgtagcgagcgaatacctgcggatgcgttgcccagtgttcgttgatttgcgacggaaattcgacaaaatcacgcggcgtgttggtgccggaaagcgtggcataacgctggcgggcaaaaaggccgtgcagcgtatgaccaaattcatggaataaggttatgacatcatcccagagtaacaacgcaggctcaccggcagcgggtttctgataattgcagacgttataaattaccggatgtgttttattaagcgttgattgctcaacaaaattgcccat

SEQ ID NO: 135950 - DNA, 1794 bp, Homo sapiens
atgttcatcagcgggctggacgatttttttattgatgtcgtctactgggtacgccgcattaaacgcaagttgagtgtttatcgccgctacccgcgaatgagttaccgcgaactgtataaaccagatgaaaaaccgttagcgattatggttccggcgtggaatgaaacgggcgtcatcggcaatatggccgagctggcggcgaccacgctcgactacgaaaactatcatatctttgttggcacctaccccaacgaccccgatactcagcgtgatgttgacgaagtgtgcgctcgcttcccgaatgtgcataaggtagtctgcgcgcgtcctggccccaccagcaaagccgactgtctgaacaacgtgctggacgccatcacccaatttgagcgtagcgccaatttcgcttttgctggttttattctgcatgacgccgaagatgtgatttcaccgatggaattgcgtctgttcaactatctggtcgagcgtaaagatctgattcagatcccggtgtatccgttcgaacgcgaatggacgcacttcaccagcatgacttacattgatgagttttcagagctgcatggcaaagatgttccggtgcgtgaagccctcgccggacaagtgcccagcgccagggtcggacctgtttcagccgcgcgccgtgaaccggctgtagctgaggatattttgatatcttctcatacgatactgccatccctggtcagagtgcagaacaggatgctcgtgaggattaagctttttgaatgcctgatcgagcatattctcaaccatgttcatcactggtctttccgaaaggctgtaagaaataacttcgttgttgaagagatctattactggagacaaatacagcttgcgcccattgactgcaaattcagtaacatcggtaacccacttctcgtttggccgcgtagccttgaaatctctttggagaacattaggggcggtttgccctacctctcctctgtaagagcggtatcgcttgaccttaatcgctgctttaagatcatctcggcacgttttggtgtcccccgaacccaggtcaggacatgggttgccctctatgaaaaacatggagaaaaaggtttaattcccaaacctaaaggcgttagtgctgatccagagttgcgtattaaggtcgtgaaagctgtgatcgagcagcacatgtcccttaatcaggctgctgctcactttatgcttgctggtagtggttctgtagccaggtggctgaaggtctatgaagagcgcggagaagctggtttacgcgcgctcaagattggcaccaaaagaaacattgcaatatcagttgatccagaaaaagcggcatcagcattggagctgtcaaaagaccgacgcattgaggatcttgaaaggcaagttcgatttcttgaaacgcggcttatgtatctaaaaaagctgaaagccttagctcatcccacgaaaaaggctgcggagataccgcgcagtacgttttattatcatctaaaggctctcagcaagcctgacaagtatgcggacgttaaaaagcgtattagtgagatttatcacgagaatagaggccgatacggataccgtagggtaacgctgtctcttcatcgagaagggaaacagattaaccataaagctgtgtcacggacggaccccattgtgttctccaagagagatttcaaggctacgcggccaaacgagaagtgggttaccgatgttactgaatttgcagtcaatgggcgcaagctgtatatgtctccagtaatagatctcttatcatcagcttcg

SEQ ID NO: 135951 - DNA, 668 bp, Homo sapiens
aggtctatgaagagcgcggagaagctggttacgcgcgctcaagattggcaccaaaagaaacattgcaatatcagttgatccagaaaaagcggcatcagcattggagctgtcaaaagaccgacgcattgaggatcttgaaaggcaagatcgatttgttgaaacgcggcttatgtatctaaaaaagctgaaagccttagctccttccccgaaaaaagtgaaagtactcaacgagttaaggcagttttatcctcttgatgagcttctcagggctgcggagataccgcgcagtacgttttattatcatttaaaggctctcagcaagcctgacaagtatgcggacgttaaaaagcgtattagtgagatttatcacgagaatagaggccgatacggataccgtagggtaacgctgtctcttcatcgagaagggaaacagattaaccataaagctgttcagcgcctgatgggaaccctctcacttaaagcagcgattaaggtcaagcgataccgctcttacagaggagaggtagggcaaaccgcccctaatgttctccaaagagatttcaaggctacgcggccaaacgagaagtgggttaccgatgttacaaaattagcagtcaatgggcgcaaccagtatttgtctacagtaatagatctccgggtaccgagct

SEQ ID NO: 135952 - DNA, 1535 bp, Homo sapiens
ggacgggcgtgaaggggtctatatcgagaagattgaaggcaagctggccgccatcgcctattcacgcatcggccgccgcctgccggtgcacgccaccgccatcggcaaggtgttgattgcctggctgggcgaggccgagctgaacgccctgctgtgtactgaccccaaaaagttggacagttaaacacgaggcatataggtctgattccgatattcaattggagtcagaccttttaatttcaggctaattcttctgctgttgtagtattcaatatattccgtaacagcatccttcagttcgcttatattactgaactcatcacagataaagaacactccgcactttaaggttccacaagaaacactccaccacacgcattatccagacaattgccttttctggacatgctttgtttaataccatgttctttaaggatattttgatatcttctcatacgatactgccatccctggtcagagtgcagaacaggatgctcgtgaggattaagctttttgaatgcctgatcgagcatattctcaaccatgttcatcactggtctttccgaaaggctgtaagaaataacttcgttgttgaagagatctattactggagacaaatacagcttgcgcccattgactgcaaattcagtaacatcggtaacccacttctcgtttggccgcgtagccttgaaatctctttggagaacattaggggcggtttgccctacctctcctctgtaagagcggtatcgcttgaccttaatcgctgctttaagtgagagggttcccatcaggcgctgaacagctttatggttaatctgtttcccttctcgatgaagagacagcgttaccctacggtatccgtatcggcctctattctcgtgataaatctcactaatacgctttttaacgtccgcatacttgtcaggcttgctgagagcctttagatgataataaaacgtactgcgcggtatctccgcagccctgagaagctcatcaagaggataaaactgccttagctcgttgagtactttcactttttcgtgggatgagctaaggctttcagcagcaagcataaagtgagcagcagcctgattaagggacatgtgctgctcgatcacagctttcacgaccttaatacgcaactctggatcagcactaacgcctttaggtttgggaattaaacctttttctccatgtttttcatagagggcaacccatgtcctgacctccatagcctgggctaagcgttcttctagtgccatgtaggtaaggaactgaggatccacatatgaaatagcttcagcaactcctagtccatctgcaaagccatcaaataggtccccttctcccatgagcaggccccagtccaacccaaagcccaactcactccacagctgctgaccatgaggaaacctaaggtcaacaccggagtcaggcaaataagccacccccccacccccacccgcatacacacttgttttatttaaactggccaatccacaactgccagaggaaagcccgtgggccttcat

SEQ ID NO: 135953 - DNA, 4222 bp, Homo sapiens
ctactctcttgcatgggatatttcaagctgttttactatgggcaaggagcagggaccaaaatgctgccagggcttaaaaagagccgtgatcagattaaacagaagttggagaagtggagggatgtgggccacacacgagaagaaaatgttgaaggaggctgagatttcaactggacttataggaggcataggtggatgcaggaggggctccacggatgtcagagaacaggattcaggagcagccttggtgctggccacgccgatctccggccctgcgttgatgtggacgccgcagtcggtctcgcgagagatggagctgcccacggtgttggtgacgcccacggtgagagcgccgcggtccttacagtagcgcagcgccaggagggtgtccgcggtctcgccttttaatttcaggctaattcttctgcgtgtgtagtattcaatatattccgtaacagcatccttcagttcgcttatattactgaactcatcaagataaaaacactccgactttaaggttccaaagaaacactccaccacagcattatccagacaattgccttttctggacatgctttgtttaataccatgttctttaaggatattttgatatcttctcatacgatactgccatccctggtcagagtgcagaacaggatgctcgtgaggattaagctttttgaatgcctgatcgagcatattctcaaccatgttcatcactggtctttccgaaaggctgtaagaaataacttcgttgttgaagagatctattactggagacaaatacagcttgcgcccattgactgcaaattcagttacatcggctaaccacttctcggttgggccgcgtagccttgaaatctctttggagaacattaggggcggtttgccctacctctcctctgtaagagcggtatcgcttgaccttaatcgctgctttaagtgagagggttcccatcaggcgctgaacagctttatggttaatctgtttcccttctcgatgaagagacagcgttaccctacggtatccgtatcggcctctattctcgtgataaatctcactaatacgctttttaacgtccgcatacttgtcaggcttgctgagagcctttagatgataataaaacgtactgcgcggtatctccgcagcctttttcgtgggatgagctaaggctttcagcttttttagatacataagccgcgtttcaagaaatcgaacttgcctttcaagatcctcaatgcgtcggtcttttgacagctccaatgctgatgccgctttttctggatcaactgatattgcaatgtttcttttggtgccaatcttgagcgcgcgtaaaccagcttctccgcgctcttcatagaccttcagccacctggctacagaaccactaccagcaagcataaagtgagcagcagcctgattaagggacatgtgctgctcgatcacagctttcacgaccttaatacgcaactctggatcagcactaacgcctttaggtttgggaattaaacctttttctccatgtttttcatagagggcaacccatgtcctgacctgggttcgggggacaccaaaacgtgccgagatgatcctgtaaccatcatcagttgtgaagtagtgattcacgacttcaaggcgcttttcaaaagggtattttggcttgaactgggaaagcaattcatctcctacagttaaaggacctggttcattttcatgagtttcagctctcttcaagatttcatctatatccatttcctggggctcttgttcttctccttcaggttccttaaaaagttcttcagcaccaaactttaaaatggctgataactcttctttattgaaaggagtagaacccttcagcagccaaggcagcccctgtttttgcatgtatttattacctacggcaacactgaagaataagtttggtccattccatttctctggatcctgtaagtgctccaagctcctagataaagctgctggcataaggaggatatagaggtcgttatgcccgggcaaaatgctggaacatagtcgctgaaccagcgtcggatcgtccgggtcatttattttttcataggagagagtgaactctgcaggaccttgccaccaaggtcccccccagggatgggatagagacaccccaggttcccgagcctgacacgggagcataagggtgatttccgatatgtcatttctttttgcttctcgccttgaggaaatacaagcccagggattctggtgggaggtgtttggatcactggggtgaatccctcttgaatggcttagcgccatcctcttggtgctagtcagttcttgctctgagttcatgtgagatctggttgtataaaagtgcatgacatcttctccctctctctccatgtcacatgctggttctccttcaccttctgccatgcttgtaagcttccttgaggcctcaccagaagcagatgcactagcatctgcttctgtacatacctgctttctttcttctggatcagaaggaatggatttgtgcaaaggtattaattcttcttcatgggagatgactagtttggcattcacctgtactcctgatattcggaatgttggacccttcacttttccgagtctaccacctgttcgttctgttcctgaagaactatcctttaatgctttaatgcaaccattatgtaccaattctcccagtcgtctaaggtctgtttctgacttatcaactaactcagcatctcgagcaattgcatctaattttctccattgcttaatttgttcaggatttgtatactcttttagacattctgtgatatggtctccaatttttattaaacattgtctagtatgctctagttgttctctttctgaaaggcctttctcaggcctatcaagttgtttcaaagctgctttaacaggcctcattctttctttacatttgcaatctttaaaaggagtggtttttgattggttcctgctaaaatactcatcaatgcatgcttgaaactttttggaaatgagagctccatcttcccagctgcactctgagtatggaaggccctgccatttgcagtaataatcaggataaccagctgctgacttttgattggaatgagcaattatacgttccactatttgatactgtttatgtagatcatctgtaagttcttgctggcaattataatattccacatcttctggagaggcatttttcaaccatctttttgtttcctgatcttttttcttataattatccaattttttcattcctctaacattctgctgcttgagggtttcttctgtctcccaagtgttgtggatatgggaccatcctttccatttaattaaatactgaatctctcctggttctttgtttttttcaaagcctgcatttgggtcaccatctgcttcaactgcatagatggttgtagtagcaccagtagctccttttctcccaatccgacaatccataaatctttctatggtttcaaattcctcttcctcaggttgaggaacatcctctccacagacttccagtaggtcatcagaatctgttttcatttcttcatcctccttatagctaacattaacagttgcttggcgacgagaacttcttttatcattatcataatcttcttcatcatcatcctctctcagatgaatccatctgtctctttttttgtccaagaatcttctttccattttttgacttagatctcgccccttggtgcttccatcatgaaaaggaagacacaactccgcaagggcatcgacagcgataatgccgcaggaccgccgcttcccgtacaccacgcaaacgaacccaaaccgcacccacgcacgcaacaaacaaaccacaaaagccgcaaacaagcacagacagaggaaaccggagagaaccggaaaagaccgaacccagctagcacctccgaccaaacccgcaggaaccggggcgacgcggacagacacaacaagacaccagcgccaagacaccaaccacccaagccccaaggggaaccgacgacaccccaaaaacaataaccctagtttatcctctcttttggatgctccaggggtcctctgtaccatccaagagctggggtacatgaggtagagaaagtgaggcatccctctttctttatttatatccctgagtcccggtgaccacaacaccgggtggtcaccagcacacgggtgctgcccatgagtgtcaaagcagctttcacccat

SEQ ID NO: 135954 - DNA, 5491 bp, Homo sapiens
atggagagccacacagtcacagactacaactttggcagacttttaaatgaaagttttgccaactgtgaaacagacaggaattacctggggatcttcaaatgcggattctggctcagtggaacccgcaagtctgcatttcttacaaaatctcaggtgacgctgacgcgacctgtggaccacacattaaggaatgaggttttaggttctaccaagtaccaggttcccggctaccggagaaaaacaaacacaaatttggaagaatccaatgtactaataggctatgatgttgcacctggtgggggaaaacagattgacggcaagaaggcggagggccgcgagctcatggtcccagtggcaggacgtccgttatgcaggtccagcagtatggagttgctcctgctcctgcccctccacatccccagggaacagatgcttctggcagatgcctactggaacctccatcagtcgtgccaatcaaaaacatctccagatactgccaaatgtcctctggacaggtgcccaagagtatttaaaagccaaagctacaaggccagcacatttgatggattgtctatggatactgaagtcatcaagagtaatggcaagcagggatggagacaaagacggttagcaaacatgaaagacatagacaagcagacgcaggctgccacgttcgttctttctcagggtatgcagaggtcaggcaatgatcgcattatcctggtgacgggagccagcgatggtattggtcgtgaagccgcgatgacgtatgcacgctatggtgcgacagtgattctgttgggccgtaatgaagaaaaattacgtcaggtagccagccacataaacgaagaaactgggcgtcagccacagtggtttattctcgatttgctgacctgcacgtccgaaaattgccaacaactggcacagcgcattgccgttaattatccgcgtctggatggtgttttgcataatgccggattgctcggcgatgtttgcccaatgagcgaacaaaatccgcaggtctggcaggacgtcatgcagctcttccgcgctggcattattaatgctgacccgggtgccttcttcgtcactggctttcgccggtactgctgctttactttgtgctgcaggagcttccgctttggtttctaccgccgtcggtttcgccacagaagctgccgccagcgcgctatgagacattccggcacaggccagggacagggtaatgagcagtgctttaattccgtgtttcatactgttttctccttgtttgttaacagtggaatcaccttaacggcagtgaaaacagtaaacaaatggcaatgttcagaaatggaaaaggccgcgaaagcgaccttttcttgttacagctgcaacgcatttttttgcgaggcggcttcaggattattgctgttccagcgcatcgccaattttgattttcgcctctttacgcaggttactcatcagagcttcaaagacgatttgggtataaaaatggaaactaccaagccttcattccaggacgtactggaatttgttcgtctgttccgtcgtaagaacaaactgcaacgtgaaattcaggacgttgagaaaaagatccgtgacaaccagaagcgcgtcctgctgctggacaacctgagcgattacatcaagccggggatgagcgttgaagcaatccagggcatcatcgccagcatgaaaggtgactatgaagatcgcgttgacgattacatcatcaaaaatgccgagctctccaaagaacgccgcgatatctccaaaaagctgaaagctatgggcgaaatgaaaaacggcgaagcgaaccgtaaagaacgatcttctatgttccgcgatcggccattaaaacgaatgaagtcaaaacgtgacgacgattcttatgacgaggatgtcgaagatgatgagggcgttggtgaggttcgtgttcaccgcgtgaatcatgccccggctaacgctcaggagcatgaggctgctcgtccgtcgccgcaacaccagtaccaaccgccttatgcgtctgcgcagccgcgtcaaccggtccagcagccgcctgaagcgcaggtaccgccgcaacatgctccgcatccagcgcagccggtgcagcagcctgcctatcagccgcagcctgaacagccgttgcagcagccagtttcgccacaggtcgcgccagcgccgcagcctgtgcattcagcaccgcaaccggcacaacaggctttccagcctgcagaacccgtagcggcaccacagcctgagcctgtagcggaacctgctccagttatggataaaccgaagcgcaaagaagcggtgattatcatgaacgtcgcggcgcatcacggtagcgagctaaacggtgaactgcttcttaacagcattcaacaagcgggcttcatttttggcgatatgaatatttaccatcgtcatcttagcccggatggcaagcgcccggcgttattcagcctggcgaatatggtgaaaaccggacctttgatcctgaatgaagatttactactccgcccgcgacgcgacaagccgctggtcaaaatcaactgcgctgccatccccgccagtcttctggaaagtgagttattcggtcatgacaaaggggcgtttactggtgcgattaatacccatcgtggtcggttttgaaattgccgatggcggcacgttgtttctcgatgaaattggcgatctgccgttagaacttcagcctaaactgctgcgcgtattgcaggagcgggagattgagcgtctcggcgggagtagaacgatcccggtgaatgtcagagtcattgccgccaccaaccgtgatttgtggcaaatggttgaagatcgccagtttcgcagcgatctcttttatcgcctgaatgtcttcccactggaattgccgccgctacgcgaccgtccggaagatatccctcttttagcaaaacatttcacgcaaaaaatggcgcgccatatgaatcgcgcaattgacgccatcccgaccgaggcactacgccagttgatgtcgtgggattggccgggcaacgtgcgcgacgtggaaaacgtgattgagcgggcgcagttactgctgacgctaaatgaagattcagcgcttcgcagttcaaatggcgcagtaaactgcacccgacgacgccagagaatgacgaagaagaacgtcagcgcattgttcaggtattgcgagaaaccaatggcattgttgccgggccccgtggcgcacgacgcgattagggatgaagcgcaccacgctgctgtcacgaatgcagcggctggggatctcggagtatgcatgagaaacaaactctctttcgacttgcagttgagcgccagaaaagcggcaatcgctgaacggattgccgcccataaaattgcccgcagtaaagtgtcggtctttttaatggcgatgtccgctggcgtgtttatggcgatcggatttactttttacctttccgttatcgccgatgccccgtcttcacaggcattaacccatctggtgggcggcctttgctttacactcggctttattttgctggcggtttgcggcaccagcctgttcacctcgtcggtaatgacggtgatggcaaaaagtcggggcgttattagttggcgaacttggctgattaacgcacttctggtggcctgcggtaatctggcagctgaaagccttagctcatcccacgaaaaagtgaaagtactcaacgagctaaggcagttttatcctcttgatgagcttctcagggctgcggagataccgcgcagtacgttttattatcatctaaaggctctcagcaagcctgacaagtatgcggacgttaaaaagcgtattagtgagatttatcacgagaatagaggccgatacggataccgtagggtaacgctgtctcttcatcgagaagggaaacagattaaccataaagctgttcagcgcctgatgggaaccctctcacttaaagcagcgattaaggtcaagcgataccgctcttacagaggagaggtagggcaaaccgcccctaatgttctccaaagagatttcaaggctacgcggccaaacgagaagtgggttaccgatgttactgaatttgcagtcaatgggcgcaagctgtatttgtctccagtaatagatctcttcaacaacgaagttatttcttacagcctttcggaaagaccagtgatgaacatggttgagaatatgctcgatcaggcattcaaaaagcttaatcctcacgagcatcctgttctgcactctgaccagggatggcagtatcgtatgagaagatatcaaaatatccttaaagaacatggtattaaacaaagcatgtccagaaaaggcaattgtctggataatgctgtgcactggatgtccgtgctggcgcacagccaaccggctgaactgtttgcacgcctgttcgcgctaaacattaccggcgactatgatgggatccgcgccgctgaaactggcctggtacagattcaggcgcggatgggcggcaccggcgaacgtttttttgccggcgacgccacgctgacccgcgccgccgtgcgcctgactgacggcacgctcggctacagctgggtgcaggggcgtgataaacagcacgccgaacgctgcgcgctgattgacgcgctgatgcagcaatctcgccactttcaaaacttatcagaaacccttattgccccgctggacgctgaccgtatggcacgcattgccgcacgccaggccgaagtgaacgccagccgggtcgacttctttacgatgctcaaacgcggctggcaaccgctgaatatcgccaccaccagcgtgctgctgacgctggccgataacgacacgccggtgtggctttctaccccattaaataacgatatcgtcaaccagagccctgcgttttcataccaacgcgccgctggtcgccagcctgagcggcggacgcatgttgcgccttactggtgcgggtattgccgaagaacgaatgatcgctccgcagctgccggagtgcattctgcacgaactcaccgagcgcccgcatccgttcccgctcggcatcgacctgatcctgacctgtggcgagcgcctgctggctattccgcgaaccactcatgtggaggtgtgctgatgtacgttgccgtgaaagggggcgagaaggcgatcgacgccgcccacgccctgcaagagagccgacgccgaggcgataccgatttgcccgaactgagcgtcgcccagattgaacagcagcttaacctcgcggtagatcgcgtgatgaccgaaggcggcattgccgaccgcgaactggcggcgctggcgctgaaacaggccagcggcgataacgttgaagcgattttcctgctgcgcgcctaccgcaccacgttggcgaagctcttttttccgtggattgaaaaacaggggctaagtatcgggataatcattctgacgattggcgttatggcccccatcgccagcgggacgtaccgccctcaaccttga

SEQ ID NO: 135955 - DNA, 282 bp, Homo sapiens
ccctggcgccccaatacgcaaaccgcctttccccgcgcgttggccgattcattaatgcagctggcacgacaggtttcccgactggaaagcgggcagtgagcgcaacgcaattaatgtgagttagctcactcattaggcaccccaggctttacactttatgcttccggctcgtatgttgtgtggaattgtgagcggataacaatttcacacaggacagctatgaccatgattacgccaagctctaatacgtgatggtacgcctgcaggtaccggtccggaatt

SEQ ID NO: 135956 - DNA, 928 bp, Homo sapiens
taaggcggcagggttcgggaacaggagagcgcacgagggagcttccagggggaaacgcctggtatctttatagtcctgtcgggtttcgccacctcttgacttgagcgtcgatttttgtgatgctcgtcaggggggcggagcctatggaaaaacgccagcaacgcggcctttttacggttcctggccttttgctggccttttgctcacatgttctttcctgcgttaatcccctgattcctgtggataacccgtattacccgcctttgagtgagctgatacccgctccgccgcagccgaacgaccgagcgcagcgagtcagtgagcgaggaagcggaagagcgcccaatacgcaaaccgcctctccccgcgcgttggccgattcattaatgcagctggcacgaacaggtttcccgactggaaagcgggcagtgagcgcaacgcaattaatgtgaggttagctcactcattaggcacccccaggctttacactttatgcttccggcctcgtatgttgtgtggaattgtgagcggataacaatttcacacaggaaacagctatgaccatgattacgccaagctctaatacgactcactatagggaatttggccctcgaggccaagaattcggcacgaggttcattttctaggaacaaaataccctcttagacattaaaaagccgcatgcctgttccctcagctatagttaactggaccatggtggtacaactgactcaacccttctctaagcagggatttgtaattgggatttataatgaaattcctgatctgggaaaacgggaggctgggaatgctatgtctaggtcatcagcggagaaagttggtttgtagagaatgaacaagaatgaaacctaagtgcaaagaaaataaagattatcctgctttaatagttcaaaaaaaaaaaaaaaaa

SEQ ID NO: 135957 - DNA, 2483 bp, Homo sapiens
  misc_feature (1)...(2483): n = a,t,c or g
aaaccaccgctaccagcggtggtttgtttggccggatccaagagctaccaactcttttttccgaaggtaactggtttcagcagagcgcagataccaaaatactgttcttctagtgtagccgtaggataggccaccactttcaagaactctgtagcaccgcctacatacctcgctctgctaatcctgtttaccagtggctgctgccagtggcgataagtcgtgtcttacccgggttggactcaagacgatagttaccggataaggcgcagcggtcgggctgaacggggggttcgtgcacacagcccagcttggagcgaacgacctacaccgaactgagatacctacagcgtgagctatgagataagcgccacgcttcccgaagggagaaaggcggacaaggtatccggttaagcggcagggtcggaacaggagagcgcacgagggagttttccagggggaaacgcctggtatctttataggtcctgtcgggtttcgccacctctgacttgaacgtcgaatttttgtgatgctcgtccaggggggcggagcctatggaaaaacgccagcaacgcggcctttttacggttcctggccttttgctggccttttgctcacatgttctttcctgcgttatccccttgattcttgtggataaccggtattaccgcctttgagtgagcttgataccgctcgccgcagccgaacgaccgagcgcagcgagtcagtgagcgaggaagcggaagagcgcccaatacgcaaaccgcctctccccgccgcgttggccgattcattaatgcagagcttgcaattcgcgcgcgaaggcgaagcggcatttacgttgacaccatcgaatggcgcaaaacctttcgcggtatggcaatgataagcgcccggaagagagtcaattcagggtggtgaatgtgaaaccagtaacgttatacgatgtcgcagagtatgccggtgtctcttatcagaccgtttcccgcgtggtgaaccaggccagccacgtttcttgcgaaaacgcgggaaaaaagtggaagcggcgatggcggagctgaattacattcccaaccgcgtggcacaacaactggcgggcaaacagtcgttgctgattggcgttgccacctccagtctggccctgcacggcgccgtcgcaaattgtcgcggcgattaaatctcgcgccgatcaactgggtgccagcgtggtggtgtcgatggtatttaagaagcgggctcgttgcctgtcatacagcgccgcacaatcttcttggcgcaaacggggtccagctgggctgatcattaactatccgctggatgacccaggatgccattgctgtggaagcttgcctgcactaatgttccggcgttatttcttgatgtctctgaccagacacccatccaacagtattattttctcccatgaagacggtacgcgactgggcgtggagcatcttggtcgcattgggtcacccagcaaatcggcgctgttagcgggcccattaagttctgtctcgggcgcgtctgcgtctggctggcttggcataattttctcactggcaattcaaattcagccgatagcgggaacggggaaggcgactggagtgccatgtccggttttcaacaaacccctgcaaatgctgaatgagggcatcgttccccactggcgattgctggttgcccaacgatccagaatggcgctgggccgcaatgcgccgccattacncggagtccgggctgcgcgttggtgccggatatcctccgggtaggtgggaatacgacgatacccgaagaccagctcatgttatatccccgcgctttaaccacccatcaaacaggattttcgcctgcttggggcaaaaccagcgtggaccgctttgctgcaactctctcagggccaggcggtgaagggcaatacagctgttgcccgtctcacttggtgaaaagaaaaaccacccttggcgcccaatacgcaaaccgccctctccccgcgcgttgncccgattccattaaatgcagctggcagcgacaggtttcccgactggaaagcgggcagtgagcgcaacgcaattaatgtgagttagctcactcattaggcacccccaggctttacactttatgcttccggctcggtatgttgtgtggaattgtgagcggataacaatttcacacaggaaacagncttatgacccatgattacgcccaagctctaatcacgcatcactatagggaaagcgtggtacgcctgccaggtaccggtcctggaattcccgggtcgacccacgcgtccgctttatagtactgacaacacattagaatcaaatgggaaactctacagagtaataaacagaaatactatatgactgagcctaacctttaaaaaacaaaaacattctctggagggagaccccatagactgtgttttaaaaaaaggtcctctaagtgattttgatgcaagatctggcttaaaaaaaaaaaagtcgacg

SEQ ID NO: 135958 - DNA, 1201 bp, Homo sapiens; identical to SEQ ID NO: 132062

SEQ ID NO: 135959 - DNA, 492 bp, Homo sapiens
atgggttgtggtgcctgcgtcgtcatcgttgggcgatcctttatgctctatcattatgctttgtctgtaccattgcctgttgattccctgccgttatacgacgttgactgccagacaaatggcaatctggaatatgacacctattcccaaccggaatggaaacataacttgttcgaccattatctggcggtgctttaccgctttaaagatgaaagtggcaaagaacaatttagcggcgcagtggtgaaaacgcgtgaagcaacgccgggtaaagaaatagaagcgatcactcgccgaatgcttgatttcagcccacgactgaaaaaactcgcgggtgtgccatgtcagaacatctcatccaacgtgctagaggagtccgccatctccgacgacatcctgtcgcccgacgaggagggcttctgctccgggaagcacttcactgagctggggctggtagggttgctggaacaggcagccggctacttcaccatg

SEQ ID NO: 135960 - DNA, 1306 bp, Homo sapiens
ttatgtgtttaacaactcatatttcttaatcttgcgatagagcgtagcaatgccgatgcccagttcatcagcaacttgcttcttgctgttatgacgtgaaagcgcctcgcggatcatttgcttttccatctcctccagcgccgtgccgcccgcatcatcgagtgacaggtgcgcctcactgacctctgttacatcactttgctccgttgtgccattattcagcagatttggcggcaatagcgtgctgtcgataacttcacctgaaggaaccacgttaaccagatattccatcaaattgcttaactcgcgcaggtttccgggccaacgatgcttacgcaatatttcgacgacatcgggagcaatgccaggataaaccgatcccagacgacgggtatgcagatgtaaaaagtaatgcaccaatagttcaatatcttcctgacgttcacgcagcggtggcagagttatcgggataacattaagtcggtagaagagatcttcgcggaatttaccttcggcaatgaactggggcaaattctgattagttgcagaaatgatgcgaatgtcgacttgtattgggctactggcaccaatcggcagaatttcacgtgcctcaatagcgcgcagtaatttagcctgcaacattaatggcatatcacctatttcatcgagaaacagcgtgcccgtattcgccgcctgaatcaaccctgttttaccgttggcagaagcgccagtaaatgcacctttaacataaccgaacagttcgctctccagaagctgctccggaatcgcggcacagttgatagcaataaagggtttattccgtcttccgctcaacttatggattgcacgggcgacgacttctttacccgtgccgctttcaccaaccaccataacgctggatgggctgggtgcaatacggctaatgagtcgttttaattgccgcataacacggcactcgccaaccaattgttcaatatgcggttcatcaggtgcatttgctacagaaaaactggtatgcgattggtgaaacgccattaaaaataattggtcgcccctgaatgttatgcaattgaccaaggattaatttccttttatcggcccattgaaacaatatggctggatatgggccatgggtaaaattactctcaaatgttaatggtctgaaacggataggggtgccgaataatattattttgcacaacaccaagtgtttttaaggcagtctgattaacaaactgaacccgattttcatcatctacaactaatacgccctgatccatattatcgmtcatggtcgaaaatattt

SEQ ID NO: 135961 - DNA, 1716 bp, Homo sapiens
atgctgtgtacaaagtgggataaactgggcttggagaaaaacgcgggtaaaaataaaaacgcgtacaaatggtatgggtggcccgcaaatgcacctgatgaaccgcatattgaacaattggttggcgagtgccgtgttatgcggcaattaaaacgactcattagccgtattgcacccagcccatccagcgttatggtggttggtgaaagcggcacggcgatacctgttgtatctcatgcagaatttaaaggcggttttgcagatatcggcgtgcattatctggactggaccagccggactaccgaaaaatcgtcgaccaaatcacacaaagatgattttggttatcttgaatttgaaggtggcgctaactttagttggggagaaatgtacgggttcttcgactgggaaaacttctataacggtcgccataataaaccaggtagcgagcagcgttatacctttaaaaataccaagccgtatttatcctgggttgacaccggatttagtctctacttgcatgcgtatggcacctacggttctgcgaatcgcgtgaatttcctcgacgatatggttcttggccgggttcgggttccaattttaaccggcgggggggtggggggttcaaacccgttctttgctaagccgttataccagatcaaaaccttattacacttggcgacaacggctatgttcgccggctgggttgcaggttacaactttatgctgggcagcgagaaattcactcttaccaactggaacgagtacgagtttgaccgtgacgctacctatgcagcggatttcctgccgttatacgacgttgactgccaggacaatggcaatctggaatatgacacctattcccaaccggaatggaaacataacttgttcgaccattatctggcggtgctttaccgctttaaagatgaaagtggcaaagaacaatttagcggcgcagtggtgaaaacgcgtgaagcaacgccgggtaaagaaatagaagcgatcactcgccgaatgcttgatttcagcccacgactgaaaaaactcgcggactgtccatccccacggcctgtgtttgaggccctgtgcatctgctctatgttagacgccttacttctcctttgtccactggactatcatgcctcctgtgacaattacagctatgcccttctggacccccaaggctttcctctaccacatcgccgactctggggcccctacatcgatgtggacgtccctatgctccacttaatacagcatgcttgggcacaagatgcgctactgtcttgcctatactctgacttactgtacatgtcctccttcccatatcctgcgggtaccctgaccagactgatgggcgtgacgagctacaaccataagaacacactgctgacttactgcatcacactcatgagcacaatcagattcgcttatgacggcgatgaagaaattgcgatgaaatatacggactttctcaaaggagagttatcaatgaatattcgtccattgcatgatcgcgtgatcgtcaagcgtaaagaagttgaaactaaatctgctggcggcatcgttctgaccggctctgcatcggctaaatccacccgcggcgaagtgctggctgtcggcaatggccgtatccttgaaaatggcgaagtgaaaccgctggatgtgaaaattggcgacatcgtatttttcaacgatggctaccggggtgaaatctga

SEQ ID NO: 135962 - DNA, 2835 bp, Homo sapiens
atgattgatgtcttagggccggagaaacgcagacggcgtaccacacaggaaaagatcgcaattgttcagcagagctttgaaccggggatgacggtctccctcgttgcccggcaacatggtgtagcagccagccagttatttctctggcgtaagcaataccaggaaggaagtcttactgctgtcgccgccggagaacaggttgttcctgcctctgaacttgctgccgccatgaagcagattaaagaactccagcgcctgctcggcaagaaaacgatggaaaatgaactcctcaaagaagccgttgaatatggacgggcaaaaaagtggatagcgcacgcgcccttattgcccggggatggggaacgaaccgatgactggatggatggccgccgcagtcgtcacactgatgatacggatgtgcttctccgtatacaccatgttatcggagagctgccaacgtatggttatcgtcgggtatgggcgctgcttcgcagacaggcagaacttgatggtatgcctgcgatcaatgccaaacgtgtttaccggatcatgcgccagaatgcgctgttgcttgagcgaaaacctgctgtaccgccatcgaaacgggcacatacaggcagagtggccgtgaaagaaagcaatcagcgatggtgctctgacgggttcgagttctgctgtgataacggagagagactgcgtgtcacgttcgcgctggactgctgtgatcgtgaggcactgcactgggcggtcactaccggcggcttcaacagtgaaacagtacaggacgtcatgctgggagcggtggaacgccgcttcggcaacgatcttccgtcgtctccagtggagtggctgacggataatggttcatgctaccgggctaatgaaacacgccagttcgcccggatgttgggacttgaaccgaagaacacggcggtgcggagtccggagagtaacggaatagcagagagcttcgtgaaaacgataaagcgtgactacatcagtatcatgcccaaaccagacgggttaacggcagcaaagaaccttgcagaggcgttcgagcattataacgaatggcatccgcatagtcttttgcttaagttgcatgatttgctgctctgtcatatcagtcgtactggcttcattcttgtcgggcaatggtggaagcactttatattcataattcaccggcgaccaggtagcccactcacctgttgccacatccaccagcgtgaaacgtaccaggtagcgcagggagatagcgtcaagcacagtggggatgattcaggtaatcaagtcatcccgcccccccgagaaggtgacgataaaaccgatggtccacagcatcgcagaatggaacacgatgcggccctgatacatggtgaacagccagttgaagatcttcaccccggtcgggatggcgataatcattgtggtgataccaaagaaggcgtttacgttcgcgcccgcacccatcgtaaagaagtggtgcagccaaacgatgaacgacagcacggtgatacagacggttgcccataccagcgaggtataaccaaacagacgtttacgcgagaaggttgccgcaatttcggagaacacaccgaaaacaggcaggatcaggatgtaaacttccgggtggccccaggcccaaatcaggttgatgtacatcatcatgttgccacccatatcgttggtaaagaaatgggtgcccagatagcgatccagggtcaacaacgcgacggtaaccgtcagaattgggaaggaagcaataatcaaatggtaacgaagaagttgataccgctgaataccaaccaagaacctaaacccgttaatattatttccattcttcccgcaaaagttgccgtagacaactcccaaaataaacggaacgcacaagcttccggcgcgcttattggcgcagtcgctggcggtgttatcggccacaacgtcgggtctggcagcaattccggaccgacggcaggtgcagttggcggcggagctgtaggcgcggcagcgggttctatggtgaatgataaaaccttagtggaaggtgtttctttaacctataaggaaggcaccaaagtgtatacctctacccagctatccggctatcgcctcatcattgcaggatcaactctctgctgtcgcagaagcggaacagcaagaccgttttcaagattccgttgggctgctttccgacggcattgtccgcaaaccattaattgccgtgtgctgccggtgtttgccgccggtagcgttatcgctgcgctttccgactccatctgggaaattattctgggccgggcgctacaaggctctggagcaattgccgccgccgttatggcgctgctttccgatctcacgcgcgaacaaaaccgcaccaaagcgatggcgtttatcggcgtgagctttggcattacctttgccattgcgatggtgcttggcccgatcatcactcacaaacttgggctgcacgcgctgttctggatgatcgctattctggcaacgaccggcattgcgttgaccatttgggttgtgcccaacagtagcactcacgtacttaatcgtgagtccggaatggtgaaaggcagtttcagtaaagtgctggcggaaccgcggctgctgaaactcaactttggcattatgtgtctgcatattttgctgatgtcgacgtttgttgccctgcccggacaactggctgatgcagggttcccggcggctgaacactggaaggtctatctggcgacaatgctaatcgcctttggctcggtcgtgcctttcattatttacgctgaagttaagcgcaaaatgaagcaagtctttgtcttctggtcttag

SEQ ID NO: 135963 - DNA, 1377 bp, Homo sapiens
atgtcgactttaccaacgccacatctgtacatcaagactcttctattgcattccggcgactctcagcaaaaagtttacatccgcgccacgcccgcgtctcttcccgcggccgctgcctctccacaccgaagacccccgataacattcgccacgctcacacataaactatgctcagtacttcgccatctatcatcctcagctattaaagtgttccctacagtactgaggctccagccgcgttatgctcctatgaaactaaatcctcgactgacgatacccatccggaactcgccgtgtcttcaggcccacgggacccagcaccctccgccaggtctgttctctaatcagttgtcacataaggggctggttcgcgactcatccagcgctttcctattcagagttcaaatccaacgtataagcccttgtattcagcttattgttcggtcagcgtttgccagcggccagctgtccccacacatcaagtcttttggcagactcaatattttaaatcgtgaattgaccgaattgaggcccttggtatttttcgttcggcggctgtttagggatctgcagcatatcagggcgtgtaatatgagagacgccagaacagacgtggcaaagcaagctgccaccttgaaacttgaagacacagagacatccaaaaagttacatcaatggagatctactcaccaggagcagaaggccctggagccacaaactgtaaggcctggtattcatgcacagaagcggctgcgcgttggccgattcattaagccagctggcacgacaggtttcccgactggaaagcgggcatgtcatcaagaagcccgaaacattccccctcatcgtcaaagccgttttctggcgtccagaggtttactcgcagaactgatgttcatgctgtatggcattggcgaattgccggaaatcgtcaccctgccgaaaggtaaaccggttttcagtgataaaaatttgccttcgttttccatttcctatgccgggaatatggttggcgtggcgttaacaaccgaaggtgaatgtggcctcgatatggaactacagcgtgcgacgcgcgggtttcatagcccacacgcgcccgataaccacaccttttccagcaatgaatcgctatggatcagtaaacaaaacgatcctaacgaagcgcgggcgcagctcatcacgctgcgccgaagcgtgctaaaactaaccggagatattaatttcttcatcagaaccgatagtcccgctgtcattgaaatgagctgtgtggtgaatattaggagcatccgtgctcagccacaccctcggaaactgctgcaaatgctgccattgacaggaggcagtgacactactggattgctgtcacctgagccttag

SEQ ID NO: 135964 - DNA, 2001 bp, Homo sapiens
tcacccggacaacccggcattggtaaaccagggttctggtagaacgggtgaattggtcaggttgtagatgtcgatacctgcttcacccggatacatctcgtcttcgttaactttgataacgatacgggaagcatccacgtactgaacgacaccaccacgtttagctaccgcagttacaccggagtcaacggcaacagcacgttccataccagtaccaaccagcggcttatcagcgcgcagagtcggaacggcctgacgttgcatgttcgcacccatcaatgcacggttggcgtcatcgtgttccaggaacgggatcagggacgcaccgacggataccacctgctgggtggatacgtccatgtagtcaacctggtcgcggctgaacaagctggattcgcctttgctacggcaagttaccaggtcttctacgaagtggccttcttcatccaagttggagttcgcctgggcgataacgtagttgccttcttcgatagcagacaggtagtgaatttcgtcagttacaacaccgtcggtcactttacgatacggagtctcaaggaagccgtattcgttagtctgtgcgtacacggacagagagttgatcagaccgatgttcggaccttcaggggtttcgattggacagacgcgaccgtagtgagtcgggtgtacgtctcgaacttcgaagcctgcacgttcacgggtcagaccgcctgggccgagtgcggagatacgacgtttgtgcgtaatctcagacagcgggttgttctggtccataaactgagacagctggctggaaccgaagaactctttcactgctgcggaagtcaggatcctcaacagccatgggggtggaacctccgggtcaatccgctggctcaaacgacgggtcatgcccatgaagcccagcgcaaacagtggcataaaggcaacgaagaagccgatgatccagaaccagaacgcgcgtttaccccaggtttcgttcagtttgaaaccgaacgctttaggccaccagtaggtcatccctgcgaagcagccgaagaccacgccgccgatgatcacgttatggaagtgcgcaatcaggaacaggctgttatgcagaacgaagtccgcgcccggtacggccagcagcacgccagtcatcccgcccaccgagaaggtgacgataaaaccgatggtccacagcatcgcagaatggaacacgatgcggccctgatacatggtgaacagccagttgaagatcttcaccccggtcgggatggcgataatcattgtggtgataccaaagaaggcgtttacgttcgcgcccgcacccatcgtaaagaagtggtgcagccaaacgatgaacgacagcacggtgatacagacggttgcccataccagcgaggtataaccaaacagacgtttacgcgagaaggttgccgcaatttcggagaacacaccgaaaacaggcaggatcaggatgtaaacttccgggtggccccaggcccaaatcaggttgatgtacatcatcatgttgccacccatatcgttggtaaagaaatgggtgcccagatagcgatccagggtcaacacgcgacgtaccgtcagaatgggaaggatctgtagagtaaccgtggggtggcgagcggtaatccccagtgccgtcatcgcgcccatcgacgcgccaccgactgccagacggtcatcaagcagccagttttcttcggctattgccgcacgtaaagtagtgaattcctgcatactttgtagcaagatttgccagaattgatttaaccgccgcgctgcgtcaccactaaaacggctaccgtgatcgggcgcatccggcatgatcacccgcaaaccagcctgcgccagcgcaacggcaaaatagctatacaccagactggatgaagtaaagccgtgataaaaaattacgcacggtaacggggtatctttttgcccgacaggataagcatgaagaacgggaatatctgccagctcgcgtgattctatttcaatcat

SEQ ID NO: 135965 - DNA, 2511 bp, Homo sapiens
atgggcagcttatgccccgttcttgatgcggcttacgaattcccgcttggaccaagataccgtgaccgtttgatcttgtttcaacgccagccgtggcattgccggaagtgtggcccgcatcttgaatgggtaagtcatggtgaacatgcggaacaagagtcggcattacaggcagctatcgcacagttaaaaatgggcaaaattgtcgccatcaaagggattggcggatttcatcttgcctgcgatgcacgtaacagtaacgcggtggcgacacttcgggcgcgcaaacatcgcccggcgaaaccgctggcggtcatgttgccagtggctgacggtttaccagacgctgcgcgccagttgcttaccacgcccgccgcgccgattgtgctggtggataaaaaatacgttcctgagctttgtgatgatatcgcccctgaccttaacgaagtcggggtaatgttgcctgcgaacccgctccagcatttgctgttacaggaactgcaatgcccgctggtgatgacctccggcaacctgagcggtaaaccaccagctatcagcaacgaacaggcgctggcggatttgcagggcattgccgacggattcttgatacataaccgcgacatcgtgcagcggatggatgattcggtggtgcgcgaaagcggcgaaatgctgcgccgttcgcgggggccaggtggtaaacttcggcgccacaagggtgctgaagaaaccctgtgtgggaacacgcgggtactaatagcaccgcagttgcctgctgtgataattgcgacgctgagcggttcccgtagccagactggaagacgggaagggccaactccgaccacggtcatgatccaggaccacacaggttcttcgaccgatgacgagtgttccgctaacgtgcaacgcatcttcaacaggatcatgctttgctcgatcgtatcgcggccacgtacaatccccttccacgacctggcgcagagtttccgtcagtttcgcaacgtcaaatgtctctggtgcgcctttgaaggggcgcaattgatgcgcatccagccagctattgtaatggtgaaaaccatccatcgggagcgtctgaatagcgggcagttccggtgtcatcaagaagcccgaaacattccccctcatcgtcaaagccgttttctggcgtccagaggtttactcgcagaactgatgttcatgctgtatggcattggcgaattgccggaaatcgtcaccctgccgaaagagatcaggggaaatgtcgataattcgcgtcacgccgtctttctcgccaatagtggaatgccggagctacgctttattcgcacccacggcagtcgttttacttcccaggattgcacactgtttaactggctggcgcggataatcaccccggttctgcaatcatggctcaatgatgaagaacagcaggtggcgctgcgtttgctggagaaagatcgcgatcatcatcgggtactggttgatattactaatgcagtgctgtcacatcttgatctcgacgatctgatcgctgacgtcgctcgtgagatccatcattttttcggtctggcttcagtcagtatggtactgggcgatcatcgaaagaacgagaagttcagcctgtggtgcagcgatctttctgcctcacattgtgcgtgtctgccacgctgtatgcctggcgaaagtgtattgctgacacaaacgctacaaacccgacaaccgaccttgacgcaccgtgcagatgatctgtttctctggcaacgcgacccgttattactcttacttgcatctaacggctgcgaatctgcgctccttataccgcttacctttggcaaccatacaccgggtgcattgttgctggcgcatacctcttccactctctttagtgaggaaaactgccagctactacaacacatagccgatcgcatcgctattgccgttggcaatgccgatgcctggcgtagcatgaccgatttgcaggaaagtttgcagcaagaaaaccaccagcttagcgagcagctcctttcgaatctgggcatcggtgacattatctatcaaagccaggcaatggaagacctgctccagcaggtagatattgtggcgaagagcgacagtacggtgttgatttgtggtgaaaccggaactggcaaagaggtgatcgccagagcgatccatcaacttagcccgcgacgcgacaagccgctggtcaaaatcaactgcgctgccatccccgccagtcttctggaaagtgagttattcggtcatgacaaaggggcgtttactggtgcgattaatacccatcgtggtcgttttgaaattgccgatggcggcacgttgtttctcgatgaaattggcgatctgccgttagaacttcagcctaaactgctgcgcgtattgcaggagcgggagattgagcgtctcggcgggagtagaacgatcccggtgaatgtcagagtcattgccgccaccaaccgtgatttgtggcaaatggttgaagatcgcggagtgatctaa

SEQ ID NO: 135966 - DNA, 2860 bp, Homo sapiens
ctatatttgggggcaaaatccccatatctttatcctggactctagaagttgacatgatacactcgatctcggtacccgatttacatgagcacatttcaggcgtccggcaatgggcagcagctgcagatcgcgcggatcgtcattcaaaacatcaccggttagttttagcacgcttcggcgcagcgtgatgagctgcgcccgcgcttcgttaggatcgttttgtttactgatccatagcgattcattgctggaaaaggtgtggttatcgggcgcgtgtgggctatgaaacccgcgcgtcgcacgctgtagttccatatcgaggccacattcaccttcggttgttaacgccacgccaaccatattcccggcataggaaatggaaaacgaaggcaaatttttatcactgaaaaccggtttaccctttcggcagggtgacggatttccggcaattccgccaatgcccatacagcatgaacatcagttctgcgagtaaacctctggacgccagaaaacggctttgacgatgagggggaatgtttcgggcttcttgatgacactgggaggggagacgaacagaaatcagatgtccttccgttaaaatccctcgggcaaagtgagtcgccatttttcgctccatgcttaatggtccattatgaatacaagagtaatcatttactggaagccgtcgttcgcggtggtgcggacgttgtgcgtctgccgaaaaccgataccgctcaggatgttgcttccgagcgtttgatcggtatcgccctcggtgcagaagactatgtgcgcaacctgcgtacagaacgctccccggaaggaactgaactgctgttcgcacgctgttccattttgcaggccgcgcgctctgcgggtaaaactctgccgaggctgccagtttgaaggtgccgccctcttgcagataacgactcaggtcggcaagcgaagtgagtttatttttctctgccacatcctgacgcacggcgatagtccaggtgttatttgcaggcgcgggcgtcagccagattaacttgttgtgctccgaatcgagctttttgactttctcgtaaccttgctgcgcgtttttccacgctgcatcgttttcatctttaaagaagaaagcgccattgccggtatattccggatagatatccagttcaccggaagtaatcgccccgcgcaccacaggagtcgttccgagttgcactttattcaccgtcggtacgccgtggctttccagcacctgcaaaatgatattgccgagtagcgcaccttcggtatcgatttttgaaccgactttaacgggggaagccgcctgtagcggcaggctcacggctgccaacataaccagtgaacggcagctttcataataggcctgaatctccatcatgcgagtgcgatgacgctggtaacgacgccaggcatgtacgccattgtaaatggcgctacccagcatcgtcagtagcagcaatgtggtgctgagatagcgccacaggccggaacgatccgggatcggatgaaggccaatatgctgcgtaccattggcgtcagtgaagatttttgtgacgataccctcggcgttaaacggcgtatgcatcagcatttgtgccagtttctggaaagcgttccactgttcttgcggcgggtagtcgtaaagtgatgccgaaggccagggctgatcaacaaaatcgctgccttcgtcgctgacaatcaggaatccgccgggggccggactgtttagtgattgtgccgctcgcgccgtttcatgcgtgataaacggcgcggtggaggttgccaccaggttatccagcgattccgcactcaccgggcgtaataacacattcacgccatcgagcttcccggcgttggcgcgttttaccagcgcgtcccagtctttactgttgccgagattgaccagcgcatttttcagtcgcacacagtcatcatggcttcggcagcggcgggtagtaacagctgggtacaggtgaaaacacaccgcaccattggcgatgccgtcgctcatctcaaaggccagggcatgcagattctggcaacccatctttctgataacgctgtcgatttccgcgaaattgattacactcgcccgacctgcattttgatgggacaggagaaaacgggcatcacgcaggaagcattggccctggcggatcaggacatcatcattccgatgatcggcatggtgcagtcgctgaatgtttccaatgtaagtcatgctggtgaagtgcgtccattcgcgttcgaacggatacaccgggatctgaatcagatctttacgctcgaccagatagttgaacagacgcaattccatcggtgaaatcacatcttcggcgtcatgcagaataaaaccagcaaaagcgaaattggcgctacgctcaaattgggtgatggcgtccagcacgttgttcagacagtcggctttgctggtggggccaggacgcgcgcagactaccttatgcacattcgggaagcgagcgcacacttcgtcaacatcacgctgagtatcggggtcgttggggtaggtgccaacaaagatatgatagttttcgtagtcgagcgtggtcgccgccagctcggccatattgccgatgacgcccgtttcattccacgccggaaccataatcgctaacggtttttcatctggtttatacagttcgcggtaactcattcgcgggtagcggcgataaacactcaacttgcgtttaatgcggcgtacccagtagacgacatcaataaaaaaatcgtccagcccgctgatgaacatgatgaccgctaacgttatcgcgtttgtcgttaaacgatcgtcatcttgaaaagccgggacaccacgagtccgcat

SEQ ID NO: 135967 - DNA, 2729 bp, Homo sapiens
ttatggcaggcgttggtctgagcgccggtagcggtattgattgcggcggcaaaccgttcgcacatgccttacagtaagtcgccaagcggtgtcgcgctggaatgtaaagacggtcgtattttcagtggcagctacgctgaaaacgccgcattcaacccgactctgccagaaccgcgcgctgttggatacgacttctagctcggtactttccagccgctcgtcaagctcagaaattacgcctggcaccgttcgcgctacttcttcaatttgctcagccatcgcgtcgatatccgccagcacagtgccggaaactttaatgccgatggggcttttaatgccggttgagagcatatcgatacggttacgaattggcggcacccacagattcgccagccccggcagccgcacggtgttatccagttcctcaatgattttgtccatcgtcatgcctggccgccactgctcctgcggcttaagctggatggtcgtttctaccatctccagcggagcagaatcggtggcggtttccgctttcccggttttgccaaatacccgcgccacttcaggtacgctcataattagcttgtcggttttttgcagcatactcgccgcctctgctgcggaaatccccggcagcgtcgatggcatatacaacaagtcgccttcattgatctgcggtaaaaattccccgccaactttattgagcggccagagaaccgtcagcaccgaaagcgccgccaccagcagcgtggttttcggccagtgcagtactttcagcaacagcggatgataaacacgaatcaaaaagcgattgagcgggttactgctttccggcggaattttgccacggatccagtagcccatcaggatcgggatcactacgatcgccagcagcgccgcacccgccatcgcatacgttttggtgaacgccaacgggccaaacagacgcccttcctgcccttccagggtgaagatcgggataaacgacaacgtgataatcagcagactgataaatagcggatgtttaacccgttctgcccgggaatcttgggcgtaagccaagtcttgctcccaggtccaggtcccattggtggtaaatgccaggtttgtctggatattgaaaaatgatgtgttggatggctgatgagtgctgtgctgaaatgcagtgagctggaaattgcgtagcgggtgatgcctgccagccagcatcaacgccgcactgtgcttgcggctacgctcatagcgacgcagataaatgtactgcccgatgtctttcccctgacgatgcaaccgtttcagttcggcaatcagctctgcagcatccataaagccgagatttaccccctgccccgccagcgggtgaatggtatgtgcggcgtcgcccaccagcgccagacggtgcgaggcaaactggcgcgcataacgccccgtcagtgggaacacctgacgcgcgctctcaaccttgcataagcccaggcgattatcaaaagcgatatttaacgcgcgattaaattcgtcttcacttgcctgctgcatccgctgcgcttcctcgctggcgcaaatcatcagcatggtgtggaactgcgggtcaatctgctggctacaaacgacggggttcatgccccatgaagccccagcgcatacagtggcataaaggcaacgaagaagccgatgatccagaaccagaacgcgcgtttaccccaggtttcgttcagtttgaaaccgaacgctttaggccaccagtaggtcatccctgcgaagcagccgaagaccacgccgccgatgatcacgttatggaagtgcgcaatcaggaacaggctgttatgcagaacgaagtccgcgcccggtacggccagcagcacgccagtcatcccgcccaccgagaaggtgacgataaaaccgatggtccacagcatcgcagaatggaacacgatgcggccctgatacatggtgaacagccagttgaagatcttcaccccggtcgggatggcgataatcattgtggtgataccaaagaaggcgtttacgttcgcgcccgcacccatcgtaaagaagtggtgcagccaaacgatgaacgacagcacggtgatacagacggttgcccataccagcgaggtataaccaaacagacgtttacgcgagaaggttgccgcaatttcggagaacacaccgaaaacaggcaggatcaggatgtaaacttccgggtggccccaggcccaaatcaggttgatgtacatcatcatgttgccacccatatcgttggtaaagaactgacttggaaaggattttgacaccagaaacataccagagtgtctatctaaagtgaacatcgactgcagacagcaagtcgactctctaccgttgatggttgcaagcgttttttcaccactcaaccaggtgtggttgatcgcgctttgttcggcatgaacggtttgctgcattgtcgcaccaataaattccatattggcaccgaaataccaggttccgctcacaccgcgcgcaattgcgccaacattaaaattcgacaatggcgtacgcgcacaggccgccgccagcggaagtagtgcgaatgccagcgcgtcttcgtccagccccgttgcgctcttcagcgatgagacttgctccccggtcaacaaagcggggaagtacttgtctgccagaataggttccagtgcagattgcaagttatccgcaagttgggcaaaagcggtttgaaaacgtggatgcat

SEQ ID NO: 135968 - DNA, 1149 bp, Homo sapiens
atgactacttccatgctcaacgcaaaactactaccatctgcgccatccgccgcagtggtcgtcgtgcgtgtggtggtggtcgtcggcaatgcgcccacctcccggaaagtcggcccagaagaaaaggactggagcatggcaagttcgggcacaacatcgacgcgtaagcgctttaccggcgcagaatttatcgttcatttcctggaacagcagggcattaagattgtgacaggcattccgggcggttctatcctgcctgtttacgatgccttaagccaaagcacgcaaatccgccatattctggcccgtcatgaacagggcgcgggctttatcgctcagggaatggcgcgcaccgacggtaaaccggcggtctgtatggcctgtagcggaccgggtgcgactaacctggtgaccgccattgccgatgcgcggctggactccatcccgctgatttgcatcactggtcaggttcccgcctcgatgatcggcaccgacgccttccaggaagtggacacctacggcatctctatccccatcaccaaacacaactatctggtcagacatatcgaagaactcccgcaggtcatgagcgatgccttccgcattgcgcaatcaggccgcccaggcccggtgtggatagacattcctaaggatgagcaaacggcagtttttgagattgaaacacagcccgctatggcagaaaaagccgccgcccccgcctttagcgaagaaagcattcgtgacgcagcggcgatgattaacgctgccaaacgcccggtgctttatctgggcggcggtgtgatcaatgcgaacgcacgggtgcgtgaactggcggagaaagcgcaactgcctaccaccatgactttaatggcgctgggcatgttgccaaaagcgcatccgttgtcgctgggtatgctggggatgcacggcgtgcgcagcaccaactatattttgcaggaggcggatttgttgatagtgcttgaactggcgggcgtccagactgtcgacactgacgttaatgccagtaagcccgcatcggccactcgccacatcgcgttccagacggtaaccattggttgtgaccgcaatctggcggatagcgtcgttttcccgcacagcgtcgatgatatcggtaaagtcgcggcgtaa

SEQ ID NO: 135969 - DNA, 1363 bp, Homo sapiens
atgattatcgccatcccgaccggggtgaagatcttcaactggtgttcaccatgtatcaggccgcatcgtgttccattctgcgatgctgtggccatcggttttatcgtcaccttctcggacgtgatacagatagcctcgatctacgaaataccttgcagggaccctactggtgtcgcatctactgaatattcatcatcaagctgccgtcgccggagaaacacaacactttgcgatccgggttcgccagcgcagcgccaatcgccgcaggcaggccaaaacccatcgtgcccagcccaccggaggtcagccactggcgtgggcgattgagcggataagcttgcgcggtccacatctgatgctgaccaacgtcggtggtgataattgcattgtcatctacacaagcggcaacggcgttgatcaggccgaatggcttaacagatcgcacgctttcgggattggacacggaaactcacctctgcacggtcgatatcgacatgatgattttggcattcggacaaaaactgctcgttttgccaatctgcccggcatcaaaaagcgcaccgagcactatcgacagatccgcctcctggcaaaaatagttggtgctgcgcacgccgtgcatccccagcatacccagcgacaacgatgcgcttttggcaacatgcccagcgccattaaagtcatggtgagatgccgtaggtgtccacttcctggaggcgtcggtgccgatcatcgaggcgggaacctgaccagtgatgcaaatcgcgggatggagtccagccgcgcatcggcaatggcggtcaccaggttagtgcacccggtccgctacaggccatacagaccgccggtttaccgtcggtgccgccattccctgagcgataaagcccgcgccctgttcatgacgggccagatatggcggatttgcgtgctttggctaatgacagagtacaattcgagccgggtgaaagctggcatacacgaagatgccattccgaccattcataacagttcgcaggtggcgcaatatgccattgtgcgcacgtaccgtgtgtcacaccatcacgtcctggtccgcggacatcgcctggtaactgccgaccccacctgctccaacagcacccgtcataacggtgaaagcagactaaggaaatggaaaacgaggcaaatttttatcactgaaaaccggtttacctttcggcagggtgacgattccggcaattcgccaatgccatacagcatgaacatcagttctgcgagtaacctctggacgccagaaaacggctttgacgatgagggggacatgtttcggcttcttgatgacactgggaggggagacgaacagaaatcagatgtcctccgttaa

SEQ ID NO: 135970 - DNA, 450 bp, Homo sapiens
ccggcgagacgcattacgacgcctggccgcacaaagtcagtctcggcgtcgagtatcaacatacctttaaggcgattaatcaacgtaacggagagcgcaacaacgcgtttctcaccattggagtgcactggtaaatgcgtaagttcattttcgtattgctgacactgcttttggtcagccctttttcctttgcgatgaaaggtattatctggcaaccacaaaaccgagatagtcaggttaccgatacccagtggcaggggctgatgagtcagttacgtttgcaaggcttcgatacccttgttttgcaatggacccgttacggcgatgcatttacccagccagaacagcgcacgttattgtttaagcgggccgcacatgcgcaacaggttggtttgaagcttgttgtcggcattaacgccgatctccgggtacggagcttgaattcgtaat

SEQ ID NO: 135971 - DNA, 447 bp, Homo sapiens
atgaactatctgcttgtcgatgagcgccagagcaaaaccttctggttcgatattcgcaacaccgaccgttctgtcggcgcgtcgctttcaggctatatcgcccagacgcacggcgatcaggggctggcagccgatcctatcaaagcgtacttcaacggcaccgcaggccagagcttcggcgtgtggaacgcgggcggcgtggaactgtacctgaccggtttcatgatgttcttttcagctttgaagaggctctaccatagtgggatttcaaaactcttaagaagaccagccatcaagccagccatccagccagccaaccaactatccatccacaatttgtggacacaattccggcattcaaccaaaattccagttgaatgggtgaatggtgaatggctgaatggacgaatgccaggggatcatcatgaatggcaatgcaactatcag

SEQ ID NO: 135972 - DNA, 499 bp, Homo sapiens
catcggtatcgccaaacatgctcagcagttgctgctcaatgttatgcagacgcgcgcagtaggcgcagaagtacagaccgtgagtgccactggcagtgccgtacggcaggctctggcgaacaatcttcagccctttgccatcttctttcagatcaacgcgggtgatagcgtgcgggacgttatccagacgaccacggtatttcgccagagacggcgctttacggatggcatacatcggcaacaggcacagcagggatgcgataatcggtgcgcccatggcttcaatcaggtcaaggatgttcgggttggcgtaggcaacaacccaggtggagcccatgatgaagatcatgctgatagtgttcagtttacccagcgacactttagttttgtcgcctttataaccaaacttcaggaccaggccattcagaccttccagcgttcccagatagtgaccgaagaaagatttgaagatagcccgagtgcgatgatggagccgcat

SEQ ID NO: 135973 - DNA, 777 bp, Homo sapiens
atgcagcacctgtctcacagttccggaggcaccgatccatcttttggaaaggtctccgggaggtcgatgtcaaggaaaggtttttctcccgcgcgcaggtgggagttaggggctctcccacatgttaaagtgatcatcctcgccgggatttttatcggcgtactgtattccgtctcctcggtgctgattaacgtcttcgtcagcagcaaagagttgaaatttaccggcggatcggtgcaggtattccacggcatggcggcgtattttggtctaccggaagcgttgatgaatcgctttgtcggtctggtgtcctttaccgcgatgttcggttccctgctgatgtggaccgcaacgccggtgaaaattttcttctccgaaatcccggaaggcatctttggtaagaaaaccgtcgaactgaacgaaaacggcgttccggcgcgcgcagcgtggatccagttcctgatcgtcatcccgctgatgattatcccgatgctcggttccaataccgtgcaggatctgatgaatactattattaatatgaccgccgcagccaccctaatccgtatctttgcccttcatgagttacatcgactgaaagaacatggcttaacgcgcggggcgcttctcgattatcacagccgctataaactcgtctttctggcgcattctcagccggagtaccgcaaacttggcccgttcgtggctgatattcaccagtggcaaaatctggatgactattacaaccagtaccgccaacgcgtagttgttttgctttag

SEQ ID NO: 135974 - DNA, 1642 bp, Homo sapiens
cagacatatccggacgccagcccatctcgaacgctttatcgttgatatagcgctcaatgttgccgatggtcaccgcgccaaactcatcgttcagagtgcaggaaccttcgcacagacggtcttgcgggcagactcgtccgcaaacttccggcagggtgttggtctggtgcgacagttccgccgcttcaaaaatacgcccctcgttggcgagcttcagccagttcgggatgtagttgtgtaccgggcatttccactcgcagtatgggttgccgcacgacaggcagcggtcagcctgcgctttggcctggccttcggaaaacggctcgtaaatttcaacaaactcaattttgcggatcttcagcggtttctttggcggatcaacgcggcgcaactcagctgcgctacgactacggtgacccagcagtgcttttacatcactggacttcggtttaaccagcgcaaatttagtggcgaaggttgaccagttcgccagaatctcttcaccgcgctgagagccggtatgctgcacatgctcggtgataagaccacgcagatgctcttcatggatcgccagagcgtcaacgcttaagacctcgaccagttccgggttaacgcgtttgcggaaatcgccgctttcatcgagaacgtaagcgaaaccgccggtcatgcccgcaccgaagttaacgccggttttacccagaatgcagacgataccacccgtcatatattcacaaccgttgtcgccaatgccttctaccacggtgatagcaccggagttacgcacgccgaaacgttcacccgcgcggcctgcggcatacagacgaccaccggtcgcgccatacaggcaggtgttgccgataatgcttgcttcatggctgcggaaggcggaaccaaccggaggacgaatggggattaagccgcccggcatgcctttaccgacatagtcgttggcatcaccggtcacgtgccggtccacgccgccgcgttccctgctgcctgacgtggtgtttccgcccgctgcgcggctgcccggcgcatgaccacgacgttttttctgacgcttgcgatcacgagcttcctgatccagctcctcgcgtgtttttcgacgcgcttttgcatgacctttgctgcgtgagtttgaagatgatggtttcataatggttcgtcttttagccgttttattcagtatagatttgcggcggaatatcctgtctagtgcaccgtcttcatgggcttcgagggtgaaatcaacgggcataaaggtggtcgggcgatgatgttgcggccagttaaactcaatcccaccggaaatccacggccccagcagccccaccagcgcaggtttaatgacttcattgtgataaacaaaatcgcgctgtttcactttatcccacgcgcgatgcacccgaccgcccagttccggcaggatcatcactttgatgtagtcgttttccagccacaccgcctgccaggatttcagggttttctgctcgctcagcgtatcggtcacgccgtagggataaaccgcgccggacgatccctgataaacgcgattttccaggaacatgggatgtatatcctgcggcccggtttcataggtcgggatctcaacgcgctcttgccacacttttactggagtcat

SEQ ID NO: 135975 - DNA, 699 bp, Homo sapiens
gcagccttgaaccaggcgcaggcgcaatgggcgcaggcggagttaaatttacagggctcaacgttgatagccccgtctgatggcacgctgttaacgcgcgcggtggagccaggcacggtcctcaatgaaggtggcacggtgtttaccgtttcactaacgcgtccggtgtgggtgcgcgcttatgttgatgaacgtaatcttgaccaggcccagccggggcgcaaagtgctgctttataccgatggtcgcccggacaagccgtatcacgggcagattggtttcgtttcgccgactgctgaatttaccccgaaaaccgtcgaaacgccggatctgcgtaccgacctcgtctatcgcctgcgtattgtgggtgaccgacgccgatgatgcgttacgccagggaatgccagtgacggtacaattcggtgacgaggcaggacatgaattkatgccgttatcacggtgaacggcctgggraaacggtttccgggcatggacaagcccgccgtcgggccgctcgattgtaccattcacgccggttatgtgacggggttgggggggccggtacccaattcgccctatagtgagtcgtattacaattcactggccgtcgttttacaacgtcgtgactsggaaamcctggcgttacccacttaatcgccttgcagcaaatccccctttcgccaactgggtaatagcgag

SEQ ID NO: 135976 - DNA, 4450 bp, Homo sapiens
tcatttgcggagtggagataggagcaccgttggcatccgcctctccacgctggtgacggtgaagtgccggatccatgcggcccggagaacagcacctagaatgcagggagagctctctacgagcattgacatcacgcaaggcttgatgtcttggtaggtgacctgctggtggtagtaggagcccccgccggccgagtgcatggaagaggacgccatggcgttgaaagagaagacaaactcctttcggtcacacatgctgggcgactgcgagtgataccgcgggatgcctgccagaagcatctgttccctggggatgtggaggggcaggagcaggagcaactccatactgctggacctgcataacggacgtcctgccactgggaccatgagctcgcatgatgtacggtcacacgctgggcagaataagcgggtgatagtgcctgccaagggccgattaaagttgggggtgaacagccagtctattccctttttaatggaaacgatggcctccgagtccctttgtgactcctgtatgaacatgtccaccacggctagcacgtgtctcaagatgctgatgttcggcagctccttgttgcctgctcgtatctgtagacgaggcccagactcgtgatatccccatgacctatcactgccgatgtcaaactcggtcacttggttaccgtattgtatgccagatttctcctctgcaatgctcctgtcattctctgtccacactctgttcatgacaccgtcctttctggttatctcacctttgagggcatcacccgccaccattacaacctggtattctgccgacatctgctttccttgtttttctgtggggaccatcaaggccaacttcggggagcagctgtgacgagggcgatcctggtcccagaccctggcagtgaatctcctcttaggggtgagtgactgagcacgccgcttattcaggggcctgtgcggtctgggtcgcctctgggccagcgggttctcactcgcccccgtcaggcccgcggcgcccgagacaaagcggccgcgactcgtgctgcgctttcgttttccgcctgcgctctgccccggcggctgcccgcccgctcgcaagctgctgggcgagtccgaaaaatcccgggagcggcgcagttcttcccggggcggggagagtgggtaggcggtccctcgcgggaacttagccggcccggcccgcgaggaccggagtcgagccggctgtgccaggttatagacgagaaagcgcagataatcgttggcgttgatattcagtgcggcaaactgttcagcttcttgctcaaactccgccagcacatcggttagctgcttgttggagatctgcgtgacgttcgccattgcagcgctcagggtttgtacttcacgctgggagaggtgcttgaacacctctgccgcccggtcttcgccaatggtcatcagcaggatgacgcttttatcggtgccgccgcgggcatcgccgtccactttggtcaacactacgccggtaagcggtaacgcttcattgaatgcttttgccgtattggccgcatcctgaccggtcatggcgtcaaccacaaacagggtttcaaccgggttaatcgacgcatggacttgtttgatctcgtccatcatcgcttcgtcaacgtgcagacgaccagcggtatccaccagcagcactggagcgcgatttaaatggttgcttccgtggaaagcgtattccttgccggggcgctcggcgatcagccagtccacatccacctcggccagctcctcgcgctgtggcgccccttggtagccggcatcggctgagacaaattgctcctctccatgcagcagattacccagctgattgaggtcatgctcgttggccgcggtggtgaccaggctgtgggtcaggccactcttggcatcgacaccaatgtgggccttcatgccaaagtgccactgattgcctttcttggtctgatgcatctccggatcgcgttgctgctctttgttcttggtcgagctgggtgcctcaatgatggtggcatcgaccaaggtgccttgagtcatcatgacgcctgcttcggccagccagcgattgatggtcttgaacaattggcgggccagttgatgctgctccagcaggtggcggaaattcatgatggtggtgcggtccggcaaggcgctatccagggataaccgggcaaacagacgcatggaggcgatttcgtacagagcatcttccatcgcgccatcgctcaggttgtaccaatgggctcgatacttccggtaccgagctcgattgtaaatggaagaagtggcgcaggagttgcggttgcgcggcgcggtatcgcggttggcactttcacggcggtaatcttctaccttcagagatttatacaaccccgccatcacgaagaagatcacaaagctgaacggcagccccataatcaccgtggtgttttgcagcgcggatatcccgttagtcatcagcatgccgagcgtcagcaggccaatcgccaccgaccagaagacgcgcagccagccgggggcgtcgctgttgatatctttaagctgcgaggtgaaattccccagcaccagcgccccggagtccgccgaggtcacataaaacagcaggccagtaatggtggcgacggaggcgctaaaggtaaacgccggatactgcgccagcaggctgtagaagccgcgctccggatggaccatcgcttcctcggcaaatgccgcgccgccgtggatgatttcatacagcgcgctattgccgaacaccgagagccataacagcgtgaaggtaaacggaataatcaacgtgcccagcacgaactggcgaatggtacgcccacgcgagatacgcgccaggaacaagccgacaaacggcgaccatgccacccaccatgcccagaagaagagcgtccagttattcatccactcaaccggacggtcgaaggcaaaactgttgagcgtcatgcccataaagcgattcacatagtcgccaacattcagcaccagtgcattaagcaggaacgaagtgtcgcccataaacatacgaacaggatcaatatgtcgcgatacagcgccggcggatcggtgcaggtattccacggcatggcggcgtatttggtctaccggaagcgttgatgaatcgcttgtcggtctggtgtcctttaccgcgatgttcggttccctgctgatgtggaccgcaacgccggtgaaaattttcttctccgaaatcccggaaggcatctttggtaagaaaaccgtcgaactgaacgaaaacggcgttccggcgcgcgcagcgtggatccagttcctgatcgtcatcccgctgatgattatcccgatgctcggttccaataccgtgcaggatctgatgaatactattattaatatgaccgccgcagcgtccatgcttccgccgttattcatcatgctggcttacctgaatttacgcgccaaattagatcacctgccacgcgatttccgtatgggctcccgccgcaccggtattatcgttgtttcaatgctgattgcgatatttgccaagcgcattgctcttggcgatttgttgatgaaagccaattacggcggcgtggatgtcgaaatcgcggcagttattggtaaccacgatactttacgttctctggttgagcgttttgatattccgtttgagctggtaagccatgaagggttaacccgcaacgagcacgatcaaaagatggcggatgccattgatgcttatcaacctgactacgtggtgctggcgaagtatatgcgggtattaacgccggaatttgtggcacgcttcccgaataagatcatcaatattcaccattcattcctgccagcgtttattggcgcacgtccttatcaccaggcctatgaacgtggtgtgaagattattggcgcaaccgctcactatgtgaatgacaatctggacgaaggcccaatcatcatgcaggacgttattcatgtcgatcatacctacacagctgaagatatgatgcgcgcaggtcgtgacgtcgagaaaaacgtcttaaccgctcttaccgtgtctgggtgccagctctgcgggccagcaggttcatccccgcttcgcccatccgcgctcaggttcagacggcaaccaacatcggtaattggctcattgcaccaccatccaaatacccatgtccccccggtaaacgacggcggcgaacggtcgcatgagcagaaagcgtcaggcagtgttgtatccactcgctttagccggagcagcttctttcttcgctgcagtttcaccttctacataatcacgaccgtagtaggtatccagcagaatctgtttcagctcggagatcagcgggtaacgcgggttagcgccggtgcactggtcatcgaatgcatcttcagacagtttatcctcggacctgcaggcatggagctcattgggctcaagccctga

SEQ ID NO: 135977 - DNA, 459 bp, Homo sapiens
atagatgacccttagtccagtgcggtggtgcgtccaatggcgaaataatcaggtagtcggggccatttacgatcttgctgatgcagctgtgattgggcaaaagcaaccgcgtgttgcgagagggcaaacaacagatcgctctcccccagcgctgccagttgatcagcaagttgcggtaattgttgacccggagaaaactcaatcagcggaaaatgccaggccacctgccccagtgtgcgcagacggctcactaactcttctccagcgggagacgggcgggtgacaaggatactcatgccggggcgtctccgttatagacttcagcgaggatctcgcgcgcgccgttattcagtagctcttctgccagcgaaatccccatttgttcggcatcttgcggcgcaccgccggcgtcaccgggaattatcttgcgaaccgtccggcgcgccgaccagcgcacgc

SEQ ID NO: 135978 - DNA, 1560 bp, Homo sapiens
ttacggtaccggattgaccaacagttgcccaatcgagccacggtcggccatttccagcgtctgactgttgaagtagaacgggaagtgcgcccaggaaggctgaccgaaataaacaagcagctccacttgtccgtcaacccaaacggtatctttccagcctctgtcttccgggaacggcatcgcgccattcacgttacggatctggaacattacgccttcaatatggaacgcttgcggctcgtccgcgcgtaccgtccagcgttcccacgttccttgctgcgcggtgacatcaatacggttgacgtcccacagctgtccattaatacccgggtcatcacccagactgatatcgcgactgcgaattggcgaaccagccatgatttcagttggcagcaagcgcatcggaagactgtctgtgaccagcggcagaaggccggttgggcgcaccgttagcaccagggtagaaaccataatactggatggctcaaagaagccacgaatacgatcaacaatgctcggcgcttcgccacaggtgatccacactttatcgccgtgctcatatccaccaagccctagactaactcttcgaatcagcagctggcggaagggaacagagagcgcctcataggccgcaataccgctggtccagagcgtatcaccgccggtcgaaggtaactctttagctgccagaatcgcccctgcgggtggcgtttcaataaatgtcacatcggtatgccagttgtcgttatctggcggattatcgttatgggtatccagcacgatgatctcgtcaaccccttcggcatgcgggtaaacagggtgaatatgcaattcgccaaaacgctgggccagcgcgcgttgctgctgcggcgtaatagcttgatcgcgtagaaacaccacctgatggcgcagcaccgcatggtaaagctgttcaaactgattatcgcttaacgggcgcgtcaggtcggcacccgaaatttgtgcgccgatatacggccccagcggggtaatgctcagacgttcactcattgtacttctccatgccagggcgtcaggcggcgccagttctaaaagaaagccgataatcgcaatcaccgcgatccccgccagcaccacgtcagttgcgagaaattcacccgctgactgaaccataaatcctaaaccgcgcgtcgcggcaatcagctccgccgccaccagcgtagaccagcccacccccagaccaatacgtaatccggtgaggatttccggcagcgcaccgggcaaaatgacaaaccacagcacctgcgcacggctggcacccagcgactgggcggcacgaatgcgaacctgctgcacgcttttcacccccgccagcgccgacatcgccaccggtgcaaaaatcgctaaatagatcagtaagatcttcgaggtttcaccaataccaaaccagatcaccatcagcggcaaataagccagcggcggcaccggacgataaagctcgattatcggatccagaatgccgcgtaccgtagggtaagtcccatcgcgatcccgaccggaataccgaacaacaccgtgcat

SEQ ID NO: 135979 - DNA, 1690 bp, Homo sapiens
atgccggggcgcactccgggccatcgcaccccgctttggcaacaacggctgcgcgccagtcagttgctggaaatcgctcagggatatccggattttccggtcattctcgaaaccctacgcgaatgtctgcaagatgtttatgatcttcccgcactggaacgtttgatgcgtcgcctgaacggtggcgaaattcaaatatccgatgtaacgaccactacgccctcgcctttcgccacaagtttattgttcggctatgtcgcggaatttatgtaccagagcgacgccccgctggcagagcgccgggcatccgtactgtcgctggacagcgagttactgcgcaatctactcggacaggtcgatccgggggaattactcgacccgccagtcattcgccagtggaagaagagtgcacgactggctcctggcagaagaccgaaagtgaaaaagattgttcgacctgctgcgcgaactgggccaatgaccgtacgccactacctacatcaacatcgtcggcaaactgttcaacgaatgtgcagacttccgtcgtaccggttctgcggcgctggatctggcttacgtcgctgcgggtcgtgttgacggtttctttgaaatcggtctgcgcccgtgggacttcgccgcaggcgagctgctggttcgtgaagcgggcggcatcgtcagcgacttcaccggtggtcataactacatgctgaccggtaacatcgttgctggtaacccgcgcgttgttaaagccatgctggcgaacatgcgtgacgagcgctattccgaaatacttcctcactgctttactttctttcgtcactctcccaccatctttccccgattaatggatgataaagaagtcgcaaggaaggttatggcactgccagtgaacaaacgcgttcccaaaattctgtttattctctttgttgttgccttctgcgtttatttagtgccgcgcgttgccatcaacttcttctattatcccgacgataaaatttacggtcccgatccctggtcggcggaatccgtcgaatttacggctaaggacggtactcgtctgcaaggctggtttatcccttcttcgacgggccctgctgacaacgccatcgcaaccatcattcatgctcacggcaatgccggaaatatgtccgcccactggccgctggtcagttggttacccgagcgtaatttcaacgtttttatgtttgattatcgcgggtttggtaaatcaaaaggcacgccgtcccaggccggattgctggacgatacgcaaagtgccatcaatgtggtgcgccatcgcagtgatgtaaacccacaacgtctggtgctgttcgggcagagtattggcggggcgaatattctggatgttattggtcggggtgatcgtgaaggcatacgtgcggtgatcctcgactccacatttgcctcttatgcaaccatcgccaaccaaatgatccccggcagtggctacttacttgatgagagttacagcggcgaaaattatatcgccagcgtcagcccgatcccgcttttactcattcacggtaaagctgatcacgttatcccatggcagcacagcgaaaagttgtatagcctggcaaaagagccaaaacggttgatcctaatcccggatggcgaacacattgatgctttttccgatcgtcacggcgatgtttatcgcggacagatg

SEQ ID NO: 135980 - DNA, 973 bp, Homo sapiens
atggcaaattcactgtctctgtttgagcagaatgcattttccgagttaataccgtcggcaatacctgacattaatacttcacagtcgctggcatcgagcacggcaaaacttaatcgaagacgaaccacagttaataaccaaaacaaccggaaattcattcatctcttttctcatcctgagttacggattaaaacagttggtatacgatgttcaggatggtcagcagaccaatcacggtactaaacacgttatccagacgaccacggtatttcgccagagacggcgctttacggatggcatacatcggcaacaggcacagcagggatgcgataatcggtgcgcccatggcttcaatcaggtcaaggatgttcgggttggcgtaggcaacaacccaggtggagcccatgatgaagatcatgctgatagtgttcagtttacccagcgacactttagttttgtcgcctttataaccaaacttcaggaccaggccattcagaccttccagcgttcccagatagtgaccgaagaaagatttgaagatagccacgagtgcgatgatggaagccgcatattccagtgtaatcgagaacgttgttttggtaccggtcatggacgcaaagtggttagccagatgagaaagcactggaatattctgcgctttggcttccgccatgttggccggagacagagtaaacaggcagctaaaggcaaagaacatcaccactgcaaccatcagcatgctggcacgagaaatgatttgggaacatttacgttcggtgaagtcgcgaccgaagtcttttttctactttttacgctttagaaacccccaaaggaaaaaacatttggcggaaagtttaaggggaaaacccttggtggaaattccccccccacaccgtgatcaggataccgtcatgaccggttaacgccagcgaaccgaggtcaacctggtcgataactgcagagttccagtaag

SEQ ID NO: 135981 - DNA, 3610 bp, Homo sapiens
atgaatgatggttgcgatggcgttgtcagcagggcccgtcgaagaagggataaaccagccttgcagacgagtaccgtccttagccgtaaattcgacggattccgccgaccagggatcgggacccatggctttaacaacgcgcgggttaccagcaacgatgttaccggtcagcatgtagttatgaccaccggtgaagtcgctgacgatgccgcccgcttcacgaaccagcagctcgcctgcggcgaagtcccacgggcgcagaccgatttcaaagaaaccgtcaacacgacccgcagcgacgtaagccagatccagcgccgcagaaccggtacgacggaagtctgcacattcgttgaacagtttgccgacgatgttgataatgcattttccgagttaataccgtcggcaatacctgacattaatacttcacagtcgctggcatcgagcacggaaaacttaatcgaagacgaaccacagttaataaccaaaacaaccggaaattcattcatctcttttctcatcctgagttacggattaaaacagtttgtatacgatgttcaggatggtcagcagaccaatcacggtaacaaacacgttatccagacgaccacggtatttcgccagagacggcgctttacggatggcatacatcggcaacaggcacagcagggatgcgataatcggtgcgcccatggcttcaatcaggtcaaggatgttcgggttggcgtaggcaacaacccaggtggagcccatgatgaagatcatgctgatagtgttcagtttacccagcgacactttagttttgtcgcctttataaccaaacttcaggaccaggccattcagaccttccagcgttcccagatagtgaccgaagaaagatttgaagatagccacgagtgcgatgatggaagccgcatattcagtgtaatcgcgaacgttgttttggtaccggtccgagatagtcaggttaccgatacccagtggcaggggctgatgagtcagttacgtttgcaaggcttcgatacccttgttttgcaatggacccgttacggcgatgcatttacccagccagaacagcgcacgttattgtttaagcgggccgcagctgcgcaacaggctggtctgaagcttattgtcgggctgaacgccgatccggaattttttatgcaccagaaacagtcgtccgcagcgctggaaagctatcttaatcgcctgctggctgccgatctccagcaagccagattatggagcgccgcgcctggcataacgccggatggctggtacatcagcgcggaaattgacgacctgaactggcgcagcgaagccgcccgtcagcctttgctaacatggttaaacaacgcgcagcggctgattagcgatgtttcagcaaaaccggtttatatcagtagttttttcgccggaaacatgtcgcccgatggctatcgccaactgctggaacacgttaaagcaaccggcgttaatgtctgggtacaggatggcagcggcgtggataaactgaccgctgaacagcgtgaacgttatttacaggccagcgccgattgccatgatggcgcagcaccgcatggtaaagctgttcaaactgattatcgcttaacgggcgcgtcaggtcggcacccgaaatttgtgcgccgatatacggccccagcgggctccgccgccaccagcgtagaccagcccacccccagaccaatacgtaatccggtgaggatttccggcagcgcaccgggcaaaatgacaaaccacagcacctgcgcacggctggcacccagcgactgggcggcacgaatgcgaacctgctgcacgcttttcacccccgccagcgccgacatcgccaccgcgctgccagttgatcagcaagttgcggtaattgttgacccggagaaaactcaatcagcggaaaatgccaggccacctgccccagtgtgcgcaggcgtggagaccaccagcgcgatggtgtcttttgccatcgcattcgcactgacggtggcgcttagcgcaacagcggaaaccaggcaccgccagcaaaatcaccaccgctttgacgatcatctgactcgtaccgcccagaaccaccgcagcaatagcatccagctcatagccagtccccgccgtgggttgtgcggaggagagacgcgccacttcaatgatcccggccagcgatgccagcagaccacaaagagaatagacgatgattttgattttattgacgttgataccagaaagacgcgttgccgcttcgttgccgcccagcgcgtagatgtaacgccccagacgcgtgtgatgcagcatgtaccaggccgcgaggaagacaatccccatgatccagactggcgtcggtacgcccagcggacgaccaataccaaaccagccaaacagatcggcgttctcagtaaagccggctatatcgcccagacgcacggcgatcaggggctggcagccgatcctatcaaagcgtacttcaacggcaccgcaggccagagcttcggcgtgtggaacgcgggcggcgtggaactgtacctgaccggtgatgccaacgactatgtcggtaaaggcatggcgggcggcttaatcgccattcgtcctccggttggttccgccttccgcagccatgaagcaagcattatcggcaacacctgcctgtatggcgcgaccggtggtcgtctgtatgccgcaggccgcgcgggtgaacgtttcggcgtgcgtaactccggtgctatcaccgtggtagaaggcattggcgacaacggttgtgaatatatgacgggtggtatcgtctgcattctgggtaaaaccggcgttaacttcggtgcgggcatgaccggcggtttcgcttacgttctcgatgaaagcggcgatttccgcaaacgcgttaaaacgggaactggtcggagtcttaagcgttgacgctctggcgatccatgaagagcatctgcgtggtcttatcaccgagcatgtgcagcataccggctctcagcgcggtgaagagattctggcgaactggtcaaccttcgccactaaatttgcgctgcccgcattttcgccagtgcgcagtgcgggctatcagctggaaatcttcgagcgccgcagcttttttcagttgctgcaaaagcacgataacgacgatcggctgctggcgctgttattactgaatactttcactccccgtgcgcaactcgcctcggcgcttaatttgccagaaacgtgggtagcagagcgtctgccccggttaaaacagcgttatgaacgcacttgttgcctggccagccgcctgatcctgcacggtattggaaccgagcatcgggataatcatcagcgggatgacgatcaggaactggatccacgctgcgcgcgccggaacgccgttttcgttcagttcgacggttttcttaccaaagatgccttccgggatttcggagaaattggtttcgtttcgccgactgctgaatttaccccgaaaaccgtcgaaacgccggatctgcgtaccgacctcgtctatcgcctgcgtattgtggtgaccgacgccgatgatgcgttacgccagggaatgccagtgacggtacaattcggtgacgaggcaggacatgaatga

SEQ ID NO: 135982 - DNA, 722 bp, Homo sapiens
  misc_feature (1)...(722): n = a,t,c or g
aggatacccgtttattctacactgactattccggtaaacattacggcaaacaaagcctgacaacagcgcaggtaaatgtgtcaaaatctgatgacacactcaaaatcaacggagtggaagatcacaaaacgatttttgacggagacggaaaaacatatcagaacgttcagcagtttatcgatgaaggcaattatacatccggcgacaaccatacgctgagagaccctcactacgttgaagacaaaggccataaataccttgtattcgaagccaacacgggaacagaaaacggataccaaggcgaagaatctttatttaacaaagcgtactacggcggcggcacgaacttcttccgtaaagaaagccagaagcttcagcagagcgctaaaaaacgcgatgctgagttagcgaacggcgccctcggtatcatagagttaaataatgattacacattgaaaaaagtaatgaagccgctgatcacttcaaacacggtaactgatgaaatcgagcgcgcgaatgttttcaaaatgaacggcaaatgnagaataaacacaaaagaaatcaccaatccgtatgccatgcgtttatacgaatccctgtgtcagtatcgtaagccggatggctcaggcatcgtctctctgaaaatcgactggatcatagagcgttaccagctgcctcaaagtaaccaacgtatgcctgacttccgccgccgcttcctgcag

SEQ ID NO: 135983 - DNA, 2244 bp, Homo sapiens
atggcggaaacagcggttatcaatcacaagaaacgtaaaaatagcccgcgaatcgtccagtcaaacgacctcactgaggcggcatatagtctctcccgggatcaaaaacgtatgctgtatctgttcgttgaccagatcagaaaatctgatggcaccctacaggaacatgacggtatctgcgagatccatgttgctaaatatgctgaaatattcggattgacctctgcggaagccagtaaggatatacggcaggcattgaagagtttcgcggggaaggaagtggttttttatcgccctgaagaggatgccggcgatgaaaaaggctatgaatcttttccttggtttatcaaacgtgcgcacagtccatccagagggctttacagtgtacatatcaacccatatctcattcccttctttatcgggttacagaaccggtttacgcagtttcggcttagtgaaacaaaagaaatcaccaatccgtatgccatgcgtttatacgaatccctgtgtcagtatcgtaagccggatggctcaggcatcgtctctctgaaaatcgactggatcatagagcgttaccagctgcctcaaagttaccagcgtatgcctgacttccgccgccgcttcctgcaggtctgtgttaatgagatcaacagcagaactccaatgcgcctctcatacattgagaaaaagaaaggccgccagacgactcatatcgatctggctctgaaggggctacgtgttttgctcgtggaaggtaacgacccccagggaacagcctcaatgtatcacggatgggtaccagatcttcatattcatgcagaagacactctcctgcctttctatcttggggaaaaggacgatgtcacttatgcaataaagcccacttgctggccggggcttgacattattccttcctgtctggctctgcaccgtattgaaactgagttaatgggcaaatttgatgaaggtaaactgcccaccgatccacacctgatgctccgactggccattgaaactgttgctcatgactatgatgtcatagttattgacagcgcgcctaacctgggtatcggcacgattaatgtcgtatgtgctgctgatgtgctgattgttcccacgcctgctgagttgtttgactacacctccgcactgcagtttttcgatatgcttcgtgatctgctcaagaacgttgatcttaaagggttcgagcctgatgtacgtattttgcttaccaaatacagcaatagtaatggctctcagtccccgtggatggaggagcaaattcgggatgcctggggaagcatggttctaaaaaatgttgtacgtgaaacggatgaagttggtaaagctgccccgatggtggattcgttaattgcgcgcgtaggagtaatggctcgcggtaatgccattactttgcctgtatgtggtcgggatgtgaagtttactcttgaagtgctccggggtgatagtgttgagaagacctctcgggtatggtcaggtaatgaacgtgaccaggagctgcttactgaggacgcactggatgatctcatcccttcttttctactgactggtcaacagacaccggcgttcggtcgaagagtatctggtgtcatagaaattgccgatgggagtcgccgtcgtaaagctgctgcacttaccgaaagtgattatcgtgttctggttggcgagctggatgatgagcagatggctgcattatccagattgggtaacgattatcgcccaacaagtgcttatgaacgtggtcagcgttatgcaagccgattgcagaatgaatttgctggaaatatttctgcgctggctgatgcggaaaatatttcacgtaagattattacccgctgtatcaacaccgccaaattgcctaaatcagttgttgctcttttttctcaccccggtgaactatctgcccggtcaggtgatgcacttcaaaaagcctttacagataaagaggaattacttaagcagcaggcatctaaccttcatgagcagaaaaaagctggggtgatatttgaagctgaagaagttatcactcttttaacttctgtgcttaaaacgtcatctgcatcaagaactagtttaagctcacgacatcagtttgctcctggagcgacagtattgtataagggcgataaaatggtgcttaacctggacaggtctcgtgttccaactgagtgtatagagaaaattgaggccattcttaaggaacttgaaaagccagcaccctga

SEQ ID NO: 135984 - DNA, 2079 bp, Homo sapiens
ctatccacgcccattgatgtactgccaaaaccgcatcaccatggtaatagcgatgactaatacgtagatgtactttctcttcttttttggaggagtagaatgttgagagtcagcagtagcctcatcatcactagatggcatttcttctgagcaaaacaggttttcctcattaaaggcattccaccactgctcccattcatcagttccataggttggaatcactcgaatacttctatctacttcgtcagaataagggtgtctaacagctacaatcgtgtcaaaatccttttgtccattcgaaactgcactaccaatcgcaatggcttctgcacaaacagttactcgtcctatatacgcttcaatatgtactgccgaaatgatttctcctgttttcgtacgaattgccgctcccacatgatgtttattatcctcataaagcattgtaatcttctctgtcgctacttctactaattctagatcttgttgagaaatgttaaatgttttcatatattcttcttcctccgatttctggttgctgactaattgagatgcatgctttgcatacttctgcctgctggggagcctggggactttccacaccctaactgacacacattccacagctagcgctatatgcgttgatgcaatttctatgcgcacccgttctcggagcactgtccgaccgctttggccgccgcccagtcctgctcgcttcgctacttggagccatgtcagctgtccttgctccaggatgctgtttttgacaacggatgttttattgcctttgatgttcattaagaagcttggcgcaaatgttgcctttttatcctcgaagaagcctctgtttgtcatgtagcttgtgataaccacattgttgcctttggcttgcggcactgcgaagtgagagtaagtgaatgtcacatcgtttggatcaagacccatttgcagcacaagccctgttttgttcagcggcttgtaagggccggttaaagagtttgatacataaccaagcatgtaaatatcgtttgagttaataccatcgatcgtcatttttgaaccgcgtgaatcagtgaacaagtaccatttgccgttcattttgaaaacattcgcgcgctcgatttcatcagttaccgtgtttgaagtgatcagcggcttcattacttttttcaatgtgtaatcattatttaactctatgataccgagggcgccgttcgctaactcagcatcgcgttttttagcgctctgctgaagcttctggctttctttacggaagaagttcgtgccgccgccgtagtacgctttgttaaataaagattcttcgccttggtatccgttttctgttcccgtgttggcttcgaatacaaggtatttatggcctttgtcttcaacgtagtgagggtctctcagcgtatggttgtcgccggatgtataattgccttcatcgataaactgctgaacgttctgatatgtttttccgtctccgtcaaaaatcgttttgtgatcttccactccgttgattttgagtgtgtcatcagattttgacacatttacctgcgctgttgtcaggctttgtttgccgtaatgtttaccggaatagtcagtgtagaataaacggatttttccgtcagatgtaaaggttgcagaaccggaccattcttgcgtctgatctttcaggatcggatcgttggcgtcgaacttatcgctgtctttaaagacacggcccgcgtttttccagcttttgataaaacatgtagattgatgtgtcatcagcgtctttcgggttcccgcaagagcaaacacaacgtgatagccgttgtattcagctactgttccgtcagcgttttcagcgccagctgtcccacacatcaagtccttttgcagactcaatatttttaatcgttgattgatcgaattgaggcacttggtatttttcgttttgctgctgtttagggatgtttctttgtatgctttttggttattttctttcgcgaaggcttgagtcgctcctcctgccagaagtgcagtcgtaaaagtcagaactgtggcttgttttacaatttttttgatgttcatgttcat

SEQ ID NO: 135985 - DNA, 3963 bp, Homo sapiens; identical to SEQ ID NO: 135773

SEQ ID NO: 135986 - DNA, 1683 bp, Homo sapiens
  misc_feature (1)...(1683): n = a,t,c or g
atggcggaaacagcggttatcaatcacaagaaacgtaaaaatagcccgcgaatcgtccagtcaaacgacctcactgaggcggcatatagtctctcccgggatcaaaaacgtatgctgtatctgttcgttgaccagatcagaaaatctgatggcaccctacaggaacatgacggtatctgcgagatccatgttgctaaatatgctgaaatattcggattgacctctgcggaaccagcattgaagagtttcgcggggaaggaagtggttttttatcgccctgaagaggatgccggcgatgaaaaaggctatgaatcttttccttggtttatcaaacgtgcgcacagtccatccagagggctttacagtgtacatatcaacccatatctcattcccttctttatcgggttacagaaccggtttacgcagtttcggcttagtgaaacaaaagaaatcaccaatccgtatgccatgcgtttatacgaatccctgtgtcagtatcaaacgtacggcgtctctcaaatatacaaaaatgatatactgcagatccctaaacagcagcaaaacgaaaaataccaagtgcctcaattcgatcaatcaacgattaaaaatattgagtctgcaaaaggacttgatgtgtgggacagctggccgctgcaaaacgctgacggaacagtagctgaatacaacggctatcacgttgtgtttgctcttgcgggaagcccgaaagacgctgatgacacatcaatctacatgttttatcaaaaggtcggcgacaactcaatcgacagctggaaaaacgcgggccgtgtctttaaagacagcgataagttcgacgccaacgatccgatcctgaaagatcagacgcaagaatggtccggttctgcaacctttacatctgacggaaaaatccgtttattctacactgactattccggtaaacattacggcaaacaaagcctgacaacagcgcaggtaaatgtgtcaaaatctgatgacacactcaaaatcaacggagtggaagatcacaaaacgatttttgacggagacggaaaaacatatcagaacgttcagcagtttatcgatgaaggcaattatacatccggcgacaaccatacgctgagagaccctcactacgttgaagacaaaggccataaataccttgtattcgaagccaacacgggaacagaaaacggataccaaggcgaagaatctttatttaacaaagcgtactacggcggcggcacgaacttcttccgtaaagaaagccagaagcttcagcaganggtcgactctagaggatcccacaaagacaaagaaagcagcaagacacaagtgactcatggtgatccaaccctgtgggccacaacagctgcaactcttgagcagtgggaaggaagaaaggaaggagaggggaggaaaatcctggactgtgtggccactgaggaaccaggatcaagcagagcctgggacagctttggtgtgatggtgtcactgacattctcattgtgtcttccctcctctagctatcttaatgacttggaccgcgtagctgaccctgcctacctgcctacgcaacaagatgtgcttagagttcgagtacccaccacagtcatagcatgcctgcaggtcgactctagaggaccccagctaattaacgtatgggaagagaatcagcctcattag

SEQ ID NO: 135987 - DNA, 1494 bp, Homo sapiens; identical to SEQ ID NO: 127562

SEQ ID NO: 135988 - DNA, 1257 bp, Homo sapiens; identical to SEQ ID NO: 118375

SEQ ID NO: 135989 - DNA, 726 bp, Homo sapiens
atgaacatgaacatcaaaaaaattgtaaaacaagccacagttctgacttttacgactgcacttctggcaggaggagcgactcaagccttcgcgaaagaaaataaccaaaaagcatacaaagaaacgtacggcgtctctcatattacacgccatgatatgctgcagatccctaaacagcagcaaaacgaaaaataccaagtgcctcaattcgatcaatcaacgattaaaaatattgagtctgcaaaaggacttgatgtgtgggacagctggccgctgcaaaacgctgacggaacagtagctgaatacaacggctatcacgttgtgtttgctcttgcgggaagcccgaaagacgctgatgacacatcaatctacatgttttatcaaaagtttttcgatatttttcgtgatcttttcaagaacgttgatcttaaagggttcgagcctgatgtacgtattttgcttaccaaatacagcaatagtaatggctctcagtccccgtggatggaggagcaaattcgggatgcctggggaagcatggttctaaaaaatgttgtacgtgaaacggatgaagttggtaaaggtcagatccggatgagaactgtttttgaacaggccattgatcaacgctcttcaactggtgcctggagaaatgctctttctatttgggaacctgtctgcaatgaaattttcgatcgtctgattaaaccacgctgggagattagataa

SEQ ID NO: 135990 - DNA, 2601 bp, Homo sapiens
tcacattaattgcgttgcgctcactgcccgctttccagtcgggaaacctgtcgtgccagctgcattaatgaatcggccaacgcgcggggagaggcggtttgcgtattgggcgccagggtggtttttcttttcaccagtgagacgggcaacagctgattgcccttcaccgcctggccctgagagagttgcagcaagcggtccacgctggtttgccccagcaggcgaaaatcctgtttgatggtggttccgaaatcggcaaaatcccgtgtttgaagtgatcagcggcttcattacttttttcaatgtgtaatcattatttaactctatgataccgagggcgccgttcgctaactcagcatcgcgttttttagcgctctgctgaagcttctggctttctttacggaagaagttcgtgccgccgccgtagtacgctttgttaaataaagattcttcgccttggtatccgttttctgttcccgtgttggcttcgaatacaaggtatttatggcctttgtcttcaacgtagtgagggtctctcagcgtatggttgtcgccggatgtataattgccttcatcgataaactgctgaacgttctgatatgtttttccgtctccgtcaaaaatcgttttgtgatcttccactccgttgattttgagtgtgtcatcagattttgacacatttacctgcgctgttgtcaggctttgtttgccgtaatgtttaccggaatagtcagtgtagaataaacggatttttccgtcagatgtaaaggttgcagaaccggaccattcttgcgtctgatctttcaggatcggatcgttggcgtcgaacttatcgctgtctttaaaaacacggcccgggttttttccaactgtcaattgagttggcgccgacctgagtgatcttgcgacagccgtttcatctctgctcctcaatttatccatctgtaaagtgaatataacattactcatctcatagggtttggactggattctttctgctcttgacattgcactacctgatccagaaacggaatcctggctgggtgctttccagatctggacataacctccatgcagagaaatcaccttgaaagctgcttctctcactacacctcggggtgaagaaaaaagagcaacaactgatttaggcaatttggcggtgttgatacagcgggtaataatcttacgtgaaatattttccgcatcagccagcgcagaaatatttccagcaaattcattctgcaatcggcttgcataacgctgaccacgttcataagcacttgttgggcgataatcgttacccaatctggataatgcagccatctgctcatcatccagctcgccaaccagaacacgataatcactttcggtaagtgcagcagctttacgacggcgactcccatcggcaatttctatgacaccagatactcttcgaccgaacgccggtgtcttattcacaatgggggtgcacagccactcttcatcaaatttgcccattaactcagtttcaatacggtgcagagccagacaggaaggaataatgtcaagccccggccagcaagtgggctttattgcataattgacatcgtccttttccccaagatagaaaggcaggagagtgtcttctgcatgaatatgaagatctggtacccatccgtgatacattgaggctgttccctgggggtcgttaccttccacgagcaaaacacgtagccccttcagagccagatcctgagcaagatgaacagaaactgaggttttgtaaacgccacctttatgggcagcaaccccgatcaccggtggaaatacgtcttcagcacgtcgcaatcgcgtaccaaacacatcacgcatatgattaatttgttcaattgtataaccaacacgttgctcaacccgtcctcgaatttccatatccgggtgcggtagtcgccctgctttctcggcatctctgatagcctgagaagaaaccccaactaaatccgctgcttcacctattctccagcgcccggttattttcctcgcttccgggctgtcatcattaaactgtgcaatggcgatagccttcgtcatttcatgaccagcgtttatgcactcctgattggagattagggatgctgctcgacagctgcagtccccccagcaaggagtggccctgccctgaatatcagcagagccgaagttgagaagccctgctctatcgttagcctccctgctgcccatgcttccagaagttgccttatttttccactttctctttcccagagccccagttcccagagtgtcctctccaggcaccttcccataaactcgccagcgcacactgggcaggagcagggggccattctggagatgcctgagaagggtgtgtcttgccagtgttttgaccacacctctctgaggagaaccactaaagcctgggtcccttgaaggaacatattctgatgaaggggcatcacaaggacttggcagaggggcctttcctgactgtccacgcaggaccctagctgccatttttgctcctctactgtgatgagtgctcatatgtctctgagcactcatcacaaagctgaggtttgcagcttgcttcttgcctgtccccat

SEQ ID NO: 135991 - DNA, 1194 bp, Homo sapiens
atgcaagaaatcagtagtttgggcaaatacttcatcaaatgtgcaaacagaagacttgatgtgtgggacagctggccgctgcaaaacgctgacggaacagtagctgaatacaacggctatcacgttgtgtttgctcttgcgggaagcccgaaagacgctgatgacacatcaatctacatgttttatcaaaagatcagaaaatctgatggcaccctacaggaacatgacggtatctgcgagatccatgttgctaaatatgctgaaatattcggattgacctttgcggaagccatgcttatcgaacgtggtcagcgttatgcaagccgattgcagaatgaatttgctggaaatatttctgcgctggctgatgcggaaaatatttcacgtaagattattacccgctgtatcaacaccgccaaattgcctaaatcagttgttgctcttttttctcaccccggtgaactatctgcccggtcaggcacagtaacagctgccaatgccagtacactgaatgatggagcagctgctcctgtcgggaaaccggtcgtgccagctgcattaatgaatcggccaaccgcgcgggagaggcggtttgcgtattgggcgccagggtggtttttcttttcaccagtgagaccggcaacagctgattgcccctcaccccctggccctgagagagttgaagcaagcggtccaccctggtctcccattgaaactgttgctcatgactatgatgtcatagttattgacagcgcgcctaacctgggtatcggcacgattaatgtcgtatgtgctgctgatgtgctgattgttcccacgcctgctgagttgtttgactacacctccgcactgcagtttttcgatatgcttcgtgatctgctcaagaacgttgatcttaaagggttcgagcctgatgtacgtattttgcttaccaaatacagcaatagtaatggctctcagtccccgtggatggaggagcaaattcgggatgcctggggaagcatggttctaaaaaatgttgtacgtgaaacggatgaagttggtaaaggtcagatccggatgaaaacttgttttgaacaggccattgatcaacgctcttcaactggtgcctggagaaatgctttttctatttgggaacctgtctgcaatgaaaatttcgatcgtctgaataaaccacgctgggagattagataa

SEQ ID NO: 135992 - DNA, 1248 bp, Homo sapiens
tcactgcccgctttccagtcgggaaacctgtcgtgccagctgcattaatgaatcggccaacgcgcggggagaggcggtttgcgtattgggcgccagggtggtttttcttttcaccagtgagacgggcaacagctgattgcccttcaccgcctggccctgagagagttgcagcaagcggtccacgctggtttgccccagcaggcgaaaatcctgtttgatgggggttccgaaatcggcaaaatccattatacgaatttttgaaccgaagatccgtgaacagtccatttgccgttcattttgaaacattcgcgcgctcgatttatcagttaccgtgtttgaagtgatcagcggcttcattacttttttcaatgtgtaatcattatttaactctatgataccgagggcgccgttcgctaactcaggggggcgttttttagcgctctgctgaagcttctggctttctttacggaagaagttcgtgccgccgccgtagtacgctttgttaaataaagattcttcgccttggtatccgttttctgttcccgtgttggcttcgaatacaaggtatttatggcctttgtcttcaacgtagtgagggtctctcaacgtatggttgtcgccggatgtataattgccttcatcgataaactgctgaacgttctgatatgtttttccgtctccggcaaaaatcggtttgtgatcttcccctccggtggatttgagtgtggcatcagaatttgacccatttacctgcgctggtggcaggctttttttgccggaatgattaccggaatagtcagtgtagaataaacggttttttcctcccaagtaaaggtggagaaaccgacccatcgtgtttgaagtgatcagcggcttcattacttttttcaatgtgtaatcattatttaactctatgataccgagggcgccgttcgctaactcagcatctttttttttagcgctctgctgaagcttctggctttctttacgggagaagttcgtgccgccgccgtagtacgctttgttaaataaagattcttcgccttggtatccgttttctgttcccgtgttggcttcgaatacaaggtatttatgggctttgtcttcaacgtagtgagggtctctcaacgtatggttgtcgccggatgtataattgccttcatcgataaactgctgaacgttctgatatgttttttcgtctccgtcaaaaatcggtttgtgatcttccactcccctcttgttcttcat

SEQ ID NO: 135993 - DNA, 1428 bp, Homo sapiens
atggagaaaaaaatcactggatataccaccgttgatatatcccaatggcatcgtaaagaacattttgaggcatttcagtcagttgctcaatgtacctataaccagaccgttcagctggatattaaaaaaaaattaaagaccgtaaagaaaaataagcacaagttttatccggcctttattcacattcttgcccgcctgatgaatgctcatccggagttccgtatggcaatgaaagacgtagctgaatacaacggctatcacgttgtgtttgctcttgcgggaagcccgaaagacgctgatgacacatcaatctacatgttttatcaaaaggtcggcgacaactcaatcgacagctggaaaaacgcgggccgtgtctttaaagacagcgataagttcgacgccaacgatccgatcctgaaagatcagacgcaagaatggtccggttctgcaacctttacatctgacggaaaaatccgtttattctacactgactattccggtaaacattacggcaaacaaagcctgacaacagcgcaggtaaatgtgtcaaaatctgatgacacactcaaaatcaacggagtggaagatcacaaaacgatttttgacggagacggaaaaacatatcagaacgttcagcagtttatcgatgaaggcaattatacatccggcgacaaccatacgctgagagaccctcactacgttgaagacaaaggccataaataccttgtattcgaagccaacacgggaacagaaaacggataccaaggcgaagaatctttatttaacaaagcgtactacggcggcggcacggcttcttccatcagaaaatctgatggcaccctacaggaacatgacggtatctgcgagatccatgttgctaaatatgctgaaatattcggattgacctctgcggaagccagtaaggatatacggcaggcattgaagagtttcgcggggaaggaagtggttttttatcgccctgaagaggatgccggcgatgaaaaaggctatgaatcttttccttggtttatcaaacgtgcgcacagtccatccagagggctttacagtgtacatatcaacccatatctcattcccttctttatcgggttacagaaccggtttacgcagtttcggcttagtgaaacaaaagaaatcaccaatccgtatgccatgcgtttatacgaatccctgtgtcagtatcgtaagccgcatggctcaggcatcgtctctctgaaaatcgaatggatcatagagcgttaccagctgcctcaaagttaccagcgtatgcctgacttccgccgccgcttcctgcagactgccaagggaaggcatctgatatggagctttgatcatctggttgatagagggcataagaatggcacaaaggaagttgtggagtatttactggtttgggagaggactctttaa

SEQ ID NO: 135994 - DNA, 2787 bp, Homo sapiens; identical to SEQ ID NO: 127569

SEQ ID NO: 135995 - DNA, 1470 bp, Homo sapiens; identical to SEQ ID NO: 127570
  misc_feature (1)...(1470): n = a,t,c or g

SEQ ID NO: 135996 - DNA, 3288 bp, Homo sapiens; identical to SEQ ID NO: 135775

SEQ ID NO: 135997 - DNA, 1932 bp, Homo sapiens; identical to SEQ ID NO: 119300
  misc_feature (1)...(1932): n = a,t,c or g

SEQ ID NO: 135998 - DNA, 4289 bp, Homo sapiens
  misc_feature (1)...(4289): n = a,t,c or g
tttggcattacttgaaagatttggagatgagaggcgtcaatgtcaagtggcctgaggatatttggcaaaaccaggccggatttgccgatttggaaacaccacaaacagattttcgctgctggggcaaacaagggtggccgcttgctgcactctctcagggccaggcgggattttgccgatttcggaaccaccatcaaacaggattttcgcctgctggggcaaaccagcgtggaccgcttgctgcaactctctcagggccaggcggtgaagggcaatcagctgttgcccgtctcactggtgaaaagaaaaaccaccctggcgcccaatacgcaaaccgcctctccccgcgcgttggccgattcattaatgcagctggcacgacaggtttcccgactggaaagcgggcagtgagcgcaacgcaattaatggattttgccgatttcggaaccaccatcaaacaggattttcgcctgctggggcaaaccagcgtggaccgcttgctgcaactctctcagggccaggcggtgaagggcaatcagctgttgcccgtctcactggtgaaaagaaaaaccaccctggcgcccaatacgcaaaccgcctctccccgcgcgttggccgattcattaatgcagctggcacgacaggtttcccgactggaaagcgggcaagcccttgctccaggggaagccagctgccgtgtttttttcgatatgcttcgtgatctgctcaagaacgttgatcttaaagggttcgagcctgatgtacgtattttgcttaccaaatacagcaatagtaatggctctcagtccccgtggatggaggagcaaattcgggatgcctggggaagcatggttctaaaaaatgttgtacgtgaaacggatgaagttggtaaagccctgccggtgaaatatccagatggtggtgttaaccctggagggggtccaggtccagcactgccagggcagaactttggaacactttgtgcagggtccctcagtggcagtcacaactatgcacttcctgtgaaatataatgcacagctgaagatgaacaacaggcaactgaaagccaggaatgcaagccacagggactcttcagttacatgcagtgaagctctcatcacctccagctggaggatgtggaaagccaaggaccatgcccaggactttaagtcagagtggctgactcaaccaagacagtcttgtaaattccctgaagcactattttattacttgattggttcaagttttcatgaactgcctctccaactagtacataaaccccaagtggaagaaatgattatgtgtgctcattttacgtggcagccccagtgcccatgccagtgcctggcaacatcacttaataatgcacagctgaagatgaacaacaggcaactgaaagccaggaatgcaagccacagggactcttcagttacatgcagtgaagctctcatcacctccagctggaggatgtggaaagccaaggaccatgcccaggactttaagtcagagtggctgactcaaccaagacagttcccaaatcctggtagctgccatcagcccccttcagatcagaaagtagcggggtcctttagagtcactgtgcaagttgcaaccagttttttgcagggtctcttccagcctgtcggcgacaactcaatcgacagctggaaaaacgcggnccgtgtctttaaagacagcgataagttcgacgccaacgatccgatcctgaaagatcagacgcaagaatggtccggttctgcaacctttacatctgacggaaaaatccgtttattctacactgactattccggtaaacattacggcaaacaaagcctgacaacagcgcaggtaaatgtgtcaaaatctgatgacacactcaaaatcaacggagtggaagatcacaaaacgatttttgacggagacggaaaaacatatcagaacgttcagcagtttatcgatgaaggcaattatacatccggcgacaaccatacgctgagagaccctcactacgttgaagacaaaggccataaataccttgtattcgaagccaacacgggaacagaaaacggataccaaggcgaagaatctttatttaacaaagcgtactacggcggcggcacgaacttcttccgtaaagaaagccagaagcttcagcagagcgctaaaaaacgcgatgctgagttagcgaacggcgccctcggtatcatagagttaaataatgattacacattgaaaaaagtaatgaagccgctgatcacttcaaacacggtaactgatgaaatcgagcgcgcgaatgttttcaaaatgaacggcaaatggcattccaagatccttgtatcagggacccacagggcacgaacagaggtagaggtgactgacccgattcatcagcagagaatgggctgctgtttcaccgtgggagcaggagaaatatgtgagaaacccactgggtgcttttttactcccttgcccaattgtaactgtcagtggacagggtcagcaatcctggacagacgttctcattcccatcctcattccccagcttctgggagttgggtgaaggtggtgactggcagctatcagctgacccactctccaggaattggcctaagggattttgccgatttcggaaccccccatcaaacaggattttcgcctgctggggcaaaccagcgtggaccgcttgttgcaactctctcagggccaggcggtgaagggcaatcagctgttgcccgtctcactggtgaaaagaaaaaccaccctggcgcccaatacgcaaaccgcctctccccgcgcgttggccgattcattaatgcagctggcacgacaggtttcccgactggaaagcgggcagtgagcgcaacgcaattaatgcatttcaagatccttgtatccagggcccacagggcacgaacagagttagaggtgactgaccccggatcatcagcagagaatgggctgctgtttcccgtcgttttgctcttgcggaaagcccgaaagacgttgatgccacctcattctacatgttttatcaaaaggtcggcgccaactcaatcgacagctggaaaaacgcggccccgtgttttaaaagacagcgataagtttgacgccaacgatccgatcctgaaagatcagacgcaagaatggtccggttctgcaccctttacatctgacggaaaaatccgtttattctacactgactattccggtaaacattacggcaaacaaagcctgacaacagcgcaggtaaatgtgtcaaaatctgatgacacactcaaaatcaacggagtggaagatcacaaaacgatttttgacggagacggaaaaacatatcagaacgttcagcagtttatcgatgaaggcaattatacatccggcgacaaccatacgctgagagaccctcactacgttgaagacaaaggccataaataccttgtattcgaagccaacacgggaacagaaaacggataccaaggcgaagaatctttatttaacaaaagcgtactacggcggcggcacgaacttcttccggattttgccgatttcggacccaccatcaaacaggattttcgcctgctggggcaaaccagcgtggaccgcttgctgcaactctctcagggccaggcggtgaagggcaatcagctgttgcccgtctcactggtgaaaagaaaaaccaccctggcgcccaatacgcaaaccgcctctccccgcgcgttggccgattcattaatgcagctggcacgacaggtttcccgactggaaagcgggcaggattttgccgatttcggaaccaccatcaaacaggattttcgcctgctggggcaacccagcgtggaccgcttgctgcaactctctcagggccaggcggtgaagggcaatcagctgttgcccgtctcactggtgaaaagaaaaaccaccctggcgcccaatacgcaaaccgcctctccccgcgcgttggccgattcattaatgcagctggcacgacaggtttcccgactggaaagcgggcacgcgcctaacctgggtatcggcacgattaatgtcgtatgtgctgctgatgtgctgattgttcccacgcatgatgagttgttagactacacctccgcactgcagtttttcgatatgcttcgtgatctgctcaagaacgttgatcttaaagggttcgagcctgatgtacgtattttgcttaccaaatacagcaatagtaatggctctcagtccccgtggatggaggagcaaattccgccatgcctggggaagcatggttctaaaaaatgttgtacgtga

SEQ ID NO: 135999 - DNA, 891 bp, Homo sapiens
gctttgcagaactttcagcggtataccggcatacagcatgtgcatcgcataggaatggcggaacgtatgtggtgtgaccggaacagagaacgtcacaccgtcagcagcagcggcggcaaccgcctccccaatccaggtaaggatatagggcaggcattgaagagtttcgcggggaagaaagtggttttttatcgccctgaagaggatgccggcgatgaaaaaggctatgaatctttcccttggtttatcaaacgtgcgcacagtccatccagagggctttacagtgtacatatcaacccatatctcattcctttctttatcgggttacagaaccggtttacgcagtttcggcttagtgaaacaaaagaaatcaccaatccgtatgccatgcgtttatacgaatccctgtgtcagtatcaaaacggataccaaggcgaagaatctttatttaacaaagcgtactacggcggcggcacgaacttcttccgtaaagaaagccagaagcttcagcagagcgctaaaaaacgcgatgctgagttagcgaacggcgccctcggtatcatagagttaaataatgattacacattgaaaaaagtaatgaagccgctgatcacttcaaacacggtaactgatgaaatcgagcgcgcgaatgttttcaaaatgaacggcaaatggtacttgttcactgattcacgcggttcaaaaatgacgatcgatgtgccgcaagccaaaggcaacaatgtggttatcacaagctacatgacaaacagaggcttcttcgaggataaaaaggcaacatttgcgccaagcttcttaatgaacatcaaaggcaataaaacatccgttgtcaaaaacagcatcctggagcaaggacagctgacagtcaactaa

SEQ ID NO: 136000 - DNA, 1866 bp, Homo sapiens
  misc_feature (1)...(1866): n = a,t,c or g
atgctgggaaagaagaagccagtctgcgaggtaggaggagactctggggtccccaagaaagagttccaagaagggaggcaggtcctgttcaaactatggagagggcaagcaaacaaggtcggcgacaactcaatcgacagctggaaaaacgcgggccgtgtctttaaagacagcgataagttcgacgccaacgatccgatcctgaaagatcagacgcaagaatggtccggttctgcaacctttacatctgacggaaaaatccgtttattctacactgactattccggtaaacattacggcaaacaaagcctgacgacagcgcaggtaaaggtgtcaaaatctgatgacacactcaaaatcaacggagtggaagatcacaaaacgatttttgacggagacggaaaaacatatcataacgttcagcagtttatcgatgaaggcaattatacatccggcgacaaccatacgctgagagaccctcactacgttgaagacaaaggccataaataccttgtattcgaagccaacacgggaacagaaaacggataccaaggcgaagaatctttatttaacaaagcgtactacggcggcggcacgaacttcttccgtaaagaaagccagaagcttcagcagagcgctaaaaaacgcgatgctgagttagcgaacggcgccctcggtatcatagagttaaataatgattacacattgaaaaaagtagtgaagccgctgatcacttcaaacacngatctggctctgaaggggctacgtgttttgctcgtggaaggtaacgacccccagggaacagcctcaatgtatcacggatgggtaccagatcttcatattcatgcagaagacactctcctgcctttctatcttggggaaaaggacgatgtcacttatgcaataaagcccacttgctggccggggcttgacattattccttcctgtctggctctgcaccgtattgaaactgagttaatgggcaaatttgatgaaggtaaactgcccaccgatccacacctgatgctccgactggccattgaaactgttgctcatgactatgatgtcatagttattgacagcgcgcctaacctgggtatcggcacgattaatgtcgtatgtgctgctgatgtgctgattgttcccacgcctgctgagttgtttgactacacctccgcactgcagtttttcgatatgcttcgtgatctgctcaagaacaacgttcagcagtttatcgatgaaggcaattatacatccggcgacaaccatacgctgagagaccctcactacgttgaagacaaaggccataaataccttgtgtgcgaagccaacacgggaacagaaaacggataccaaggcgaagaatctttatttaacaaagcgtactacggcggcggcacgaacttcttccgtaaagaaagccagaagcttcagcagagcgctaaaaaacgcgatgctgagttagcgaacggcgccctcggtatcatagagttaaataatgattacacattgaaaaaagtaatgaagccgctgatcacttcaaacacggtaactgatgaaatcgagcgcgcgaatgttttcaaaatgaacggcaaatggtacttgttcactgattcacgcggttcaaaaatgacgatcgatggtattaactcaaacgatatttacatgcttggttatgtatcaaactctttaaccggcccttacaagccgctgaacaaaacagggcttgtgctgcaaatgggtcttgatccaaacgatgtgacattcacttactctcacttcgcagtggcgcaagccaaaggcaaacatggtggttatcacaagctacatgacaaacagaagcttctttcgagaagactttggtga

SEQ ID NO: 136001 - DNA, 1794 bp, Homo sapiens
atgatcgcgtatcgaatagtggtccaaggagcgaagcgagcagggctgggcggcggccaaagcggtcggacagtgctccgagaacggcacgccatagtgactggcgatgctgtcggaatggacgatatccggcaagaggcccggcagtaccggcataaccaagcctatgcctacagcatccagggtgacggtgccgaggatgacgatgagcgcattgttagatttcatacacgggtcaccgtcgacactgacacacttgcatcggatgcagcccggttaacgtgccggcacggcctgggtaaccaggtattttgtccacataaccgtgcgcaaaatgttgggataagcaggacacagcagcaatccacagcaggcatacaaccgcacaccgaggtatctccgtttacacggtgcccatcaatgcactcattgttggacatttgggttaagattgtggcgataatcaatagcttaccaaccaaaaagagtccaggtccagatggattcacagccgaatttaccaggaggtacaaggaggaactgcgaccattccttttgaaactattccaatcaatagaaaaagagggaatcctccctaactcattttatgaggccagcatcattctgataccaaagccaggcagagacacaacaaaaaaagagaattttagaccaatatccttgatgaacattgatgcaaaaatcctcaataaaatactggcaaaacgaatccagcagcacatcaaaaagcttatccaccatgatcaagtgggcttcatccctgggatgcaaggctggttcaatatacgcaaatcaataaatgtaatccagcatataaacagagccaaagacaaaaaccacatgattatctcaatagatgcagaaaaagcctttgacaaaattcaacaacccttcatgctaaaaactctcaagaaattaggtattgatgacagatcaatgagacagaaaattatcaaggatatccaggacttgaactcagcactggaccaagcagatctaatagacatctacagaactcgacaccccacaggtggtgggtccctccaaaaagtcgagatccttaaccagcagcgaaacgaaaaataccaagtgcctcaattcgatcaatcaacgattaaaaatattgagtctgcaaaaggacttgatgtgtgggacagctggccgctgcaaaacgctgacggaacagtagctgaatacaacggctatcacgttgtgtttgctcttgcgggaagcccgaaagacgctgatgacacatcaatctacatgttttatcaaaaggtcggcgacaactcaatcgacagctggaaaaacgcgggccgtgtctttaaagacagcgataagttcgacgccaacgatccgatcctgaaagatcagacgcaagaatggtccggttctgcaacctttacatctgacggaaaaatccgtttattctacactgactattccggtaaacattacggcaaacaaagcctgacaacagcgcaggtaaatgtgtcaaaatctgatgacacactcaaaatcaacggagtggaagatcacaaaacgatttttgacggagacggaaaaacatatcagaacgttcagcagtttatcgatgaaggcaattatacatccggcgacaaccatacgctgagagaccctcactacgttgaagacaaaggccataaggggaagctctttagtttaattagatcccatttgtcaattttggcttctgttgccattgcttttggtgttttggacatgaagtacttgcccatgcctatgtcctga

SEQ ID NO: 136002 - DNA, 1314 bp, Homo sapiens
  misc_feature (1)...(1314): n = a,t,c or g
atggtggattcgttaattgcgcgcgtaggagtaatggctcgcggtaatgccattactttgcctgtatgtggtcgggatgtgaagtttactcttgaagtgctccggggtgatagtgttgagaagacctctcgggtttggtcagggctgttggagctcctgaaagctgctgctagtctggtgttcctggagcaacacaagccttatgaggaaattgggacaagtttcggttctgttttggtctcagttgtaggggaaggaccatttgtggaggaagacctgagaaagagctttccaggcagatgggacaaaaagcacaaaatgtttgatgcaattgaggaaccaaagaaagacagcgataagttcgacgccaacgatccgatcctgaaagatcagacgcaagaatggtccggttctgcaacctttacatctgacggaaaaatccgtttattctacactgactattccggtaaacattacggcaaacaaagcctgacaacagcgcaggtaaatgtgtcaaaatctgatgacacactcaaaatcaacggagtggaagatcacaaaacgatttttgacggagacggaaaaacatatcagaacgttcagcagtttatcgatgaaggcaattatacatccggcgacaaccatacgctgagagaccctcactacgttgaagacaaaggccataaataccttgtattcgaagccaacacgggaacagaaaacggataccaaggcgaagaatctttatttaacaaagcgtactacggcggcggcacgaacttcttccgtaaagaaagccagaagcttcagcagagcgctaaaaaacgcgatgctgagttagcgaacggcgccctcggtatcatagagttaaaatatgattacacattgaaaaaagtaatgaaagccgctgatcactttcaaacaccggtaactgatgaaatcgagcgcgcgaatgttttcaaaatgaacggcanatgtcaggcaccgtgtatgaaatctaacaatgcgctcatcgtcatcctcggcaccgtcaccctggatgctgtaggcataggcttggttatgccggtactgccgggcctcttgcgggatatcgtccattccgacagcatcgccagtcactatggcgtgctgctagcgctatatgcgttgatgcaatttctatgcgcacccgttctcggagcactgtccgaccgctttggccgccgcccagtcctgctcgcttcgctacttggagccactatcgactacgcgatcatggcgaccacacccgtcctgtggatctacccactagtcaattcaccatcttgttga

SEQ ID NO: 136003 - DNA, 1512 bp, Homo sapiens
tcaactgctgctaggaggtgtctcccagtcaggaggcacaggggtcagggatccacttgaggaggcagtctgtcccttagcagagctcgagcactgtgctaggaggtccgctgctgtcttcagagccttaggtaaatcttcagagtctaattcttgtgttactatactttcttcctggaagaagccttgatttttggtatcttctgactgtgagctgctgagtttctttgaagtgaattcgttagcatctaagaagctgttatcaagtctttggctttgtaaattcgtgtttgaagtgatcagcggcttcattacttttttcaatgtgtaatcattatttaactctatgataccgagggcgccgttcgctaactcagcatcgcgttttttagcgctctgctgaagcttctggctttctttacggaagaagttcgtgccgccgccgtagtacgctttgttaaataaagattcttcgccttggtatccgttttctgttcccgtgttggcttcgaatacaaggtatttatggcctttgtcttcaacgtagtgagggtctctcagcgtatggttgtcgccggatgtataattgccttcatcgataaactgctgaacgttctgatatgtttttccgtctccgtcaaaaatcgttttgtgatcttccactccgttgattttgagtgtgtcatcagattttgacacatttacctgcgctgttgtcaggctttgtttgccgtaatgtttaccggaatagtcagtgtagaataaacggatttttccgtcacatgtaaaggttgcagaaccggaccattcttgcgtctgatctttcaggatcggatcgttggcgtcgaacttatcgctgtctttaaagacacggcccgcgtttttccagctgtcgattgagttgtcgccgacgtgatagccgttgtattcagctactgttccgtcagcgttttgcagcggccagctgtcccacacatcaagtccttttgcagactcaatatttttaatcgttgattgatcgaattgaggcacttggtatttttcgttttgctgctgtttagggatctgcagcatatcatggcgtgtaatatgagagacgccgtacgtttctttgtatgctttttggttattttctttcgcgaaggcttgagtcgctcctcctttctctctggctgcccttaacattttttccttcatttcaactttggtgaatctgacaattatatgtcttggagttgctcttctcgaggagtatctttgtggcgttctctgtgtttcctgaatctgaacgttggcctgccttgctagattggggaagttctcctggataacatcctgcagagtgttttccaacttggttccattctccccatcactttcaggtacaccaatcagacgtagatttggtcttttcacatagtcccatatttcttggaggctttgctcatttctttttattcttttttctctaaacttcccttcttgcttcatttcattcatttcatcttccat

SEQ ID NO: 136004 - DNA, 1869 bp, Homo sapiens; identical to SEQ ID NO: 127584
  misc_feature (1)...(1869): n = a,t,c or g

SEQ ID NO: 136005 - DNA, 1690 bp, Homo sapiens; identical to SEQ ID NO: 135778

SEQ ID NO: 136006 - DNA, 1032 bp, Homo sapiens
atgacccacaaccaggggaaaaatcaatcaatagaaatataccccaaaatgacactgatgattgaattagcagacaaagacattaaaatacttattataattatactccatatgttcaaaaaggtacagaggagcatggacatcatgcaggaaaagtcctccaccatgccggaatccacttgcatttctggcaagaaggttgtttacgctcaaggtctacagggatggaagtggcacccaatgagagggctctgccgatggagctgtgaaggcgtcgacctcattctgacgggcttgttgagactgtgtgtcgctgtcgtttgcgacaactcaatcgacagctggaaaaacgcgggccgtgtctttaaagattgttttaagttcgacgccaacgatccgatcctgaaagatcagacgcaagaatggtccggttctgcaacctttacatctgacggaaaaatccgtttattctacactgactattccggtaaacattacggcaaacaaagcctgacaacagcgcaggtaaatgtgtcaaaatctgatgacacactcaaaatcaacggagtggaagatcacaaaacgatttttgacggagacggaaaaacatatcagaacgttcagcagtttatcgatgaaggcaattatacatccggcgacaaccatacgctgagagaccctcactacgttgaagacaaaggccataaataccttgtattcgaagccaacacgggaacagaaaacggataccaaggcgaagaatctttatttaacaaagcgtactacggaggcggcacgaacttcttccgtaaagaaagccagaagcttcagcagagcgctaaaaaacgcgatgctgagttagcgaacggcgccctcggtatcatagagttaaataatgattacacattgaaaaaagtaatgaagccgctgatcactttaaacacggtaactgatgaaatcgatcgcgcgaatgttttcaaaatgaacagtaaatggtacttgttcatagaggatccccattcacccatgtaa

SEQ ID NO: 136007 - DNA, 1974 bp, Homo sapiens; identical to SEQ ID NO: 135785

SEQ ID NO: 136008 - DNA, 1629 bp, Homo sapiens
ttagttgactgtcagctgtccttgctccaggatgctgtttttgacaacggatgttttattgcctttgatgttcattaagaagcttggcgcaaatgttgcctttttatcctcgaagaagcctctgtttgtcatgtagcttgtgataaccacattgttgcctttggcttgcggcactgcgaagtgagagtaagtgaatgtcacatcgtttggatcaagacccatttgcagcacaagccctgttttgttcagcggcttgtaagggccggttaaagagtttgatacataaccaagcatgtaaatatcgtttgagttaataccatcgatcgtcatttttgaaccgcgtgaatcagtgaacaagtaccatttgccgttcattttgaaaacattcgcgcgctcgatttcatcagttaccgtgtttgaagtgatcagcggcttcattacttttttcaatgtgtaatcattatttaactctatgataccgagggcgccgttcgctaactcagcatcgcgttttttagcgctctgctgaagcttctggctttctttacggaagaagttcgtgccgccgccgtagtacgctttgttaaataaagattcttcgccttggtatccgttttctgttcccgtgttggcttcgaatacaaggtatttatggcctttgtcttcaacgtagtgagggtctctcagcgtatggttgtcgccggatgtataattgccttcatcgataaactgctgaacgttctgatatgtttttccgtctccgtcaaaaatcgttttgtgatcttccactccgttgattttgagtgtgtcatcagattttgacacatttacctgcgctgttgtcaggctttgtttgccgtaatgtttaccggaatagtcagtgtataataaacggatttttccgtcagatgtaaaggttgcagaaccggaccattcttgcgtctgatctttcaggatcggatcgttggcgtcgaacttatcgctgtctttaaagacacggcccgcgtttttccagctgtcgattgagttgtcgccgaccttttgataaaacatgtagattgatgtgtcatcagcgtctttcgggcttcccgcatgagcaaacacaacgtgatagcacgtgtattcagctactgttccgtcagcgttttgcagcggccagctgtcccacacatcaagtccttttgcagactcaatatttttaatcgttgattgatcgaattgaggcacttggtatttttcgttttgctgctgtttacggatctgcagcatatcatggcgtgtaatatgagagaccccgtacgtttctttgatcgcttttggatattttctttcgcgaaggcttgagtcgctcctccctaaaaattgtgcccctgcaggacccatttctaccagcctactggctaatccctctccttccaccatggggggtgggttggccagtttatgtctctttaccaaacggcaggtgattcgagtgggggccgtacacttgcgtggaggaatgatgattctcatcccgtgatgacggcttcctctcatggagccccctctcgcgtccaccataaagctaaccagaaacccagttattcccccgcgtttgattataaaggtttcctggaacggaatcat

SEQ ID NO: 136009 - DNA, 1810 bp, Homo sapiens; identical to SEQ ID NO: 135787

SEQ ID NO: 136010 - DNA, 979 bp, Homo sapiens
ttaatagacagaaggctggctatgaggatccccctcgatttcatcagttaccgtgtttgaagtgatcagcggcttcattacttttttcaatgtgtaatcattatttaactctatgataccgagggcgccgttcgctaactcagcatcgcgttttttagcgctctgctgaagcttctggctttctttacggaagaagttcgtgccgccgccgtagtacgctttgttaaataaagattcttcgccttggtatccgttttctgttcccgtgttggcttcgaatacaaggtatttatggcctttgtcttcaacgtagtgagggtctctcagcgtatggttgtcgccggatgtataattgccttcatcgataaactgctgaacgttctgatatgtttttccgtctccgtcaaaaatcgttttgtgatcttccactccgttgattttgagtgtgtcatcagattttgacacatttacctgcgctgttgtcaggctttgtttgccgtaatgtttaccggaatagtcagtgtagaataaacggatttttccgtcagatgtaaaagttgcagaaccggaccattcttgcgtctgatctttcaggatcggatcgttggcgttcaacttatcgctggctttaaagacaccggcccgcgttttttcaactgtcgattgagttgtcgccccccccacccatgccacatgcccagacacctgtggggactgcttttgcttatcagggcttgttttgcctttgccctcctctgactcctggtccacacccagctccttgttgctgtttgctctgtccgaaacgaagatgatgggccgttcttccgtggccatgccaccatgaacaccaagcgacgagagccctggctctttggggaggaacacacccgactcatccgagaagccatcagagagcgctatggcctcctgccatattggtattctctgttctaccatgcacacgtggcttcccaac

SEQ ID NO: 136011 - DNA, 1203 bp, Homo sapiens
ttagttgactgtcagctgtccttgctccaggatgctgtttttgacaacggatgttttattgcctttgatgttcattaagaagcttggcgcaaatgttgcctttttatcctcgaagaagcctctgtttgtcatgtagcttgtgataaccacattgttgcctttggcttgcggcactgcgaagtgagagtaagtgaatgtcacatcgtttggatcaagacccatttgcagcacaagccctgttttgttcagcggcttgtaagggccggttaaagagtttgatacataaccaagcatgtaaatatcgtttgagttaataccatcgatcgtcatttttgaaccgcgtgaatcagtgaacaagtaccatttgccgttcattttgaaaacattcgcgcgctcgatttcatcagttaccgtgtttgaagtgatcagcggcttcattacttttttcaatgtgtaatcattatttaactcatggtatccgttttctgttcccgtgttggcttcgaatacaaggtatttatggcctttgtcttcaacgtagtgagggtctctcagcgtatggttgtcgccggatgtataattgccttcatcgataaactgctgaacgttctgatatgtttttccgtctccgtcaaaaatcgttttgtgatcttccactccgttgattttgagtgtgtcatcagattttgacacatttacctgcgctgttgtcaggctttgtttgccgtaatgtttaccggaatagtcagtgtagaataaacggatttttccgtcagatgtaaaggttgcagaacctggaccattcttgcgtctgatcttttgataaaacatgtagattgatgtgtcatcagcgtctttcgggcttcccgcaagagcaaacacaacgtgatagccgttgtattcagctactgttccgtcagcgttttgcagcggccagctgtcccacacatcaagtccttttgcagactcaatatttttaatcggggggggatcgaattgaggcacttggtattgtttttttttctgctggttagggatctgcagcatatcatggcgtgtgggatgagagacgccgtacgtttctttgtatgctttaaaaatattttctttcgcgaaggcttgagtcgctcctcctgccagaagtgcagtcgtaaaagtcagaactgtggcttgttttacaatttttttgatggtcatgttcat

SEQ ID NO: 136012 - DNA, 1018 bp, Homo sapiens
ggagggaagcgactcaagggccttcgcgaaagaaaataaccaaaaagcatacaaagaaacgtacggcgtctctcatattacacgccatgatatgctgcagatccctaaacagcagcaaaacgaaaaataccaagtgcctcaattcgatcaatcaacgattaaaaatattgagtctgcaaaaggacttgatgtgtgggacagctggccgctgcaaaacgctgacggaacagtagctgaatacaacggctatcacgttgtgtttgctcttgcgggaagcccgaaagacgctgatgacacatcaatctacatgttttatcaaaaggtcggcgacaactcaatcgacagctggaaaaacgcgggccgtgtctttaaagacagcgataagttcgacgccaacgatccgatcctgaaagatcagacgcaagaatggtccggttctgcaacctttacatctgacggaaaaatccgtttattctacactgactattccggtaaacattacggcaaacaaagcctgacaacagcgcaggtaaatgtgtcaaaatctgatgacacactcaaaatcaacggagtggaagatcacaaaaccatttttgacggagaccgaaaaacatatcagaacggtcagcagtttatcgatgaaggcaatattcctccggcgacaccctacgccgagagaccctactactttgaagacaaaggccttaaatacctggggaagccgacagtagagccttcagtctgtggtggaaggcttgagagcccctggcaaaccgccggtgtaagtccaacagtccaaaagctaaagagcttgaagtttgatgttcgtgggcaggaagaatcagtatgggagaaagacgaagctgctctggcaaattggacggtgcccaaccacacttgtgacaatctaaaaacttgtcacactttacatggatctgtcatggcggaaacagcggttttcaatcccaagaaacttaaaaatagcccgcgaaatcgtccagtcaaaccacctcattga

SEQ ID NO: 136013 - DNA, 1135 bp, Homo sapiens; identical to SEQ ID NO: 135797

SEQ ID NO: 136014 - DNA, 1188 bp, Homo sapiens; identical to SEQ ID NO: 118378

SEQ ID NO: 136015 - DNA, 1566 bp, Homo sapiens
  misc_feature (1)...(1566): n = a,t,c or g
atgctgcagatccctaaacttcagcaaaacgaaaaatcccaagtgcctcaattcgatcaatcaacgattaaaaatattgagtctgcaaaaggacttgatgtgtgggacagctggccgctgcaaaacgctgacggaacagtagctgaatacaacggctatcacgttgtgtttgctcttgtgttaagcccgaaagacgctgatgacacatcaatctacatgttttatcaaaaggtcggcgacaactcaatcgacagctggaaaaacgcgggccgtgtctttaaagacagcgataagttcgacgccaacgatccgatcctgaaagatcagacgcaagaatggtccggttctgcaacctttacatctgacggaaaaatccgtttattctacactgactattccggtaaacattacggcaaacaaagcctgacaacagcgcaggtaaatgtgtcaaaatctgatgacacactcaaaatcaacggagtggaagatcacaaaacgatttttgacggagacggaaaaacatatcagaacgttcagcagtttatcgatgaaggcaattatacatccggcgacaaccatacgctgagagaccctcactacgttgaagacaaaggccataaataccttgtattcgaagccaacacgggaacagaaaacggataccaaggcgaagaatctttatttaccnagcgtgggcacactttgtcaactcgcgggtcactttgggagaactcaaaggtcggcgacaactcaatcgacagttggaaaaacgcgggccgcgtctttaaagacagcgataagttcgacgccaacgatccgatcctgaaagatcagacgcaagaatggtccggttctgcaacctttacatctgacggaaaaatccgtttattctacactgactattccggaaacattacgtctataaagcctgacaacagcgcagtggaagatcacaaaacgatttttgacggagacggaaaaacatatcagaacgttcagcagtttatcgatgaaggcaattatacatccggcgacaaccatacgctgagagaccctcactacgttgaagacaaaggccataaataccttgtattcgaagccaacacgggaacagaaaacggataccaaggcgaagaatctttatttaacaaagcgtactacggcggcggcacgaacttcttccgtaaagaaagccagaagcttcagcagagcgctaaaaaacgcgatgctgagttagcgaacggcgccctcggtatcatagagttaaataatgattacacattgaaaaaagtaatgaagccgctgatcacttcaaacacggtaactgatgaaatcgagcgcgcgaatgttttcaaaatgaacggcaaatggtacttgttcactgattcacgcggttcaaaaatgacgatcgatggtattaactcaaacgatatttacatgcttggttatgtatcaaactctttaaccggcccttacaagccgctgaacaaaacagggcttgggctgcanatgggcaacttggtatctgcgggctacttagagtatccctggcgtgcattggtgtga

SEQ ID NO: 136016 - DNA, 1515 bp, Homo sapiens
atggccaaggagcccatggctcagcaggccaaggagaggacctctgggagggcaaacacttgctttgtcagcaggatccaggggagaactcacactcagagtcagcaggggctggagcaggaacaggaaggcctgccagagttggagccagactgtttctgccggatcactcagtgtgaaagaaatctgatgccatgtcttgaggccactcaagtggcctatgaagaggcgaacatgacccatgaccagcaccttgtggccatgaaggagaaacccaccatggtggggcgtgtacatttgatgtgtatctcggtggacacaactgatcctactggaccattcatattcaggtttccctggagatcaaccatagctaccttccaggaggggatttcttctctcaagaagatggcggggaggaactcagagagaaaaacagtattagtgaaaagctcattccaggaagtgaacagaggaactgaagctttggctctgtgggaaaatggagactttgaagcaccagttctgacttttacgactgcacttctgccagaaggagcgactcaagccttcgggaaagaaaatacccaaaaggcatccaaagaacggtacgggtctcttaatattacacgcaataatatgctgcagatccttaacaagcagcaaacggaaaaataccaagtgcctcaattcgatcaatcaacgattaaaaatattgagtctgcaaaaggacttgatgtgtgggacagctggccgctgcaaaacgctgacggaacagtagctgaatacaacggctatcacgttgtgtttgctcttgcgggaagcccgaaagacgctgatgacacatcaatctacatgttttatcaaaaggtcggcgacaactcaatcgacagctggaaaaacgcgggccgtgtctttaaagacagcgataagttcgacgccaacgatccgatcctgaaagatcagacgcaagaatggtccggttctgcaacctttacatctgacggaaaaatccgtttattctacactgactattccggtaaacattacggcaaacaaagcctgacaacagcgcaggtaaatgtgtcaaaatctgatgacacactcaaaatcaacggagtggaagatcacaaaacgatttttgacggagacggaaaaacatatcagaacgttcagcagtttatcgatgaaggcaattatacatccggcgacaaccatacgctgagagaccctcactacgttgaagacaaaggccataaataccttgtattcgaagccaacacgggaacagaaaacggataccaaggcggggttaacgcggacgtcggcgacgttgttgttcgcctgccggtttggcatcgccgaggcggcgaagcggtttttatgcaggtttcgcgcttgcagattttgcgccaccttccccacggcgtggttgctgttgaccgcgaccaccacattgcccacgaccgccgccgccacgttgctggcgaccgttctggatcggttcggctttga

SEQ ID NO: 136017 - DNA, 2343 bp, Homo sapiens
ttagttgactgtcagctgtccttgctccaggatgctgtttttgacaacggatgttttattgcctttgatgttcattaagaagcttggcgcaaatgttgcctttttatcctcgaagaagcctctgtttgtcatgtagcttgtgataaccacattgttgcctttggcttgcggcacttgtttctgagcatgaacgcccgcaagccaacatgttagttgaagcatcagggcgattagcagcatgatatcaaaacgctctgagctgctcgttcggctatggcgtaggcctagtccgtaggcaggacttttcaagtctcggaaggtttcttcaatctgcattcgcttcgaatagatattaacaagttgtttgggtgttcgaatttcaacaggtaagttagttgctagaacccatggctcctttgccgacgctgagtagattttaggtgacgggtggtgacaatgagtccgtgtcgagcgctgattttttcggcctttagagcgagatttatacaatagaatttggcatgagattggattgcttttagtcagcctcttatagcctaaagtctttgagtgactagatgacatatcatgtaagttgctgataggtttccagttttccgctcctaggtctgcatattgtacttttcctcttactcgacttaaccagtaccaacccagcttctcaacggatttataccatggcactttaaagccagcatcactgacaatgagcggtgtggtgttactcggtagaatgctcgcaaggtcggctagaaattggtcatgagctttctttgaacattgctctgaaagcgggaacgctttctcataaagagtaacagaacgaccgtgtagtgcgactgaagctcgcaataccataagtcgtttttgctcacgaatatcagaccagtcaacaagtacaatgggcatcgtattgcccgaacagataaagctagcatgccaacggtatacagcgagtcgctctttgtggaggtgacgattaccaaaatcattaggggattcatcagaaccaagcatgtaaatatcgtttgagttaataccatcgatcgtcatttttgaaccgcgtgaatcagtgaacaagtaccatttgccgttcattttgaaaacattcgcgcgctcgatttcatcagttaccgtgtttgaagtgatcagcggcttcattacttttttcaatgtgtaatcattatttaactctatgataccgagggcgccgttcgctaactcagcatcgcgttttttagcgctctgctgaagcttctggctttctttacggaagaagttcgtgccgccgccgtagtacgctttgttaaataaagattcttcgccttggtatccgttttctgttcccgtgttggcttcgaatacaaggtatttatggcctttgtcttcaacgtagtgagggtctctcagcgtatggttgtcgccggatgtataattgccttcatcgataaactgctgaacgttctgatatgtttttccgtctccgtcaaaaatcgttttgtgatcttccactccgttgattttgagtgtgtcatcagattttgacacatttacctgcgctgttgtcaggctttgtttgccgtaatgtttaccggaatagtcagtgtagaataaacggatttttccgtcagatgtaaaggttgcagaaccggaccattcttgcgtctgatctttcaggatcggatcgttggcgtcgaacttatcgctgtctttaaagacacggcccgcgtttttccagctgtcgattgagttgtcgccgaccttttgataaaacatgtagattgatgtgtcatcagcgtctttcgggcttcccgcaagagcaaacacaacgtgatagccgttgtattcagctactgttccgtcagcgttttgcagcggccagctgtcccacacatcaagtccttttgcagactcaatatttttaatcgttgattgatcgaattgaggcacttggtatttttcgttttgctgctgtttagggatctgcagcatatcatggcgtgtaatatgagagacgccgtacgtttctttgtatgctttttggttattttctttcgcgaaggcttgagtcgctcctcctgtagtgtggtcagggaaggcctctttacggtaaatttgagcagaaaccagagtgacataaagagccggccatgaggagatcggtgctgcaggtggagctgcctgccagtcccgcgccatgtgctcgcattccttagctcttgggtggtcgatgggactgggcgccgtggagcagggggcggcattcgtcggggaggctcgtccgcacaggaggccacagagggggtgggaaggctcaggcat

SEQ ID NO: 136018 - DNA, 1353 bp, Homo sapiens
atgaacatgaacatcaaaaaaattgtaaaacaagccacagttctgacttttacgactgcacttctggcaggaggagcgactcaagccttcgcgaaagaaaataaccaaaaagcatacaaagaaacgtacggcgtctctcatattacacgccatgatatgctgcagatccctaaacagcagcaaaacgaaaaataccaagtgcctcaattcgatcaatcaacgattaaaaatattgagtctgcaaaaggacttgatgtgtgggacagctggccgctgcaaaacgctgacggaacagtagctgaatacaacggctatcacgttgtgtttgctcttgcgggaagcccgaaagacgctgatgacacatcaatctacatgttttatcaaaaggtaaatgtgtcaaaatctgatgacacactcaaaatcaacggagtggaagatcacaaaacgatttttgacggagacggaaaaacatatcagaacgttcagcagtttatcgatgaaggcaattatacatccggcgacaaccatacgctgagagaccctcactacgttgaagacaaaggccataaataccttgtattcgaagccaacacgggaacagaaaacggataccaaggcgaagaatctttatttaacaaagcgtactacggcggcggcacgaacttcttccgtaaagaaagccagaagcttcagcagagcgctaaaaaacgcgatgctgagttagcgaacggcgccctcggtatcatagagttaaataatgattacacattgaaaaaagtaatgaagccgctgatcacttcaaacacgatcagaaaatctgatggcaccctacaggaacatgacggtatctgcgagatccatgttgctaaatatgctgaaatattcggattgacctctgcggaagccagtaaggatatacggcaggcattgaagagtttcgcggggaaggaagtggttttttatcgccctgaagaggatgccggcgatgaaaaaggctatgaatcttttccttggtttatcaaacgtgcgcacagtccatccagagggctttacagtgtacatatcaacccatatctcattcccttctttatcgggttacagaaccggtttacgcagtttcggcttagtgaaacaaaagaaatcaccaatccgtatgccatgcgtttatacgaatccctgtgtcagtatcgtaagccggatggctcaggcatcgtctctctgaaaatcgactggatcatagagcgttaccagctgcctcaaagttaccagcgtatgcctgacttccgccgccgcttcctgcaggtctgtgttaatgagatcaacagcagaactccaatgcgcctctcatacagg

SEQ ID NO: 136019 - DNA, 1509 bp, Homo sapiens
atggctgctcaggatgcaatggtaactagaaccagttctcagactgactgcaaagaacctgggttaaaatgggctggagtggttctgatgctacttctctgctggctaatgttccaggtcctatgggaagcctgtcagcagaagacgggggagcacaaaaccatgctgcaaatgatcctgtgcaacaagagctaccagcagctgcggctggtgattacccccatgtacttaatgttgggggactggctttctaagaactgtgggcaaaactccacacctagtctaggagataacccccctgaaagacagacgcaagaatggtccggttctgcaacctttacatctgacggaaaaatccgtttattctacactgactattccggtaaacattacggcaaacaaagcctgacaacagcgcaggtaaatgtgtcaaaatctgatgacacactcaaaatcaacggagtggaagatcacaaaacgatttttgacggagacggaaaaacatatcagaacgttcagcagtttatcgatgaaggcaattatacatccggcgacaaccatacgctgagagaccctcactacgttgaagacaaaggccataaataccttgtattcgaagccaacacgggaacagaaaacggataccaaggcgaagaatctttatttaacaaagcgtactacggcggcggcacgaacttcttccgtaaagaaagccagaagcttcagcagagcgctaaaaaacgcgatgctgagttagcgaacggcgccctcggtatcatagagttaaataatgattacacattgaaaaaagtaatgaagccgctgatcacttcaaacacggtaactgatgaaatcgagcgcgcgaatgttttcaaaatgaacggcaaatggtacttgttcactgattcacgcggttcaaaaatgacgatcgatgatcttcatattcatgcagaagacactctcctgcctttctatcttggggaaaaggacgatgtcacttatgcaataaagcccacttgctggccggggcttgacattattccttcctgtctggctctgcaccgtattgaaactgagttaatgggcaaatttgatgaaggtaaactgcccaccgatccacacctgatgctccgactggccattgaaactgttgctcatgactatgatgtcatagttattgacagcgcgcctaacctgggtatcggcacgattaatgtcgtatgtgctgctgatgtgctgattgttcccacgcctgctgagttgtttgactacacctccgcactgcagtttttcgatatgcttcgtgatctgctcaagaacgttgatcttaaagggttcgagcctgatgtacgtattttgcttaccaaatacagcaatagtaatggctctcagtccccgtggatggaggagcaaatttcggatgcctggggaagcatggttctaaaaaatgttgtacgtgaaacggatgaagttggtaaaagtcaaatcccgatgagaactgttttttga

SEQ ID NO: 136020 - DNA, 1210 bp, Homo sapiens
ttagttgactgtcagctgtccttgctccaggatgctgtttttgacaacggatgttttattgcctttgatgttcattaagaagcttggcgcaaatgttgcctttttatcctcgaagaagcctctgtttgtcatgtagcttgtgataaccacattgttgcctttggcttgcggcactgcgaagtgagagtaagtgaatgtcacatcgtttggatcaagacccatttgcagcacaagccctgttttgttcagcggcgtgtttgaagtgatcagcggcttcattacttttttcaatgtgtaatcattatttaactctatgataccgagggcgccgttcgctaactcagcatcgcgttttttagcgctctgctgaagcttctggctttctttacggaagaagttcgtgccgccgccgtagtacgctttgttaaataaagattcttcgccttggtatccgttttctgttcccgtggtggcttcgaatacaaggtatttatggcctttgtcttcaacgtatgatgggtactctcagcgtatggttgtcgccggatgtataattgccttcatcgataaactgctgaacgttctgatatgtttttccgtctccgtcaaaaatcgttttgtgatcttccactccgttgattttgagtgtgtcatcagattttgacacatttacctgcgctgttgtcaggctttgtttgccgtaatgtttaccggaatagtcagtgtagaataaacggatttttccgtcagatgtaaaggttgcagaaccggaccattcttgcgtctgatctttcaggatcggatcgttggcgtcgaacttatcgcttttgataaacatgtagattgatgtgtcatcagcgtctttcgggcttcccgcaagagcaaacacaacgtgatagccgttgtattcagctactgttccgtcagcgttttgcagcggccagctgtcccacacatcaagtccttttgcagactcaatatttttaatcgttgattgatcgaattgaggcacttggtatttttcgttttgctgctgtttagggatctgcagcatatcatggcgtgtaatatgagagacgccgtacgtttctttgtatgctttttggttattttctttcgcgaaggcttgagtcgctcctcctgccagaagtgcagtcgtaaaagtcagaactgtggcttgttttacaatttttttgatgttcatgttcat

SEQ ID NO: 136021 - DNA, 1446 bp, Homo sapiens
atgaacatgaacatcaaaaaaattgtaaaacaagccacagttctgacttttacgactgcacttctggcaggaggagcgactcaagccttcgcgaaagaaaataaccaaaaagcatacaaagaaacgtacggcgtctctcatattacacgccatgatatgctgcagatccctaaacagcagcaaaacgaaaaataccaagtgcctcaattcgatcaatcaacgattaaaaatattgagtctgcaaaaggacttgatgtgtgggacagctggccgctgcaaaacgctgacggaacagtagctgaatacaacggctatcacgttgtgtttgctcttgcgggaagcccgaaagacgctgatgacacatcaatctacatgttttatcaaaaggtcggcgacaactcaatcgacagctggaaaaacgcgggccgtgtctttaaagacagcgataagttcgacgccaacgatccgatcctgaaagatcagacgcaagaatggtccggttctgcaacctttacatctgacggaaaaatccgtttattctacacgggatccctaaacagcagcaaaacggaaaaataccaagtgcctcatatcgatcaatcaacgattaaaaatattgagtctgcaaaaggacttgatgtgtgggacagctggccgctgcaaaacgctgacggaacagtagctgaatacaacggctatcacgttgtgtttgctcttgcgggaagcccgaaagacgctgatgacacatcaatctacatgttttatcaaaaggtcggcgacaactcaatcgacagctggaaaaacgcgggccgtgtctttaaagacagcgataagttcgacgccaacgatccgatcctgaaagatcagacgcaagaatggtccggttctgcaacctttacatctgacggaaaaatccgtttattctacactgactattccggtaaacattacggcaaacaaagcctgacaacagcgcaggtaaatgtgtcaaaatctgatgacacactcaaaatcaacggagtggaagatcacaaaacgatttttgacggagacggaaaaacatatcagaacgttcagcagtttatcgatgaaggcaattatacatccggcgacaaccatacgctgagagaccctcactacgttgaagacaaaggccataaataccttgattcgaagccaacacgggaacagaagagcacccccaaccgcaaggagcggcccaggactcagagcttcaccagcgccttcgccgaacggcgcgagtgcatccccaacgtacccgccgacaccaaactctccaaaatcaagaccctgcgcctggccaccagctacatcgcctacctcatggacctgctggccaaggacgaccagaatggcgaggcggaggccttcaaggcagagatcaagaagaccgacgtgaaagaggagaagaggaagaaggagctg

SEQ ID NO: 136022 - DNA, 1797 bp, Homo sapiens
gcattgaagagtttcgcggggaaggaagtggttttttatcgccctgaagaggatgccggcgatgaaaaaggctatgaatcttttccttggtttatcaaacgtgcgcacagtccatccagagggctttacagtgtacatatcaacccatatctcattcccttctttatcgggttacagaaccggtttacgcagtttcggcttagtgaaacaaaagaaatcaccaatccgtatgccatgcgtttatacgaatccctgtgtcagtatcaaacgtacggcgtctctcaaatatacaaaaatgatatactgcagatccctaaacagcagcaaaacgaaaaataccaagtgcctcaattcgatcaatcaacgattaaaaatattgagtctgcaaaaggacttgatgtgtgggacagctggccgctgcaaaacgctgacggaacagtagctgaatacaacggctatcacgttgtgtttgctcttgcgggaagcccgaaagacgctgatgacacatcaatctacatgttttatcaaaaggtcggcgacaactcaatcgacagctggaaaaacgcgggccgtgtctttaaagacagcgataagttcgacgccaacgatccgatcctgaaagatcagacgcaagaatggtccggttctgcaacctttacatctgacggaaaaatccgtttattctacactgactattccggtaaacattacggcaaacaaagcctgacaacagcgcaggtaaatgtgtcaaaatctgatgacacactcaaaatcaacggagtggaagatcacaaaacgatttttgacggagacggaaaaacatatcagaacgttcagcagtttatcgatgaaggcaattatacatccggcgacaaccatacgctgagagaccctcactacgttgaagacaaaggccataaataccttgtattcgaagccaacacgggaacagaaaacggataccaaggcgaagaatctttatttaacaaagcgtactacggcggcggcacgaacttcttccgtaaagaaagccagaagcttcagcagagcgctaaaaaacgcgatgctgagttaggggtctatgctcttgctgtttcctctgtccggggtaccgagctagagctgggacttacaccggcgttcggtcgaagagtatctggtgtcatagaaattgccgatgggagtcgccgtcgtaaagctgctgcacttaccgaaagtgattatcgtgttctggttggcgagctggatgatgagcagatggctgcattatccagattgggtaacgattatcgcccaacaagtgcttatgaacgtggtcagcgttatgcaagccgattgcagaatgaatttgctggaaatatttctgcgctggctgatgcggaaaatatttcacgtaagattattacccgctgtatcaacaccgccaaattgcctaaatcagttgttgctcttttttctcaccccggtgaactatctgcccggtcaggtgatgcacttcaaaaagcctttacagataaagaggaattacttaagcagcaggcatctaaccttcatgagcagaaaaaagctggggtgatatttgaagctgaagaagttatcactcttttaacttctgtgcttaaaacgtcatctgcatcaagaactagtttaagctcacgacatcagtttgctcctggagcgacagtattgtataagggcgataaaatggtgcttaacctggacaggtctcgtgttccaactgagtgtatagagaaaattgaggccattcttaaggaacttgaaaagccagcaccctga

SEQ ID NO: 136023 - DNA, 1245 bp, Homo sapiens
atgccaccactcggccaagaaggcgtgtttggctacgacagcccagagtccagagccacggcacttccggttgctgtccacgcggcttctgctgacaatccaggcctgctctgcaacaagaatagattcttctggaatgttttccccatggctcaccctcatggaagcacaaaggccatcccacagaggggcacaaaggaaacagctatgacgagcaaggccaacacaacacaaaacaacacccacaagtaccacagctggccgctgcaaaacgctgacggaacagtagctgaatacaacggctatcacgttgtgtttgctcttgcgggaagcccgaaagacgctgatgacacatcaatctacatgttttatcaaaaggtcggcgacaactcaatcgacagctggaaaaacgcgggccgtgtctttaaagacagcgataagttcgacgccaacgatccgatcctgaaagatcagacgcaagaatggtccggttctgcaacctttacatctgacggaaaaatccgtttattctacactgactattccggtaaacattacggcaaacaaagcctgacaacagcgcaggtaaatgtgtcaaaatctgatgacacactcaaaatcaacggagtggaagatcacaaaacgatttttgacggagacggaaaaacatatcagaacgttcagcagtttatcgatgaaggcaattatacatccggcgacaaccatacgctgagagaccctcactacgttgaagacaaaggccataaataccttgtattcgaagccaacacgggaacagaaaacggataccaaggcgaagaatctttatttaacaaagcgtactacggcggcggcacgaacttcttccgtaaagaaagccagaagcttcagcagagcgctaaaaaacgcgatgctgagttagcgaacggcgccctcggtatcatagagttaaataatgattacacattgaaaaaagtaatgaagccgctgatcacttcaaacacggtaactgatgaaatcgagcgcgcgaatgttttcaaaatgaacggcaaatggcattccaagatccttgtatcagggacccacagggcacgaacagaggtagaggtgactgacccgattcatcagcagagaatgggctgctgtttcaccgtgggagcaggagaaatatgtgagaaacccactgggtgcttttttactcccttgcccaattgtaactgtcagtggacagggtcagcaatcctg

SEQ ID NO: 136024 - DNA, 1535 bp, Homo sapiens
attatacgaatttttgaaccgaagatccgtgaacagtccatttgccgttcattttgaaacattcgcgcgctcgatttatcagttaccgtgtttgaagtgatcagcggcttcattacttttttcaatgtgtaatcattatttaactctatgataccgagggcgccgttcgctaacacagcatcgcgttttttagcgctctgctgaagcttctggctttctttacggaaaaagttcctgccgccgccgtagtacgctttgttaaataaagattcttcgccttggtatccgttttctgttcccgtgttggcttcgaatacaaggtatttatggcctttgtcttcaacgtaatgagggtctctcatcatatggttgacgccggatgtataattgccttcataaattaactgctgaacgttctgatatgtccgtgccgtctgcgtcaaaaaccggaccgggaacctccactcggtaaagggagactgtaggagcaatccaactgtaaatccatctgggccctgggcttttctatggaagagaaagccattcgaaaccaccctcaaccacagaacttccaacctggtccgcccaaaatacgcgattgtaactgctatagcactagcgaaaagcgccctcgtggtggaagtgatcagcggcttcattacttttttcaatgtgtaatcattatttaactctatgataccgagggcgccgttcgctaactcagcatcgcgttttttagcgctctgctgaagcttctggctttctttacggaagaagttcgtgccgccgccgtagtacgctttgttaaataaagattcttcgccttggtatccgttttctgttcccgtgttggcttcgaatacaaggtatttatggcctttgtcttcaacgtagtgagggtctctcagcgtatggttgtcgccggatgtataattgccttcatcgataaactgctgaacgttctgatatgtttttccgtctccgtcaaaaatcgttttgtgatcttccactccgttgattttgagtgtgtcatcagattttgacacatttacctgcgctgttgtcaggctttgtttgccgtaatgtttaccggaatagtcagtgtagaataaacggatttttccgtcagatgtaaaggttgcagaaccggaccattcttgcgtctgatctttcaggatcggatcgttggcgtcgaacttatcgctgtctttaaagacacggcccgggggggcttctagagtccccaagtagggggttatagccccagtgttgtcaattctatagacagattctttataagcagaaagtaagccatatgaaagaggtatgaagctgatgttgatttctgtctctgaaaatgcagtgtcgtgtaccttttcctccctgttcaatcctaaatgctggatgataagtgatttaaggaaccttcctggtgattctgatgcttgctcatgtttgagaaccacttctttaggagaaatctggccatgttcagcagaattggaaagacaaagaggaacactgggaggcttcat

SEQ ID NO: 136025 - DNA, 2538 bp, Homo sapiens
atgaacatgaacatcaaaaaaattgtaaaacaagccacagttctgacttttacgactgcacttctggcaggaggagcgactcaagccttcgcgaaagaaaataaccaaaaagcatacaaagaaacgtacggcgtctctcatattacacgccatgatatgctgcagatccctaaacagcagcaaaacgaaaaataccaagtgcctcaattcgatcaatcaacgattaaaaatattgagtctgcaaaaggacttgatgtgtgggacagctggccgctgcaaaacgctgacggaacagtagctgaatacaacggctatcacgttgtgtttgctcttgcgggaagcccgaaagacgctgatgacacatcaatctacatgttttatcaaaaggtcggcgacaactcaatcgacagctggaaaaacgcgggccgtgtctttaaagacagcgataagttcgacgccaacgatccgatcctgaaagaatcagacgcagatggatatgactttgacactcagtatgctttcgttggtgattattctgggcagatcaccctgctgaagcttgaacagaacacgtgttcagtcatcacaaccctcaaaggacatgaagcgcaggtaaatgtgtcaaaatctgatgacacactcaaaatcaacggagtggaagatcacaaaacgatttttgacggagacggaaaaacatatcagaacgttcagcagtttatcgatgaaggcaattatacatgcggcgacaaccatacgctgagagaccctcactacgttgaagacaaaggccataaataccttgtattcgaagccaacacgggaacagaaaacggataccaaggcgaagaatctttatttaacaaagcgtactacggcggcggcacgaacttcttccgtaaagaaagccagaagcttcagcagagcgctaaaaaacgcgatgctgagttagcgaacggcgccctcggtatcatagagttaaataatgattacacattgaaaaaagtaatgaagccgctgatcacttcaaacacggtaactgatgaaatcgagcgcgcgaatgttttcaaaatgaacggcaaatggtacttgttcactgattcacgcggttcaaaaatgacgatcgatggatgccagcctacgtgttctgaggctttgcagaactttcaacggtataccggcatacagcatgtgcatcgcataggaatggcggaacgtatgtggtgtgaccggaacagagaacgtcacaccgtcagcagcagcggcggcacccgcctccccaatccaggtcctgcccgttctgaacattttgaggcatttcagtcagttgctcaatgtacctataaccagaccgttcagctggatattacggcctttttaaagaccgtaaagaaaaataagcacaagttttatccggcctttattcacattcttgcccgcctgatgaatgctcatccggagttccgtatggcaatgaaagacggtgagctggtgatatgggatagtgttcacccttgttacaccgttttccatgagcaaactgaaacgttttcatcgctctggagtgaataccacgacgatttccggcagtttctacacatatattcgcaagatgtggcgtgttacggtgaaaacctggcctatttccctaaagggtttattgagaatatgtttttcgtctcagccaatccctggtcttccttagagctagcagtgatcatgggaccaattctggccaataagtgtgacaatctaaaaacttgtcacacttcacatggatctgtcatggcggaaacagcggttatcaatcacaagaaacgtaaaaatagcccgcgaatcgtccagtcaaacgacctcactgaggcggcatatagtctctcccgggatcaaaaacgtatgctgtatctgttcgttgaccagatcagaaaatctgatggcaccctacaggaacatgacggtatctgcgagatccatgttgctaaatatgctgaaatattcggattgacctctgcggaagccagtaaggatatacggcaggcattgaagagtttcgcggggaaggaagtggttttttatcgccctgaagaggatgccggcgatgaaaaaggctatgaatcttttccttggtttatcaaacgtgcgcacagtccatccagagggctttacagtgtacatatcaacccatatctcattcccttctttatcgggttacagaaccggtttacgcagtttcggcttagtgaaacaaaagaaatcaccaatccgtatgccatgcgtttatacgaatccctgtgtcagtatcgtaagccggatggctcaggcatcgtctctctgaaaatcgactggatcatagagcgttaccagctgcctcaaagttaccagcgtatgcctgacttccgccgccgcttcctgcaggtctgtgttaatgagatcaacagcagaactccaatgcgcctctcatacattgagaaaaagaaaggccgccagacgactcatatcgtattttccttccgcgatatcacttccatgacgacaggatag

SEQ ID NO: 136026 - DNA, 1212 bp, Homo sapiens
ctatgcgcgtcgctgaaaaattggatctgggtgaagatccaatagtaagattaattcagtctctttccctgacataggataaaacattgtgtggctctttcccacagcagggagaatgcccaatgtttcctcttgaagatcttcctccaacttggcctcgggagtggtcctcgcatcgatcgtcatttttgaaccgcgtgaatcagtgaacaagtaccatttgccgttcattttgaaaacattcgcgcgctcgatttcatcagttaccgtgtttgaagtgatcagcggcttcattacttttttcaatgtgtaatcattatttaactctatgataccgagggcgccgttcgctaactcagcatcgcgttttttagcgctctgctgaagcttctggctttctttacggaagaagttcgtgccgccgccgtagtacgctttgttaaataaagattcttcgccttggtatccgttttctgttcccgtgttggcttcgaatacaaggtatttatggcctttgtcttcaacgtagtgagggtctctcagcgtatggttgtcgccggatgtataattgccttcatcgataaactgctgaacgttctgatatgtttttccgtctccgtcaaaaatcgttttgtgatcttccactccgttgattttgagtgtgtcatcagattttgacacatttacctgcgctgttgtcaggctttgtttgccgtaatgtttaccggaatagtcagtgtagaataaacggatttttccgtcagatgtaaaggttgcagaaccggaccattcttgcgtctgatctttcaggatcggatcgttggcgtcgaacttatcgctgtctttaaagacacggcccgcgtttttccagctgtcgattgagttgtccgcgacgtgatagccgttgtattcagctactgttccgtcagcgttttgcagcggccagctgtcccacacatcaagtccttttgcagactcaatatttttaatcgttgattgatcgaattgaggcacttggtatttttcgttttgctgctgtttagggatctgcagcatatcatggcgtgtaatatgagagacgccgtacgtttctttgtatgctttttggttattttctttcgcgaaggcttgagtcgctcctcctgccagaagtgcagtcgtaaaagtcagaactgtggcttgttttacaatttttttgatgttcatgttcat

SEQ ID NO: 136027 - DNA, 1674 bp, Homo sapiens
atgtctggtgcttggctgccagttaggtggagcgatgaaggctattgggctgagtgtctcctgtcatccatcagagagggagtctgcacggggtcccacacatcccctgagactcaagcaggggcaggacagcaccattttgagagcctagccttcaccaggctacatcctgcccagaggcccaacagcacctgcatctccatatttccggagccccataacattctcctgtatctacctgtcaggacccttagctgcaggtctgttggagtttgcctgggtatcagtggtggaggctgcagaactgtgaatattgctgaacaggaaatgttgctgtctgatcattcctctggaggtttcgtctcagaggggggagtgaacgtttctgtcttgctggcattcctagtgcctctggggtatgaaatataccaagtgcctcaattcgatcaatcaacgattaaaaatattgagtctgcaaaaggacttgatgtgtgggacagctggccgctgcaaaacgctgacggaacagtagctgaatacaacggctatcacgttgtgtttgctcttgcgggaagcccgaaagacgctgatgacacatcaatctacatgttttatcaaaaggtcggcgacaactcaatcgacagctggaaaaacgcgggccgtgtctttaaagacagcgataagttcgacgccaacgatccgatcctgaaagatcagacgcaagaatggtccggttctgcaacctttacatctgacggaaaaatccgtttattctacactgactattccggtaaacattacggcaaacaaagcctgacaacagcgcaggtaaatgtgtcaaaatctgatgacacactcaaaatcaacggagtggaagatcacaaaacgatttttgacggagacggaaaaacatatcagaacgttcagcagtttatcgatgaaggcaattatacatccggcgacaaccatacgctgagagaccctcactacgttgaagacaaaggccataaataccttgtattcgaagccaacacgggaacagaaaacggataccaaggcgaagaatctttatttaacaaagcgtactacggcggcggcacgaacttcttccgtaaagaaagccagaagcttcagcagagcgctaaaaaacgcgatgctgagttagcgaacggcgccctcggtatcatagagttaaataatgattacacattgaaaaaagtaatgaagccgctgatcacttcaaacacggtaactgatgaaatcgagcgcgcgaatgttttcaaaatgaacggcaaatggtacttgttcactgattcacgcggttcaaaaatgacgatcgatgagactgtgaccacccatccccctggggctcaggcccagggagacctgaattctgtccctgagactctggctgaagttattggagatcctgcagggaatcctcccccagctgaagaaggatgggtcagggttagacctgaagaggcactctggttgcagactgccacagccgtggatctggtttgtttggaccagcttggatcgtactttggagcttctgtctgtgctgtggacctcaatgcagatggcttctcagatctgctcgtgggagcacccatgcagagcaccatcagagaggaaggaagagtgtttgtgtacatcaactctggctcg

SEQ ID NO: 136028 - DNA, 1873 bp, Homo sapiens
atggccgtcctgcagggagccctggcccgatgcctgcggaggttggagctgtgtctgcaggggatgccttggagatgcctgtgtaggagaagggctcaggcaaggttgcctgctaaaggccagtgccacattggtacaaggtgtgccttgaggaaggacgaggaaaagcagcggaagatagggactgggctgtttgcccatgaacaaggctgccgatggaccagcatcgtggtggtggtgggctctcagctcttccttcacctggctgagttcactattgtgtctgagcccgggaccatgggaggctctgatgccagtttcctgaggctgggacccaaccgaagcctccacttagggatcaatcagggagggcttcctgtaggagttgatgccagagtgggccctggaggagcgactcaagccttcgcgaaagaaaataaccaaaaagcatacaaagaaacgtacggcgtctctcatattacacgccatgatatgctgcagatccctaaacagcagcaaaacgaaaaataccaagtgcctcaattcgatcaatcaacgattaaaaatattgagtctgcaaaaggacttgatgtgtgggacagctggccgctgcaaaacgctgacggaacagtagctgaatacaacggctatcacgttgtgtttgctcttgcgggaagcccgaaagacgctgatgacacatcaatctacatgttttatcaaaaggtcggcgacaactcaatcgacagctggaaaaacgcgggccgtgtctttaaagacagcgataagttcgacgccaacgatccgatcctgaaagatcagacgcaagaatggtccggttctgcaacctttacatctgacggaaaaatccgtttattctacactgactattccggtaaacattacggcaaacaaagcctgacaacagcgcaggtaaatgtgtcaaaatctgatgacacactcaaaatcaacggagtggaagatcacaaaacgatttttgacggagacggaaaaacatatcagaacgttcagcagtttatcgatgaaggcaattatacatccggcgacaaccatacgctgagagacccgtcactacgttgaagacaaaggccataaataccttgtattcgaagccaacacgggaacagaaaacggataccaaggcgaagaatctttatttaacaaagcgtactacggcggcggcacgaacttcttccgtaaagaaagccagaagcttcagcagagcgctaaaaaacgcgatgctgagttagcgaacggcgccctcggtatcatagagttaaataatgattacacattgaaaaaagtaatgaagccgctgatcacttcaaacacggtaactgatgaaatcgagcgcgcgaatgttttcaaaatgaacggcaaatggtacgtgttccctgattcacgcggttcaacaatgacgatcgatgagggagggagagagggggaccagccggtccagccccctgcgccagccccgtgggggaaagaggccgcagatgacctcatggaagcaacggtggtgaatcatggcccagaccacattcacatttccccgggggtgggcaagcgtgttgatcaccggaggggcagcttcaacacccagagagatggggggcagggccaggtgattcagaaactgatcgcatgccagagaaccaacgacccactgcccttcagcctcttcacaggggcatttgcaagagaaggagtttttcttttcaccagcgtcattcggaattgccaggacaaggctggtggctggccactactggaagacttccaggcgctctcccctctccagtccctgaaacattttggaagaagggagaggccgggaactttgggtccaacatga

SEQ ID NO: 136029 - DNA, 2946 bp, Homo sapiens
atgaacatgaacatcaaaaaaattgtaaaacaagccacagttctgacttttacgactgcacttctggcaggaggagcgactcaagccttcgcgaaagagaataaccaaaaagcatacaaagaaacgtacggcgtctctcatattacacgccatgatatgctgcagatccctaaacagcagcaaaacgaaaaataccaagtgcctcaattcgatcaatcaacgattaaaaatattgagtctgcaaaaggacttgatgtgtgggacagctggccgctgcaaaacgctgacggaacagtagctgaatacaacggctatcacgttgtgtttgctcttgcgggaagcccgaaagacgctgatgacacatcaatctacatgttttatcaaaaggtcggcgacaactcaatcgacagctggaaaaacgcgggccgtgtctttaaagacagcgataagttcgacgccaacgatccgatcctgaaagatcagacgcaagaatggtccggttctgcaacctttacatctgacggaaaaatccgtttattctacactgactattccggtaaacattacggcaaacaaagcctgacaacagcgcaggtaaatgtgtcaaaatctgatgacacactcaaaatcaacggagtggaagatcacaaaacgatttttgacggagacggaaaaacatatcagaacgttcagcagtttatcgatgaaggcaattatacatccggcgacaaccatacgctgagagaccctcactacgttgaagacaaaggccataaataccttgtattcgaagccaacacgggaacagaaaacggataccaaggcgaagaatctttatttaacaaagcgtactacggcggcggcacgaacttcttccgtaaagaaagccagaagcttcagcagagcgctaaaaaacgcgatgctgagttagcgaacggcgccctcggtatcatagagttaaataatgattacacattgaaaaaagtaatgaagccgctgatcacttcaaacacggtaactgatgaaatcgagcgcgcgaatgttttcaaaatgaacggcaaatggtacttgttcactgattcacgcggttcaaaaatgacgatcgatgtgccgcaagccaaaggcaacaatgtggttatcacaagctacatgacaaacagaggcttcttcgagcctgagggcagcaagggcagtatcactgcagcagtaatggcaaaagggctctcagttgcctctgggaactccaccccagagagacgcagagccactgccaatgagaatgttcagccaagggctatcagagatgccgagaaagcagggcgactaccgcacccggatatggaaattcgaggacgggttgagcaacgtgttggttatacaattgaacaaattaatcatatgcgtgatgtgtttggtacgcgattgcgacgtgctgaagacgtatttccaccggtgatcggggttgctgcccataaaggtggcgtttacaaaacctcagtttctgttcatcttgctcaggatctggctctgaaggggctacgtgttttgctcgtggaaggtaacgacccccagggaacagcctcaatgtatcacggatgggtaccagatcttcatattcatgcagaagacactctcctgcctttctatcttggggaaaaggacgatgtcacttatgcaataaagcccacttgctggccggggcttgacattattccttcctgtctggctctgcaccgtattgaaactgagttaatgcgcaaatttgatgaaagcgcgccttacctgggtatcggaacgataaatggcttatgtgctgctgatttgctgattgttccccgcctgctggattgtttgactacacctgcggactggagttttttcgaatggcttcagaatatcgtcaaaaaccttgatctaagagtctgggaccatggtcccactcgtatcgtcggtctgattattagtctgggaccacggtcccactcgtatcgtcggtctgattattattctggaaccaccgtcccactcgtatcgtcggaggagcgactcaagccttcgcgaaagaaaataaccaaaaaggcatacaaagaaacgtacggcgtctctcatattacacgccatgatatgctgcagatccctaaacagcagcaaaacgaaaaataccaagtgcctcaattcgatcaatcaacgattaaaaatattgagtctgcaaaaggacttgatgtgtgggacagctggccgctgcaaaacgctgacggaacagtagctgaatacaacggctatcacgttgtgtttgctcttgcgggaagcccgaaagacgctgatgacacatcaatctacatgttttatcaaaaggtcggcgacaactcaatcgacagctggaaaaacgcgggccgtgtctttaaagacagcgataagttcgacgccaacgatccgatcctgaaagatcagacgcaagaatggtccggttctgcaacctttacatctgacggaaaaatccgtttattctacactgactattccggtaaacattacggcaaacaaagcctgacaacagcgcagccagaagtggacttccctgtccccccaggcagaggcaggagtgtggagtctgtgcagagccagccccaggagcccgtgagtgtgccccagacactgactagcacgctggagcacattgtgggccagctggatgtcctcactcaggctttgcagaactttcatcggtataccggcatacagcatgtgcatcgcataggaatggcggaacgtatgtggtgtgaccggaacagagaacgtcacaccgtcagcagcagcggcggcaaccgcctccccaatccaggtcctgaccgttctgtccgtcacttcccagatccgcgctttctctgtccttcctgtgcgacggttacgccgctccatgagcttatcacgaataaatacctgtga

SEQ ID NO: 136030 - DNA, 1498 bp, Homo sapiens
ttagttgactgtcagctgtccttgctccaggatgctgtttttgacaacggatgttttattgcctttgatgttcattaagaagcttggcgcaaatgttgcctttttatcctcgaagaagcctctgtttgtcatgtagcttgtgataaccacattgttgcctttggcttgcggcactgcgaagtgagagtaagtgaatgtcacatcgtttggatcaagacccatttgcagcacaagccctgttttgttcagcggcttgtaagggccggttaaagagtttgatacataaccaagcatgtgaatatcgtttgagttaataccatcgatcgtcatttttgaaccgcgtgaatcagtgaacaagtaccatttgccgttcattttgaaaacattcgcgcgctcgatttcatcagttaccgtgtttgaagtgatcagcggcttcattactttgctcaatgtgtaatcattatttagactggaagaagttcgtgccgccgccgtagtacgctttgttaaataaagagttcttcgcctgtcgtatccgttcttctgttcccgtgttggcttcgaatacaaggtatttatggcctttgtcttcaacgtagtgagggtctctcaacgtatggttgtcgccggatgtataattgccttcatcgataaactgctgaacgttctgatatgtttttccgtctccgtcaaaaatcgttttgtgatcttccactccgttgattttgagtgtgtcatcagattttgacacatttacctgcgctgttgtcaggctttgtttgccgtaatgtttaccggaatagtcagtgtagaataaacggatttttccgtcagatgtaaaggttgcagaaccggaccgttcttgcgtctgatctttcaggatcggatcgttggcgtcgaacttatcgctgtctttaaagacacggcccgcgtttttccagctgtcgattgagttgtcgccgaccttttgataaaacatgtagattgatgtgtcatcagcgtctttcgggcttcccgcaagagcaaacacaacgtgatagccgttgtattcagctactgttccgtcagcgttttgcagcggccagctgtcccacacatcaagtccttttgcagactcaatatttttaatcgttgattgatcgaattgaggcacttggtatttttcgttttgctgctgtttagggatctgcagcatatcatggcgtgtaatatgagagacgccgtacgtttctttgtatgctttttggttattttctttcgcgaaggcttgagtcgctcctcccctttgttaataaaaaatcttcggccttggtttccgttttctgttcccgggtggcttccaataccagggatttattggccttgtccttcaccggaggggagggctccttcacctttgggttgccgccggtgtataaattgcctttcttcgtaaacctgttaaccttcttgttttgtttttccttttccgccaaaatcgttttggaaccttcccctc

SEQ ID NO: 136031 - DNA, 4132 bp, Homo sapiens
atgattcatgtcagcgttgggacccaggaatctcctgttaatcagtaccctggtgattttgatccagcgcctcgttcggcccttatccatgcctggttcttggaggaggtgttggggcaacacgccctttcagtgggactaattcccctctccatgacagcgctggcggtgcaacaatgccgttacccctgcgacaacatggcctccggggaggctgcccttttacaatgtctccccgcctcctcggctcctctggacctaggggagcgtatccctaaacagcagcaaaacgaaaaataccaagtgcctcaattcgatcaatcaacgattaaaaatattgagtctgcaaaaggacttgatgtgtgggacagctggccgctgcaaaacgctgacggaacagtagctgaatacaacggctatcacgttgtgtttgctcttgcgggaagcccgaaagacgctgatgacacatcaatctacatgttttatcaaaaggtcggcgacaactcaatcgacagctggaaaaacgcgggccgtgtctttaaagacagcgataagttcgacgccaacgatccgatcctgaaagatcagacgcaagaatggtccggttctgcaacctttacatctgacggaaaaatccgtttattctacactgactattccggtaaacattacggcaaacaaagcctgacaacagcgcaggtaaatgtgtcaaaatctgatgacacactcaaaatcaacggagtggaagatcacaaaacgatttttgacggagacggaaaaacatatcagaacgttcagcagtttatcgatgaaggcaattatacatccggcgacaaccatacgctgagagaccctcactacgttgaagacaaaggccataaataccttgtattcgaagccaacacgggaacagaaaacggataccaaggcgaagaatctttatttaacaaagcgtactacggcggcggcacggcttcttccatcagaaaatctgatggcaccctacaggaacatgacggtatctgcgagatccatgttgctaaatatgctgaaatattcggattgacctctgcggaagccagtaaggatatacggcaggcattgaagagtttcgcggggaaggaagtggttttttatcgccctgaagaggatgccggcgatgaaaaaggctatgaatcttttccttggtttatcaaacgtgcgcacagtccatccagagggctttacagtgtacatatcaacccatatctcattcccttctttatcgggttacagaaccggtttacgcagtttcggcttagtgaaacaaaagaaatcaccaatccgtatgccatgcgtttatacgaatccctgtgtcagtatcgtaagccgcatggctcaggcatcgtctctctgaaaatcgaatggatcatagagcgttaccagctgcctcaaagttaccagcgtatgcctgacttccgccgccgcttcctgcagtgcataaacgctggtcatgaaatgacgaaggctatcgccattgcacagtttaatgatgacagcccggaagcgaggaaaataacccggcgctggagaataggtgaagcagcggatttagttggggtttcttctcaggctatcagagatgccgagaaagcagggcgactaccgcacccggatatggaaattcgaggacgggttgagcaacgtgttggttatacaattgaacaaattaatcatatgcgtgatgtgtttggtacgcgattgcgacgtgctgaagacgtatttccaccggtgatcggggttgctgcccataaaggtggcgtttacaaaacctcagtttctgttcatcttgctcaggatctggctctgaaggggctacgtgttttgctcgtggaaggtaacgacccccagggaacagcctcaatgtatcacggatgggtaccagatcttcatattcatgcagaagacactctcctgcctttctatcttggggaaaaggacgatgtcacttatgcaataaagcccacttgctggccggggcttgacattattccttcctgtctggctctgcaccgtattgaaactgagttaatgggcaaatttgatgaaggtaaactgcccaccgatccacacctgatgctccgactggccattgaaactgttgctcatgactatgatgtcatagttattgacagcgcgcctaacctgggtatcggcacgattaatgtcgtatgtgctgctgatgtgctgattgttcccacgcctgctgagttgtttgactacacctccgcactgcagtttttcgatatgcttcgtgatctgctcaagaacgcgtgatcttaaagggttcgagcctgatgctgaaacaagccagggagctctgggcacactggcaaatgtagtgacctcccttgccaacctaagtgaatctttgaacaacggtgacacttcagaaatccagccagaggaccagtctgcaagtgagataactcgggcatttgataccttagctaaagcacttaataccacagacagctcctcttctccaagcttggcagatgggatagacaccagtggaggagggagcatccacgtcatcagcagagaccagtcgacacccatcattgaggttgaaggccccctcctttcagacacacacgtcacatttaagtcaattcgggaggatcgaaacggcagatcgcaaaaaacagtacatacagaaggagacatgaacatgaacatcaaaaaaattgtaaaacaagccacagttctgacttttacgactgcacttctggcaggaggagcgactcaagccttcgcgaaagaaaataaccaaaaagcatacaaagaaacgtacggcgtctctcatattacacgccatgatatgctgcagatccctaaacagcagcaaaacgaaaaataccaagtgcctcaattcgatcaatcaacgattaaaaatattgagtctgcaaaaggacttgatgtgtgggacagctggccgctgcaaaacgctgacggaacagtagctgaatacaacggctatcacgttgtgtttgctcttgcgggaagcccgaaagacgctgatgacacatcaatctacatgttttatcaaaaggtcggcgacaactcaatcgacagctggaaaaacgcgggccgtgtctttaaagacagcgataagttcgacgccaacgatccgatcctgaaagatcagacgcaagaatggtccggttctgcaacctttacatctgacggaaaaatccgtttattctacactgactattccggtaaacattacggcaaacaaagcctgacaacagcgcaggtaaatgtgtcaaaatctgatgacacactcaaaatcaacggagtggaagatcacaaaacgatttttgacggagacggaaaaacatatcagaacgttcagcagtttatcgatgaaggcaattatacatccggcgacaaccatacgctgagagaccctcactacgttgaagacaaaggccataaataccttgtattcgaagccaacacgggaacagaaaacggataccaaggcgaagaatctttatttaacaaagcgtactacggcggcggcacgaacttcttccgtaaagaaagccagaagcttcagcagagcgctaaaaaacgcgatgctgagttagcgaacggcgccctcggtatcatagagttaaataatgattacacattgaaaaaagtaatgaagccgctgatcacttcaaacacggtaactgatgaaatcgagcgcgcgaatgttttcaaaatgaacggcaaatggtacttgttcactgattcacgcggttcaaaaatgacgatcgatggtattaactcaaacgatatttacatgcttggttatgtatcaaactctttaaccggcccttacaagccgctgaacaaaacagggcttgtgctgcaaatgggtcttgatccaaacgatgtgacattcacttactctcacttcgcagtgccgcaagccaaaggcaacaatgtggttatcacaagctacatgacaaacagaggcttcttcgaggataaaaaggcaacatttgcgccaagcttcttaatgaacatcaaaggcaataaaacatccgttgtcaaaaacagcatcctggagcaaggacagctgacagtcaactaa

SEQ ID NO: 136032 - DNA, 1218 bp, Homo sapiens
atgaacatgaacatcaaaaaaattgtaaaacaagccacagttctcacttttacgactgcacttctggcaggaggagcccctcaagccttcgcgaaagaaaataaccaaaaagcatacaaagaaacgtacggcgtctctcatattacacgccatcatatgctgcagatccctaaacagcagcaaaacgaaaaataccaagtgcctcaattcgatcaatcaacgattaaaaatattgagtctgcaaaaggacttgatgtgtgggacagctgcccgctgcaaaacgctgacggaacagtagctgaatacaacggctatcacgttgtgtttgctcttgcgggaagcccgaaagacgctgatgacacatcaatctacatgttttatcaaaaggtcggcgacaactcaatcgacagctggaaaaacgcgggccgtgtctttaaagacagcgataagttcgacgccaacgatccgatcctgaaagatcagacgcaagaatggtccggttctgcaacctttacatctgacggaaaaatccgtttattctacactgactattccgacaaaggccataaataccttgtattcgaagccaacacgggaacagaaaacggataccaaggcgaagaatctttatttaacaaagcgtactacggcggcggcacgaacttcttccgtaaagaaagccagaagcttcagcagagcgctaaaaaacgcgatgctgagttagcgaacggcgccctcggtatcatagagttaaataatgattacacattgaaaaaagtaatgaagccgctgatcacttcaaacacggtaactgatgaaatcgagcgcgcgaatgttttcaaaatgaacggcaaatggtacttgttcactaattcacgcggttcaaaaatgacgatcgatggtattaactcaaacgatattaacatgcttggttatgtatcaaactctttaaccggcccttacaagccgctgaacaaaacagggcttgtgctgcaaatgggtcttgatccaaacgatgtgacattaactaactctcacttcgcagtgccgcaagccaaaggcaacaatgtggttatcacaagctacatgacaaacagaggcttcttcgaggataaaaaggcaacatttgcgccaagcttcttaatgaacatcaaaggcaataaaacatccgttgtcaaaaacagcatcctggagcaaggacagctaacagtcaactaa

SEQ ID NO: 136033 - DNA, 1851 bp, Homo sapiens
ccatggatatccgcgcctgttccggtggacgtggtggagggtgcaatggactctgtgacggttcttagctttggtggtttaatgctctatttttgtgctggttggcctcctgccaggaggtggtgctttccagaaagcatcagctgtggtagtatggagagggaccagtggtgggggctccaagtagcgaagcgagcaggactggccggcggccaaagcggtcggacagtgctccgagaacgggtgcgcatagaaattgcatcaacgcatatagcgctagcagcacgccatagtgactggcgatgctgtcggaatggacgatatcccgcaagaggcccggcagctttgcagaactttcagcggtataccggcatacagcatgtgcatcgcataggaatggcggaacgtatgtggtgtgaccggaacagagaacgtcacaccgtcagcagcagcggcggcaaccgcctccccaatccaggtcctgaccgttcttgtgacaatctaaaaacttgtcacacttcacatggatctgtcatggcggaaacagcggttatcaatcacaagaaacgtaaaaatagcccgcgaatcgtccagtcaaacgacctcactgaggcggcatatagtctctcccgggatcaaaaacgtatgctgtatctgttcgttgaccagatcagaaaatctgatggcaccctacaggaacatgacggtatctgcgagatccatgttgcttaaatatgttgaaatatttcggattgccctttgcggaagccagtaaggatatccggcaggcattgaagagtttcgcgggaaaggaagtggttttttatcgccctgaagaggatgccggcgatgaaaaaggctatgaatcttttccttggtttatcaaacgtgcgcccagtccatccaaagggctttacagtgtacatatcaacccatatctcattcccttctttatcgggttacagaacccggttaacgcagtttcggcttagtgaaacaaaagaaatccccaatccgtatgccatgcgctatatacaaataccctgtgtcagtatcgtaagccggatggctcaggcatcgtctctctgaaaatcgactggatcatagagcgttaccagctgcctcaaagttaccagcgagtgtggaccccaggcatcaactgtccagagccctgtccaggagtgtggaccccaggcatcaactgtccaggggcctggggcatccatgggccacacggcagcgctgaaaacacagggcccttgcacccagggcagacctcagcacagttggagacatcactcctgccctccttgcgctcggcccgagagctagagcttgctcagctcagccccaggaggaagcagaaccgcagcctccagaacattggggtgaccccgtcgctgagggtcccctggcccaaggccagcaacgttcagcagtttatcgatgaaggcaattatacatccggcgacaaccatacgctgagagaccctcactacgttgaagacaaaggccataaataccttgtattcgaagccaacacgggaacagaaaacggataccaaggcgaagaatctttatttaacaaagcgtactacggcggcggcacgaacttcttccgtaaagaaagccagaagcttcagcagagcgctaaaaaacgcgatgctgagttagcgaacggcgccctcggtatcatagagttaaataatgattacacattgaaaaaagtaatgaagccgctgatcacttcaaacacggtaactgatgaaatcgagcgcgcgaatgttttcaaaatgaacggcaaatggtacttgttcactgattcacgcggttcaaaaatgacgatcgatg

SEQ ID NO: 136034 - DNA, 5912 bp, Homo sapiens
atggaggtaacacactcaatcatgatccggccagccctgaggcccagcccacagtccggcccacagcccacgctaaccctggtggtcccagttagagaagtgggaggccaggtcccttatggaaggcgccgccttataagcgggttcccttcccgggggcggcacggctggtcggcggcactctgctggtgcgggggcggcgagcccgggatcgagctaccgcggccgagcgcgccggccaccgcctgcaccgcccttccgcccgccctccggacggccgcagccctgcgggtctccgctccagacccacccccgccccaccccgcgcgcctctgccgcctcttccagagacccagcttgccgagcggccgccgctgccgctgtcgccgccgccgccgccaccgcgccaggttccggccgcggccaccctccgccgtccagggcccctccgtctcggccccgggaccccggctccccgccagccccggccccggccccggcaccatgtcggagaaaagcgtggaggcagcggccgagttgagcgccaaggacctgaaggagaagaaggagaaggtggaggagaaggcaagccggaaagagcgaaagaaagaagtggtggaggaggaggagaacggggctgaggaggaagaagaagaaactgccgaggatggagaggaggaagatgaaggggaagaagaagatgaggaagaagaagaagaggatgatgaagggcccgcgctgaagagagctgccgaagaggaggatgaagcggatcccaaacggcagaagacagaaaatggggcatcggcgatctcagccttctgcgaagagcaggggtcacttggcagcatcagccagacagaagtggatgcggccagtccaacagaggggtcgggcgtgaggggacggttggtggtcaagagaactcttggggcgggctttctcatcctcaacgggtggctgcctgcatcctcccgggcttcctacccctggagcttctcaactccattctctttcccgcccagtggcccgcccgctgccgcccccggccatcccctggcccccggccctcacccggcggcgccctcctcctgggggcccaggccccgccgctacacggtgctgagcgtgggtcccggaggcctgcgcagcgggaggctgcccctgcagccccgcgtccagctggatgagcgcggccggcagcgcggggacttctcgctatggctgcgcccagcccggcgcgcggacgccggcgagtaccgcgccgcggtgcacctcagggaccgcgccctctcctgccgcctccgtctgcgcctgggccaggcctcgagtatgtggggcgggacgatgggagaagggctgggagtgactgccagccccccaggatctctcagagcctccgactgggtcattttgaactgctccttcagccgccctgaccgcccagcctctgtgcattggttccggaaccggggccagggccgagtccctgtccgggagtccccccatcaccacttagcggaaagcttcctcttcctgccccaagtcagccccatggactctgggccctggggctgcatcctcacctacagagatggcttcaacgtctccatcatgtataacctcactgttctgggtctggagcccccaactcccttgacagtgtacgctggagcaggttccagggtggggctgccctgccgcctgcctgctggtgtggggacccggtctttcctcactgccaagtggactcctcctgggggaggccctgacctcctggtgactggagacaatggcgactttacccttcgactagaggatgtgagccaggcccaggctgggacctacacctgccatatccatctgcaggaacagcagctcaatgccactgtcacattggcaatcatcacaggaggagcgactcaagccttcgcgaaagaaaataaccaaaaagcatacaaagaaacgtacggcgtctctcatattacacgccatgatatgctgcagatccctaaacagcagcaaaacgaaaaataccaagtgcctcaattcgatcaatcaacgattaaaaatattgagtctgcaaaaggacttgatgtgtgggacagctggccgctgcaaaacgctgacggaacagtagctgaatacaacggctatcacgttgtgtttgctcttgcgggaagcccgaaagacgctgatgacacatcaatctacatgttttatcaaaaggtcggcgacaactcaatcgacagctggaaaaacgcgggccgtgtctttaaagacagcgataagttcgacgccaacgatccgatcctgaaagatcagacgcaagaatggtccggttctgcaacctttacatctgacggaaaaatccgtttattctacactgactattccggtaaacattacggcaaacaaagcctgacaacagcgcaggtaaatgtgtcaaaatctgatgacacactcaaaatcaacggagtggaagatcacaaaacgatttttgacggagacggaaaaacatatcagaacgttcagcagtttatcgatgaaggcaattatacatccggcgacaaccatacgctgagagaccctcactacgttgaagacaaaggccataaataccttgtattcgaagccaacacgggaacagaaaacggataccaaggcgaagaatctttatttaacaaagcgtactacggcggcggcacgaacttcttccgtaaagaaagccagaagcttcagcagagcgctaaaaaacgcgatgctgagttagcgaacggcgccctcggtatcatagagttaaataatgattacacattgaaaaaagtaatgaagccgctgatcacttcaaacacggtaactgatgaaatcgagcgcgcgaatgttttcaaaatgaacggcaaatggtacttgttcactgattcacgcggttcaaaaatgacgatcgatggtattaactcaaacgatatttacatgcttggttatgtatcaaactctttaaccggcccttacaagccgctgaacaaaacagggcttgtgctgcaaatgggtcttgatccaaacgatgtgacattcacttactctcacttcgcagtgccgcaagccaaaggcaacaatgtggttatcacaagctacatgacaaacagaggcttcttcgaggataaaaaggcaacatttgcgccaagcttcttaatgaacatcaaaggcaataaaacatccgttgtcaaaaacagcatcctggagcaaggacagcgggtaccgagctcgaattcgtaatcatgtctgggaccacgatcccactcgtgttgtcggtctgattctcggtctgggaccacggtccctcttgtcttgttcgtctgactgtccggcgtgggactgcggattccgtcagtggcctgtcctggtgcggggtgttggcgtggtcgtcggctccgtgttgaccgtgggttcccctcggtgtggcccgcccagcccgaaagacgctgatgacacatcaatctacatgttttatcaaaaggtcggcgacaactcaatcgacagctggaaaaacgcgggccgtgtctttaaagacagcgataagttttttgccaacttttcttttctgaaagatcagacgcaagagtggggggggtctgcaacctttacatctgacggaaaaatccgtttattctacactgactattccggtaaacattacggcaaacaaagcctgacaacagcgcaggtaaatgtgtcaaaatctgatgacacactcaaaatcaacggagtggaagatcacaaaacgatttttgacggagacggaaaaacatatcagaacgttcagcagtttatcgatgaaggcaattatacatccggcgacaaccatacgctgagagaccctcactacgacagcctcaatgcccacggatgggtaccagatcttcatattcatgcagaagacactctcctgcctttctatcttggggaaaaggacgatgtcacttatgcaataaagcccacttgctggccggggcttgacattattcctttctgtctggctctgcaccgtattgaaacggagttaatgggcaaatttgatgaaggtaaactgcccaccgatccacacctgatgctccgactggccattgaaactgttgctcatgactatgatgtcatagttattgacagcgcgcctaacctgggtatcggcacgattaatgtcgtatgtgctgctgatgtgctgattgttcccacgcctgctgagttgtttgactacacctccgcactgcagtttttcgatatgcttcgtgatctgctcaagaacgttgatcttaaagggttcgagcctgatgtacgtattttgcttaccaaatacagcaatagtaatggctctcagtccccggggatggaggagcaaattcgggatgcctggggaagcatggttctaaaaaatgttgtacgtgaaacggatgaagttggtaaaggtcagatccggatgagaactgtttttgaacaggccattgatcaacgctcttcaactgaaagcattatccctaatgatggtaagaaattgtcattttctgtgtcaggaaaaatgaggaaagggcactacttttcgtctgaagagagtcatgttagaacagacatcctggcggatacaaaaatgcaatctgcaaacggacttgatgtgtgggacagctggccgctgcaaaacgctgacggaacagtagctgaatacaacggctatcacgttgtgtttgctcttgcgggaagcccgaaagacgctgatgacacatcaatctacatgttttatcaaatggtcggcgacaactcaatcgacagctggaaaaacgcgggccgtgtctttaaagacagcgataagttcgacgcccacgatccgatcctgaaagatcagacgcaagaatggtccggttctgcaacctttacatctgacggaaaaatccgtttattctacactgactattccggtaaacattacggcaaacaaagcctgacaacagcgcaggtaaatgtgtcaaaatctgatgacacactcaaaatcaacggagtggaagatcacaaaacgatttttgacggagacggaaaaacatatcagaacgttcagcagtttatcgatgaaggcaattatacatccggcgacaaccatacgctgagagaccctcactacgttgaagacaaaggccataaataccttgtattcgaagccaacacgggaacagaaaacggataccaaagcgaagaatctttatttaacaaagcgtactacggcggcggcacgaacttcttccgtaaagaaagccagaagcttcagcagagcgctaaaaaacgcgatgctgaattaacgaacggcgccccttcgtatcatagagttaaataatgattacacattgaaaaaagtaatgaagccgctgatgacttcaaacacggatctggctctgaaggggctacgtgttttgctcgtggaaggtaacgacccccagggaacagcctcaatgtatcacggatgggtaccagatcttcatattcatgcagaagacactctcctgcctttctatcttggggaaaaggacgatgtcacttatgcaataaagcccacttgctggccggggcttgacattattccttcctgtctggctctgcaccgtattgaaactgagttaatgggcaaatttgatgaaggtaaactgcccaccgatccacacctgatgctccgactggccattgaaactgttgctcatgactatgatgtcatagttattgacagcgcgcctaacctgggtatcggcacgattaatgtcgtatgtgctgctgatgtgctgattgttcccacgcctgctgagttgtttgactacacctccgcactgcagtttttcgatatgcttcgtgatctgctcaagaacgtggtgttctag

SEQ ID NO: 136035 - DNA, 6633 bp, Homo sapiens
  misc_feature (1)...(6633): n = a,t,c or g
catttgccgttcattttgaaaacattcgcgcgctcgatttcatcagttaccgtgtttgaagtgatcagcggcttcattacttttttcaatgtgtaatcattatttaactctatgataccgagggcgccgttcgctaactcagcatcgcgttttttagcgctctgctgaagcttctggctttctttacggaagaagttcgtgccgccgccgtagtacgcttggttaaataaagattcttcgccttggtatccgttttctgttcccgtgttggcttcgaatacaaggtatttatggcctttgtcttcaacgtagtgagggtctctcagcgtatggttgtcgccggatgtataattgccttcatcgataaactgctgaacgttctgatatgtttttccgtctccgtcaaaaatcgttttgtgatcttccactccgttgattttgagtgtgtcatcagattttgacacatttacctgcgctgttgtcaggctttgtttgccgtaatgtttaccggaatagtcagtgtaaaataaacggatttttccgtcagatgtaaagggttgcagaaccggaccattcttgcgtctgatctttaggatcggatcgttggcgtcgaacttatcgctgtctttaaagacacgggccgcgtttttccanctggacgggtctcgtgttccaactgagtgtatagagaaaattgaggccgttcttaaagaacttggaaagccagccctctggtgcgaccacgctttatcctccggttgtctggtcctttccttatggtcctttgtttcaggcccgatagcatgactgggcctccttctttcgtctggggacccctggtccaattggagttgtcggggtggtaattcgacctggacgccgcggccccctcccagccggggggttgcttttttatctgtgaggcgatggtcccggtcgtattgagctagtactttttcctcacccacccctttccccccccttctccgtaggccgctactctgcaactgggccatcgcccctgttcgtgttgtggtggtttgtgtatggtagtggtcaattggtgtgccgggtcgaggagtgcgcatatggcgttgagacgggtgaaggttgatccgggcaccgctgcgctctctttttcccgttgctggtttcttgtctctgtcgatcggctcacgaggagtaggttcagcgctattcggcggctcgcggcgcctatccattgttacccctggattggggaggcggttgccgccgctgctgctgacggtgtgacgttctctgttccggtcacaccacatacgttccgccattcctatgcgatgcacatgctgtatgccggtataccgctgaaagttctgcaaagcctcctgcttgacggccacagagcttctgctccactcctgttcctctgtagggtgcagccctggaggtggaggaaatgtaagcaagatatagattaggtccatagcgtatagcagatctaattgcccgctttccagtcgggaaacctgtcgtgccagctgcattaatgaatcggccaacgcgcggggagaggcggtttgcgtattgggcgccagggtggtttttcttttcaccagtgagacgggcaacagctgattgcccttcaccgcctggccctgagagagttgcagcaagcggtccacgctggtttgccccagcaggcgaaaatcctgtttgatgggtggtccgaaatcggcaaaatcccatttgccgttcattttgaaaacattcgcgcgctcgatttcatcagttaccgtgtttgaagtgatcagcggcttcattacttttttcaatgtgtaatcattatttaactctatgataccgagggcgccgttcgctaactcagcatcgcgttttttagcgctctgctgaagcttctggctttctttacggaagaagttcgtgccgccgccgtagtacgctttgttaaataaagattcttcgccttggtatccgttttctgttcccgtgttggcttcgaatacaaggtatttatggcctttgtcttcaacgtagtgagggtctctcagcgtatggttgtcgccggatgtataattgccttcatcgataaactgctgaacgttctgatatgtttttccgtctccgtcaaaaatcgttttgtgatcttccactccgttgattttgagtgtgtcatcagattttgacacatttacctgcgctgttgtcaggctttgtttgccgtaatgtttaccgggatagtcagtgtaaaataaaccgatttttccgtcagatgtaaaagttgcagaaaccggaccattcttgcgtctgatcttttcagatccggatcgttgggcgtcaaacttatcggctggctttaaagaacacggcccgggtttttcccactggcaattgaatttgtcccccaactgcccgctttccagtcgggaaacctgtcgtgccagctgcattaatgaatcggccaacgcgcggggagaggcggtttgcgtattgggcgccagggtggtttttcttttcaccagtgagacgggcaacagctgattgcccttcaccgcctggccctgagagagttgcagcaagcggtccacgctggtttgccccagcaggcgaaaatcctgtttgatggtggttccgaaatcggcaaaatcctgcccgctttccagtcgggaaacctgtcgtgccagctgcattaatgaatcggccaacgcgcggggagaggcggtttgcgtattgggcgccagggtggtttttcttttcaccagtgagacgggcaacagctgattgcccttcaccgcctggccctgagagagttgcagcaagcggtccacgctggtttgccccagcaggcgaaaatcctgtttgatggtggttccgaaatccgcaaaatcctgcccgctttccagtcgggaaacctgtcgtgccagctgcattaatgaatcggccaacgcgcggggagaggcggcttgcgtattgggcgccagggtggtttttcttttcaccagtgagacgggcaacagctgattgcccttcaccgcctggccctgacagagtttaagcaagcggtccacgctggtttgccccagcaggcgaaaatcttgtttgatggtggttccgaaatcggtaaaatccattaattgcgttgcgctcactgcccgctttccagtcgggaaacctgtcgtgccagctgcattaatgaatcggccaacgcgcggggagaggcggtttgcgtattgggcgccagggtggtttttcttttcaccagtgagacgggcaacagctgattgcccttcaccgcctggccctggattggggaggcggttgccgccgctgctgctgacggtgtgacgttctctgttccggtcacaccacatacgttccgccattcctatgcgatgcacatgctgtatgccgctataccgctgaaagttctgtaaagccagtgagacgggcaacagctgattgcccttcaccgcctggccctgagagagttgcagcaagcggtccacgctggtttgccccagcaggcgaaaatcctgtttgatggtggttccgaaatcggcaaaatcctgcccgctttccagtcgggaaacctgtcgtgccagctgcattaatgaatcggccaacgcgcggggagaggcggtttgcgtattgggcgccagggtggtttttcttttcaccagtgagacgggcaacagctgattgcccttcaccgcctggccctgagagagttgcagcaagcggtccacgctggtttgccccagcaggcgaaaatcctgtttgatggtggttccgaaatcggcaaaatcctgcccgctttccagtcgggaaacctgtcgtgccagctgcattaatgaatcggccaacgcgcggggagaggcggtttgcgtattgggcgccagggtggtttttcttttcaccagtgagacgggcaacagctgattgcccttcaccgcctggccctgagagagttgcagcaagcggtccacgctggtttgccccagcaggcgaaaatcctgtttgatggtggttccgaaatcggcaaaatccttgtcaggctgcccatctgccaaggaaactgtcaaggcttcactggttgtgccaggcccttgaccaacctctgggtcagctgcattcccaatgctgttctgagtctgcaagcgttgctgcccgctttccagtcgggaaacctgtcgtgccagctgcattaatgaatcggccaacgcgcggggagaggcggtttgcgtattgggcgccagggtggtttttcttttcaccagtgagacgggcaacagctgattgcccttcaccgcctggccctgagagagttgcagcaagcggtccacgctggtttgccccagcaggcgaaaatcctgtttgatggtggttccgaaatcggcaaaatcctgcccgctttccagtcgggaaacctgtcgtgccagctgcattaatgaatcggccaacgcgcggggagaggcggtttgcgtattgggcgccagggtggtttttcttttcaccagtgagacgggcaacagctgattgcccttcaccgcctggccctgagagagttgcagcaagcggtccacgctggtttgccccagcaggcgaaaatcctgtttgatggtggttccgaaatcggcaaaatcctgcccgctttccagtcgggaaacctgtcgtgccagctgcattaatgaatcggccaacgcgcggggagaggcggtttgcgtattgggcgccagggtggtttttcttttcaccagtgagacgggcaacagctgattgcccttcaccgcctggccctgagagagttgcagcaagcggtccacgctggtttgccccagcaggcgaaaatcctgtttgatggtggttccgaaatcggcaaaatccattaattgcgttgcgctcactgcccgctttccagtcgggaaacctgtcgtgccagctgcattaatgaatcggccaacgcgcggggagaggcggtttgcgtattgggcgccagggtggtttttcttttcaccagtgagacgggcaacagctgattgcccttcaccgcctggccctgagagagttgcagcaagcggtccacgctggtttgccccagcaggcgaaaatcctgtttgatggtggttccgaaatcggcaaaatcccttaaacctttctgctttactcaggtataaaagatgctgatacaccaatgagggatctttttcaataagattatttttcagagactgaatgaggagaaggaatgtatccccttcaagtttgttacttaaaaacatcggcaaatcttttggtgcagtgatggctaaaagatgtgcacaggcttctttatccttcctggtactgagagcatttataatctgaccaaattcataggcattattaggcttggctatcggaagtttctcagggtcttctggtgacctgctgcttttgcctcccttctcagaagcaaggcatcccatggagacctcccctgcaggtcttccaggctcctccttgccttcattcaccgtgtttgaagtgatcagcggcttcattacttttttcaatgtgtaatcattatttaactctatgataccgagggcgccgttcgctaactcagcatcgcgttttttagcgctctgctgaagcttctggctttctttacggaagaagttcgtgccgccgccgtagtacgctttgttaaataaagattcttcgccttggtatccgttttctgttcccgtgttggcttcgaatacaaggtatttatggcctttgtcttcaacgtagtgagggtctctcagcgtatggttgtcgccggatgtataattgccttcatcgataaactgctgaacgttctgatatgtttttccgtctccgtcaaaaatcgttttgtgatcttccactccgttgattttgagtgtgtcatcagattttgacacatttacctgcgctgttgtcaggctttgtttgccgtaatgtttaccggaatagtcagtgtagaataaacggatttttccgtcagatgtaaaggttgcagaaccggaccattcttgcgtctgatctttcaggatcggatcgttggcgtcgaacttatcgctgtctttaaagacacggcccgcgtttttccagctgtcgattgagttgtcgccgacctgacctggtttccatttaagatctcttggggtttctgacctaatattctttccactcttttgagggctaggactgatcatacttgtttgaaggacggtatttattaattgcgttgcgctcactgcccgctttccagtcgggaaacctgtcgtgccagctgcattaatgaatcggccaacgcgcggggagaggcggtttgcgtattgggcgccagggtggtttttcttttcaccagtgagacgggcaacagctgattgcccttcaccgcctggccctgagagagttgcagcaagcggtccacgctggtttgccccagcaagcgaaaatcctgtttgatggtggttccgaaatcggcaaaatcccttgagtcctttatgagccagagctcgtctatagaaggctttcacgttcccatcagctagctgaagtgcgtgatcacagtcctgctttgcttcttcaaactggcacagcttcaagtaacagagagct

SEQ ID NO: 136036 - DNA, 3947 bp, Homo sapiens
  misc_feature (1)...(3947): n = a,t,c or g
atgcgggtgccggttctcctcccgctccgctcagtcgctccctccgccctcctttcgactgggtgccgacatgtcatctgggtggggtggatgatttcacagccagggcaaggcgtcctgctcagtccgagcagccggcttgactggcagccaccaaccctgtttatggatctgcaggtctgcaccagtccgttgcccgtgcaaaacgctgacggaacagtagttgatacaacggcatcccgttgtgttggttctgcggaaagcccgaaagacgttgatgcccatccaatctacatgttttatcaaaaggtcggcgacaactcaatcgacagctggaaaaccgcgggccgtgtctttaaagacagcgataagttcgacgcccaacgatccgatcctgaaagatcagacgcaagaatggtccggttctgcaacctttacatctgacggaaaaatccgtttattctacactgactattccggtaaacattacggcaaacaaagcctgacaacagcgcaggtaaatgtgtcaaaatctgatgacacactcaaaatcaacggagtggaagatcacaaaacgatttttgacggagacggaaaaacatatcagaacgttcagcagtttatcgatgaaggcaattatacatccggcgacaaccatacgctgagagaccctcactacgttgaagacaaaggccataaataccttgtattcgaagccaacacgggaacagaaaacggataccaaggcgaagaatctttatttaacaaagcgtactacggcggcggcacgaacttcttccgtaaagaaagccagaagcttcagcagagcgctaaaaaacgcgatgctgagttagcgaacggcgccctcggtatcatagagttaaataatgattacacattgaaaaaagtaatagaagccgctgatcacttcaaacgcggtcggcgacaactcaatcgacagctggaaaaacgcgggccgtgtctttaaagacagcgataagttcgacgccaacgatccgatcctgaaagatcagacgcaagaatggtccggttctgcaacctttacatctgacggaaaaatccgtttattctacactgactattccggtaaacattacggcaaacaaagcctgacaacagcgcaggtaaatgtgtcaaaatctgatgacacactcaaaatcaacggagtggaagatcacaaaacgatttttgacggagacggaaaaacatatcagaacgttcagcagtttatcgatgaaggcaattatacatccggcgacaaccatacgctgagagaccctcactacgttgaagacaaaggccataaataccttgtattcgaagccaacacgggaacagaaaaaaaataccaaggcgaagaatctttatttaacaaagcgtactacggcggcggcacgaacttcttccgtaaagaaagccagaagcttcagcagagcgctaaaaaacgcgatgctgagttagcgaacggcgccctcggtgtgatctccattcctttgtacatccctcacacgctgttcgaatgggattttggaaaggaaatctgtgtattttggctcactactgactatctgttatgtacagcatctgtatataacattgtcctcatcagctatgatcgatacctgtcagtctcaaatgctatcctaaacagcagcaaaacgaaaaaataccaagtggctcaatttggatcaatcaaggattaaaaatattaattttgcaaaaggacttgatgtgtgggacagctggccgctgcaaaacgctgacggaaccagtagctgaatacaacggctatcacgttgtgtttgctcttgcgggaagcccgaaagacgctgatgacacatcaatctacatgttttatcaaaaggtcggcgacaactcaatcgacagctggaaaaacgcgggccgtgtctttaaagacagcgataagttcgacgccaacgatccgatcctgaaagatcagacgcaagaatggtccggttctgcaacctttacatctgacggaaaaatccgtttattctacactgactattccggtaaacattacggcaaacaaagcctgacaacagcgcaggtaaatgtgtcaaaatctgatgacacactcaaaatcaacggagtggaagatcacaaaacgatttttgacggagacggaaaaacatatcagaacgttcagcagtttatcgatgaaggcaattatacatccggcgacaaccatacgctgagagaccctcactacgttgaagacaaaggccataaataccttgtattcgaagccaacacgggaacagaaaacggataccaaggcgaagaatctttatttaacaaagcgtactacggcggcggcacgaacttcttccgtaaagaaagccataagcttcaacagagcgctaaaaaacgccatgctgagttagcgaacggcgccctccgtatcataaatcaggcaccgtgtatgaaatctaacaatgcgctcatcgtcatcctcggcaccgtcaccctggatgctgtaggcataggcttggttatgccggtactgccgggcctcttgcgggatatcgtccattccgacagcatcgccagtcactatggcgtgctgctagcgctatatgcgttgatgcaatttctatgcgcacccgttctcggagcactgtccgaccgctttggccgccgcccagtcctgctcgcttcgctacttggagccatgtcagctgtccttgctccaggatgctgtttttgacaacggatgttttattgcctttgatgttcattaagaagcttggcgcaaatgttgcctttttatcctcgaagaagcctctgtttgtcatgtagcttgtgataaccacattgttgcctttggcttgcggcacatnttgccgttcattttgaaaacattcgcgcgctcgattttcatcagttaccgtgtttgaagtgatcagcggcttcattacttttttcaatgtgtaatcattatttaactctatgataccgagggcgccgttcgctaactcagcatcgcgttttttagcgctctgctgaagcttctggctttctttacggaagaagttcgtgccgccgccgtagtacgctttgttaaataaagattcttcgccttggtatccgttttctgttcccgtgttggcttcgaatacaaggtatttatggcctttgtcttcaacgtagtgagggtctctcagcgtatggttgtcgccggatgtataattgccttcatcgataaactgctgaacgttctgatatgtttttccgtctccgtcaaaaatcgttttgtgatcttccactccgttgattttgagtgtgtcatcagattttgacacatttacctgcgctgttgtcaggctttgtttgccgtaatgtttaccggaatagtcagtgtagaataaacggatttttccgtcagatgtaaaggttgcagaaccggaccattcttgcgtctgatctttcaggatcggatcgttggcgtcgaacttatcgctgtctttaaagacacggcccgcgtttttccagctgtcgattgagttgtcgccgaccttttgataaaacatgtagattgatgtgtcatcagcgtctttcgggcttcccgcaagagcaaacacaacgtgatagccgttgtattcagctactgttccgtcagcgttttgcagcggccagctgtcccacacatcaagtccttttgcagactcaatatttttaatcgttgattgatcgaattgaggcacttggtatttttcgttttgctgctgtttagggatctgcagcatatcatggcgtgtaatatgagagacgccgtacgtttctttgtatgctttttggttattttctttcgcgaaggcttgagtcgctcctcctgccagaagtgcagtcgtaaaagtcagaactgtggcttgttttacaatttttttgatgttcatgttcat

SEQ ID NO: 136037 - DNA, 937 bp, Homo sapiens
  misc_feature (1)...(937): n = a,t,c or g
atgccgggggtttgggtgattttactgantgccgtcccagaactgctggtgcaacttgcctcaatatctatcagaggagcgactcaagccttcgcgaaagaaaataaccaaaaagcatacaaagaaacgtacggcgtctctcatattacacgccatgatatgctgcagatccctaaacagcagcaaaacgaaaaataccaagtgcctcaattcgatcaatcaacgattaaaaatattgagtctgcaaaaggacttgatgtgtgggacagctggccgctgcaaaacgctgacggaacagtagctgaatacaacggctatcacgttgtgtttgctcttgcgggaagcccgaaagacgctgatgacacatcaatctacatgttttatcaaaaggtcggcgacaactcaatcgacagctggaaaaacgcgggccgtgtctttaaagacagcgataagttcgacgccaacgatccgatcctgaaagatcagacgcaagaatggtccggttctgcaacctttacatctgacggaaaaatccgtttattctacactgactattccggtaaacattacggcaaacaaagcctgacaacagcgcagtttttcgatatgcttcgtgatctgctcaagaacgttgatcttaaagggttcgagcctgatgtacgtattttgcttaccaaatacagcaatagtaatggctctcagtccccgtggatggaggagcaaattcgggatgcctggggaagcatggttctaaaaaatgttgtacgtgaaacggatgaagttggtaaaggtcagatccggatgagaactgtttttgaacaggccattgatcaacgctcttcaactggtgcctggagaaatgctctttctatttgggaacctgtctgcaactgaaattttcgatcgtctgattaaaccacgctgggagattagataa

SEQ ID NO: 136038 - DNA, 3086 bp, Homo sapiens
ctatccacgcccattgatgtactgccaaaaccgcatcaccatggtaatagcgatgactaatacgtagatgtactttctcttcttttttggaggagtagaatgttgagagtcagcagtagcctcatcatcactagatggcatttcttctgagcaaaacaggttttcctcattaaaggcattccaccactgctcccattcatcagttccataggttggaatcactcgaatacttctatctacttcgtcagaataagggtgtctaacagctacaatcgtgtcaaaatccttttgtccattcgaaactgcactaccaatcgcaatggcttctgcacaaacagttactcgtcctatatacgcttcaatatgtactgccgaaatgatttctcctgttttcgtacgaattgccgctcccacatgatgtttattatcctcataaagcattgtaatcttctctgtcgctacttctactaattctagatcttgttgagaaatgttaaatgttttcatatattcttcttcctccgatttctggttgctgactaattgagatgcatgctttgcatacttctgcctgctggggagcctggggactttccacaccctaactgacacacattccacagctagcgctatatgcgttgatgcaatttctatgcgcacccgttctcggagcactgtccgaccgctttggccgccgcccagtcctgctcgcttcgctacttggagccatgtcagctgtccttgctccaggatgctgtttttgacaacggatgttttattgcctttgatgttcattaagaagcttggcgcaaatgttgcctttttatcctcgaagaagcctctgtttgtcatgtagcttgtgataaccacattgttgcctttggcttgcggcactgcgaagtgagagtaagtgaatgtcacatcgtttggatcaagacccatttgcagcacaagccctgttttgttcagcggcttgtaagggccggttaaagagtttgatacataaccaagcatgtaaatatcgtttgagttaataccatcgatcgtcatttttgaaccgcgtgaatcagtgaacaagtaccatttgccgttcattttgaaaacattcgcgcgctcgatttcatcagttaccgtgtttgaagtgatcagcggcttcattacttttttcaatgtgtaatcattatttaactctatgataccgagggcgccgttcgctaactcagcatcgcgttttttagcgctctgctgaagcttctggctttctttacggaagaagttcgtgccgccgccgtagtacgctttgttaaataaagattcttcgccttggtatccgttttctgttcccgtgttggcttcgaatacaaggtatttatggcctttgtcttcaacgtagtgagggtctctcagcgtatggttgtcgccggatgtataattgccttcatcgataaactgctgaacgttctgatatgtttttccgtctccgtcaaaaatcgttttgtgatcttccactccgttgattttgagtgtgtcatcagattttgacacatttacctgcgctgttgtcaggctttgtttgccgtaatgtttaccggaatagtcagtgtagaataaacggatttttccgtcagatgtaaaggttgcagaaaccggacctttctttgcgtctgatctttcaggatcggatcgttggcgtcgaacttatcgctgtctttaaagacacggcccgcgtttttccagctgtcgattgagttgtcgccgaccttttgataaaacatgtagattgatgtgtcatcagcgtctttcgggcttcccgcaagagcaaacacaacgtgatagccgttgtattcagctactgttccgtcagcgttttgcagcggccagctgtcccacacatcaagtccttttgcagactcaatatttttaatcgttgattgatcgaattgaggcacttggtatttttcgttttgctgctgtttagggatctgcagcatatcatggcgtgtaatatgagagacgccgtacgtttctttgtatgctttttggttattttctttcgcgaaggcttgagtcgctcctcctgccagaagtgcagtcgtaaaagtcagaactgtggcttgttttacaatttttttgatgttcatgttcatgtctccttctgtatgtactgttttttgcgatctgccgtttcgatcctcccgaattgactgagtagtagcaactacagtagctgtattgggtgcaggaagaactgacgttgctgtgagggaacccgaagtcactggagtctgcaatttaggttgactactgacaactgctggaggagtgacaagattggttgaagatactgtattcacaggagtttgaaaggatggtggtgcactctcgcttacatttcttttggactccagcatctgtctcactgtgcctgcatttctgtaagacatgttattattgctgttgacatcatttacagtttttcctggtgatactggtgggttgggtggatggatcactgatgtccccacagtcgcctcagttcccgccacggaacggcgggcgaaaagcagggcgggaatacgccggtaggaatacgcgggcacgtaacgcgtcacttccggtgctggcaggctcagcaatgagggcggggcggcggcgcgcgggcctctggaaccctgccggtccaccgaaggtcccgagcccgctatcttcgtaggtgcgggcctccggaggtgcaggtccctgtcctccttgtcctgcttcgtcgcagagcagaacgcgtgtgctttaagggcagagacatctgaagatgctttgccttgccctcttgaggacacgtggcttttacctctaatagtgtctgcgtgttgtggagagagaagaccatgcagttggtatttttcgttttgctgctgtttagggatctgcagcatatcatggcgtgtaatatgagagacgccgtacgtttctttgtatgctttttggttattttctttcgcgaaggcttgagtcgctcctcctgccagaagtgcagtcgtaaaagtcagaactgtggcttgttttacaatttttttgatgttcatgttcat

SEQ ID NO: 136039 - DNA, 1825 bp, Homo sapiens
atgagactgggatttgaatcaaggggtgagatagcaaaagatcaagctaaacttgatctagcagggcaaaaagaaagggataaccaaagctcaacattgggggaagcagaaaccccattgattatttgctggtcgactctagaggatccccactatgatgtcatagttattgacagcgcgcctaacctgggtatcggcacgattaatgtcgtatgtgctgctgatgtgctgattgttcccacgcctgctgagttgtttgactacacctccgcactgcagtttttcgatatgcttcgtgatctgctcaagaacgttgatcttaaagggttcgagcctgatgtacgtattttgcttaccaaatacagcaatagtaatggctctcagtccccgtggatggaggagcaaattcgggatgcctggggaagcatggttctaaaaaatgttgtacgtgaaacggatgaagttggtaaaggtcagatccggatgagaacctgtttttgaacaggccattgatcaacgctcttcaactgatacttcgttatcgacaccagctgccccgatggtggattcgttaattgcgcgcgtaggagtaatggctcgcggtaatgccattactttgcctgtatgtggtcgggatgtgaagtttactcttgaagtgctccggggtgatagtgttgagaagacctctcgggtatggtcaggtaatgaacgtgaccaggagctgcttactgaggacgcactggatgatctcatcccttcttttctactgactggtcaacagacaccggcgttcggtcgaagagtttccttgtaccctctggcaggaggagcgactcaagccttcgcgaaagaaaataaccaaaaagcatacaaagaaacgtacggcgtctctcatattacacgccatgatatgctgcagatccctaaacagcagcaaaacgaaaaataccaagtgcctcaattcgatcaatcaacgattaaaaatattgagtctgcaaaaggacttgatgtgtgggacagctggccgctgcaaaacgctgacggaacagtagctgaatacaacggctatcacgttgtgtttgctcttgcgggaagcccgaaagacgctgatgacacatcaatctacatgttttatcaaaaggtcggcgacaactcaatcgacagctggaaaaacgcgggccgtgtctttaaagacagcgataagttcgacgccaacgatccgatcctgaaagatcagacgcaagaatggtccggttctgcaacctttacatctgacggaaaaatccgtttattctacactgactattccggtaaacattacggcaaacaaagcctgacaacagcgcaggtaaatgtgtcaaaatctgatgacacactcaaaatcaacggagtggaagatcacaaaacgatttttgacggagacggaaaaacatatcagaacgttcagcagtttatcgatgaaggcaattatacatccggcgacaaccatacgctgagagaccctcactacgttgaagacaaaggccataaataccttgtattcgaagccaacacgggaacagaaaacggataccaaggcgaagaatctttatttaacaaagcgtactacggcggcggcacgaacttcttcccatgccgcggccgcctcgcggctacccggcttgccggtcccgagcggcagccccggggtggcgatggggtcgcgccgaggcagcggaggttctgcgggcgactggaggttggcagtgggcgggagaaagaggaaggcaagcgcggctgggcctcggcctctggcgccgcggtaccctttgtctcggcagcctga

SEQ ID NO: 136040 - DNA, 3148 bp, Homo sapiens
atggagtggggcaagttcaaaagactagtcttaccaagtcaaggcaagtcaaaaccagaacaaaggtgccaatacaggcacaccgtgggtgatcaggccacgcttccactcagatccagagtagagaaacgaaatggagaggcagagggaagaatctaccgaaaactatgggatgttgccctgctctgttgtgtccaggaggtcattaatggggaaaggaaacctctgagagcactgactgaagtgaaatcgggatttaggctcagggaggacagcgataagttcgacgccaacgatccgatcctgaaagatcagacgcaagaatggtccggttctgcaacctttacatctgacggaaaaatccgtttattctacactgactattccggtaaacattacggcaaacaaagcctgacaacagcgcagaacgttcagcagtttatcgatgaaggcaattatacatccggcgacaaccatacgctgagagaccctcactacgttgaagacaaaggccataaataccttgtattcgaagccaacacgggaacagaaaacggataccaaggcgaagaatctttatttaacaaagcgtactacggcggcggcacgaacttcttccgtaaagaaagccagaagcttcagcagagcgctaaaaaacgcgatgctgagttagcgaacggcgccctcggtatcatagagttaaataatgattacacattgaaaaaagtaatgaagccgctgatcacttcaaacacgtgtgacaatctaaaaacttgtcacacttcacatggatctgtcatggcggaaacagcgggttatcaatcacaagaaacgtaaaaatagcccgcgaatcgtccagtcaaacgacctcactgaggcggcatatagtctctcccgggatcaaaaacgtatgctgtatctgttcgttgaccagatcagaaaatctgatggcaccctacaggaacatgacggtatctgcgagatccatgttgctaaatatgctgaaatattcggattgacctctgcggaagccagtaaggatatacggcaggcattgaagagtttcgcggggaaggaagtggttttttatcgccctgaagaggatgccggcgatgaaaaaggctatgaatcttttccttggtttatcaaacgcgcgcacagtccatccagagggctttacagtgtacatatcaacccatatctcattcccttctttatcgggttacagaaccggtttacgcagtttcggcttagtgaaacaaaagaaatcaccaatccgtatgccatgcgtttatacgaatccctgtgtcagtatagtaagacgaatggctcaggcatcgtctctctgaaaatcgactggatcatagagcgttaccagctgcctcaaagttaccagcgtatgcctgacttccgccgccgcttcctgcaggtctgtgttaatgagatcaacagcagaactccaatgcgcctctcatacattgagaaaaagaaaggccgccagacgactcatatcgctatcagagatgccgagaaagcagggcgactaccgcacccggatatggaaattcgaggacgggttgagcaacgtgttggttatacaattgaacaaattaatcatatgcgtgatgtgtttggtacgcgattgcgacgtgctgaagacgtatttccaccggtgatcggggttgctgcccataaaggtggcgtttacaaaacctcagtttctgttcatcttgctcaggatctggctctgaaggggctacgtgttttgctcgtggaaggtaacgacccccagggaacagcctcaatgtatcacggatgggtaccagatcttcatattcatgcagaagacactctcctgcctttctatcttggggaaaaggacgatgtcacttatgcaataaagcccacttgctggccggggcttgacattattccttcctgtctggctctgcaccgtattgaaactgagttaatgggcaaatttgatgaaggtaaactgcccaccgatccacacctgatgctccgactggccattgaaactgttgctcatgactatgatgtcatagttattgacagcgcgcctaacctgggtatcggcacgattaatgtcgtatgtgctgctgatgtgctgattgttcccacgcctgctgagttgtttgactacacctccgcactgcagtttttcgatatgcttcgtgatctgctcaagaacgttgatcttaaagggttcgagcctgatgtacgtattttgcttaccaaatacagcaatagtaatggctctcagtccccgtggatggaggagcaaattcgggatgcctggggaagcatggttctaaaaaatgttgtacgtgaaacggatgaagttggtaaagtagctgaatacaacggctatcactttgtgtttgctcttgcgggaagcccgaaagacgctgttgacacatcaatctacatgttttatcaaaaggtcggtgacaactcaatcgacagctggaaaaacgcgggccgtgtctttaaagacagcgataagttcgtcgccaacgatccgatcctgaaagatcagacgcaagaatggtccggttctgcaacctttacatctgacggaaaaatccgtttattctacactggctatgccggtaaacattacggcaaacaaagcctgacaacagcgcaggtaaatgtgtcaaaatctgatgacacactcaaaatcaacggagtggaagatcacaaaacgatttttgacggagacggaaaaacatatcagaacgttcagcagattatcgatgaaggcaattatacatccggcgacaaccatacactgagagaccctcactacgttgaagacaaaggccataaataccttgtattcgaagccaacacgggaacagaaaacggataccaaggcgaagaatctttatttaacaaagcgtactacggcggcggcacgaacttcttccgtaaagaaagccagaagcttcagcagagcgctaaaaaacgcgatgctgagttagcgaacggcgccctcggtgtgacgcacccagtccaatttcgactactgacggtgaccattcactccttcgactcctcggttgtgctacagaggacgcgtaggctactaatcgggatggacaatagtatcacgtatctatga

SEQ ID NO: 136041 - DNA, 3107 bp, Homo sapiens
atgaatgaaatgaagcgtgaagagaagtttagagaaaaaagaagagaaagaaacgaacaaatcctccaagaaatacgggactatgtgaaaagatcaaatctacatctaattggtgtatctaaaagtgatggggagaatggaaccgagttggaaaacactctgcaggatattatccaggagaacttccccaatctagcaaggcaggccaacattcaaattcaggaaatacagagaatgctacaaagatactcctcgagaagaacaactccaagacacataattgtcagattcaccaaagttgaaatgaaggaaaaaatgttaagggcagccagagagaaaggtcgggttacccacaaagggaagcccatcagactaacagctgatctctcggcagaaactctacaagccacaaaagagtggaggccaatattcaacattcttaaagaaaagaattttcaacccagaatttcatatccagccaaactaagcttcataagtgaaggagaaacaaaatactttacagacaagcaaatgctgagagattttgtcaccaccaggcctgccctaaaagagctcctgaaggaagcactaaacatggaaaggaacaaccggttggttaaatccctcgcttgggcaagccagaacggcttccggtccccggccttgttgccactgtccctaatgctttgtgctcccctacaagaggcagatggaacaaatctgggatggctggctcactgtggcctgctgtgcactggtgaccaccctagtggccttggcaaacctggccggcacggcgctgaccgtcaccatccagagggactggatcgtgagctgacgggtgacaacagaggccagctggttggaggagcgactcaagccttcgcgaaagaaaataaccaaaaagcatacaaagaaacgtacggcgtctctcatattacacgccatgatatgctgcagatccctaaacagcagcaaaacgaaaaataccaagtgcctcaattcgatcaatcaacgattaaaaatattgagtctgcaaaaggacttgatgtgtgggacagctggccgctgcaaaacgctgacggaacagtagctgaatacaacggctatcacgttgtgtttgctcttgcgggaagcccgaaagacgctgatgacacatcaatctacatgttttatcaaaaggtcggcgacaactcaatcgacagctggaaaaacgcgggccgtgtctttaaagacagcgataagttcgacgccaacgatccgatcctgaaagatcagacgcaagaatggtccggttctgcaacctttacatctgacggaaaaatccgtttattctacactgactattccggtaaacattacggcaaacaaagcctgacaacagcgcaggtaaatgtgtcaaaatctgatgacacactcaaaatcaacggagtggaagatcacaaaacgatttttgacggagacggaaaaacatatcagaacgttcagcagtttatcgatgaaggcaattatacatccggcgacaaccatacgctgagagaccctcactacgttgaagacaaaggccataaataccttgtattcgaagccaacacgggaacagaaaacggataccaaggcgaagaatctttatttaacaaagcgtactacggcggcggcacgaacttcttccgtaaagaaagccagaagcttcagcagagcgctaaaaaacgcgatgctgagttagcgaacggcgccctcggtatcatagagttaaataatgattacacattgaaaaaagtaatgaagccgctgatcacttcaaacacggtaactgatgaaatcgagcgcgcgaatgttttcaaaatgaacggcaaatggtacttgttcactgattcacgcggttcaaaaatgacgatcgatggtattaactcaaacgttattcacatgaatggttatgtatcaggatcaactaagttaccgctgatggccactggggtcagtccttctggggaccttatgagagactgtgtaggacatacttcagaactgtcccaccaaggcccaaggaaactaggatgtttatccagcaactcttgtctgtccttggttgagagctgttctcagggcaacttacagcccacccctcatgttcctatggctggagagggatcttcaggcaaagagacacagtgccctcccttttcggccgcggcgcgtgactggtgtgacaatctaaaaacttgtcacacttcacatggatctgtcatggcggaaacagcggttatcaatcacaagaaacgtaaaaatagcccgcgaatcgtccagtcaaacgacctcactgaggcggcatatagtctctcccgggatcaaaaacgtatgctgtattctgttcgttgaccagttcaaaaaatttgatggcaccctacaagaaccatgccggtatctgcgagatcccatgttgctaattatgctgaaatattcgggattggccctctccgaaagccagtaagaatatacggcaggcattgaagagtttcgcggggaaggaagtggttttttatcgccctgaagaggatgccggcgatgaaaaaggctatgaatcttttccttggtttatcaaacgtgcgcacagtccatccagagggctttacagtgtacatatcaacccatatctcattcccttctttatcgggttacagaaccggtttacgcagtttcggcttagtgaaacaaaagaaatccccaatccgtatgccatgcgtttatacgaatccctgtgtcagtatcgtaagccggatggctcaggcatcgtctctctgaaaatcgactggatcatagagcgttaccacctgcctcaaagttaccagcgtatgcctgactttccgccgccgcttcctgcaggtctgtgttaatgagatcaacagcagaactccaatgcgcctctcatacattgagaaaaagaaaggccgccagacgactcatatcgtattttccttccgcgatatcacttccatgacgacagggaatagctggggggttatctgccccagaattgggggggggtccccccccattttgcccctgacccacctggcggctcccgttgggccccggtttcgcccccc

SEQ ID NO: 136042 - DNA, 3308 bp, Homo sapiens
  misc_feature (1)...(3308): n = a,t,c or g
aacacctggattcgagccggggcctgtgacttgggggaggcggcagccgctcctgaagccctgggatgaagagcacgtggagacaacatgggcagaggagtgggaaccaggaagagaagcagcttggagaaccatcaaagcttctatgaggtggtgcaaagccacagtgagcagaggtgccctcatctggatagaaacacaaaaggagaaacaggtttgnagaaaaccctcaatctacatgttttatcaaaaggtcggcgacaactcaatcgacagctggaaaaacgcgggccgtgtctttaaagacagcgataagttcgacgccaacgatccgatcctgaaagatcagacgcaagaatggtccggttctgcaacctttacatctgacggaaaaatccgtttattctacactgactattccggtaaacattacggcaaacaaagcctgacaacagcgcaggtaaatgtgtcaaaatctgatgacacactcaaaatcaacggagtggaagatcacaaaacgatttttgacggagacggaaaaacatatcagaacgttcagcagtttatcgatgaaggcaattatacatccggcgacaaccatacgctgagagaccctcactacgttgaagacaaaggccataaataccttgtattcgaagccaacacgggaacagaaaacggataccaaggcgaagaatctttatttaacaaagcgtactacggcggcggcacgaacttcttccgtaaagaaagccagaagcttcagcagagcgctaaaaaacgcgatgctgagttagcgaacggcgccctcggtatcatagagttaaataatgattacacattgaaaaaagtaatgaagccgctgatcacttcaaacacggtaactgatgaaatcgagcgcgcgaatgttttcaaaatgaacggcaaatgnaggaaccccctgcagatccctaaacagcagcaaaacgaaaaataccaagtgcctcaattcgatcaatcaacgattaaaaatattgagtctgcaaaaggacttgatgtgtgggacagctggccgctgcaaaacgctgacggaacagtagctgaatacaacggctatcacgttgtgtttgctcttgcgggaagcccgaaagacgctgatgacacatcaatctacatgttttatcaaaaggtcggcgacaactcaatcgacagctggaaaaacgcgggccgtgtctttaaagacagcgataagttcgacgccaacgatccgatcctgaaagatcagacgcaagaatggtcccggtctgcaacctttacatctgacgggaaaaatccgtttattctacactgactattccggtaaacattacggcaaacaaagcctgacaacagcgcagatattccagatgattacagtttttattaccagcctctgcaacactacctccagccacatctgtctccacatcagctgggtcaccacaatgcacggcgccatgcctcatcccggccacatccccacagcccctgcttctttacctgccaaggtgaaaggttccgggaaggtctgctggctggccttccctttatcagaactcaccccccccagtgccttacaggtaaatgtgtcaaaatctgatgacacactcaaaatcaacggagtggaagatcacaaaacgatttttgacggagacggaaaaacatatcagaacgttcagcagtttatcgatgaaggcaattatacatccggcgacaaccatacgctgagagaccctcactacgttgaagacaaaggccataaataccttgtattcgaagccaacacggggaacagaaaacggataccaaggcgaagaatctttatttaacaaagcgtactacggcggcggcacgaacttcttccgtaaagagggcgagaagcttcagcagagcgctaaaaaacgcgatgctgagttagcgaacggcgccctcggtatcatagagttaaataatgattacacattgaaaaaagtaatgaagccgctgatcacttcaaacacggtaactgatgaaatcgagcgcgcgaatgttttcaaaatgaacggcaaatggtacttgttcactgattcacgcggttcaaaaatgacgatcgatggtattaactcaaacgatatttacatgcttggttatgtatcaaactctttaaccggcccttacaagccgctgaacaaaacagggcttgtgctgcaaatgggtcttgatccaaacgatgtgacattcacttactctcacttcgcagtgccgcaaggccaaagcaacaatgtggttatcacaagctacatgacaaacagaggcttcttccgagataaaaaagcaacatttgcgccaagcttcttaatgaacatcaaaagcaataaaacctcccccacttgctggcccggggctgacaattatcccttcctgtctggctctgcgccgtattgaaactgagttaatgggcaaatttgatgaaggtaaactgcccaccgatccacacttgatgctcgactgggccattgaacctgttgctcatgactatgatgtcatagttattgacagcgcccataaccgggggtatcggcacgattaatttcggtatgtgtcgcccatgtgctgattgttcccacgcctgctgagttgtttgactacacctccgcactgcagtttttcgatatgcttcgtgatctgctcaagaacgttgatcttaaagggtgcgagcctgatgtacgtattttgcttacccgacatcggcaataataatggctctcagtcaccgtggatgaaggagccaaattcgggatgcctggggaagcatgggttctaaaaaatgttgtccgtaaaccggatgaagtttggtaaaggtcagatccggatgagaactgtttttgaacaggccattgatcaacgctcttcaactggtgcctggagaaatgctctttctatttgggaacctgtctgcaatgaaattttcgatcgtctgattaaaccacgctgggagattaaataatgaagcgtgcgcctgttttttcccaaacatacgcttaatactcaaccgggtgaagatacctttttattgacacccactgcccccatgggtggattcgttaattgcgcgcgtaggagtaatggctcgcggtaatcccattacttagcctgtatgtggtcgggatgtgaagtttactcttgaagtgctccggggtgatacgtgccgataagccctctcgggtatggtcagataatgattaagtccagtagcggcagggtagtcccactctggatgatctcagggtcggacgattgaatctcgtaat

SEQ ID NO: 136043 - DNA, 11120 bp, Homo sapiens
  misc_feature (1)...(11120): n = a,t,c or g
tcaagccagaatttcatatccagccaaactaagcttcataagtgaaggagaaataaaatcagttccacgtggcaggggaggctccacaatcatggtggaaggtgaaggaggagcaaagacacgtcttacatggtcnccccccgtgttggcttcgaatacaaggtttttatggcctttgtctccaacgtagtgagggtctctcagcgtatggttgtcgccggatgtataattgccttcatcgataaactgctgaacgttctgatatgtttttccgtctccgtcaaaaatcgttttgtgatcttccactccgttgattttgagtgtgtcatcagattttgacacatttacctgcgctgttgtcaggctttgtttgccgtaatgtttaccggaatagtcagtgtagaataaacggatttttccgtcagatgtaaaggttgcagaaccggaccattcttgcgtctgatctttcaagatcggatcgttggcgtcgaacttatcgctgtctttaaagacacggcccgcgtttttccagctgtcgattgagttgtcgccgaccttttgataaaacatgtagattgatgtgtcatcagcgtctttcgggtccccttcgccttggtatccgttttctgttcccgtgttggcttcgaatacaaggtatttatggcctttgtcttcaacgtagtgagggtctctcagcgtatggttgtcgccggatgtataattgccttcatcgataaactgctgaacgttctgatatgtttttccgtctccgtcaaaaatcgttttgtgatcttccactccgttgattttgagtgtgtcatcagattttgacacatttacctgcgctgttgtcaggctttgtttgccgtaatgtttaccggaatagtcagtgtagaataaacggatttttccgtcagatgtaaaggttgcagaaccggaccattcttgcgtctgatctttcaggatcggatcgttggcgtcgaacttatcgctgtctttaaagacacggcccgcgtttttccagctgtcgattgagttgtcgccgaccttttgataaaacatgtagattgatgtgtcatcagcgtctttcgggcttcccgcaagagcaaacacaacgtgatagccgttgtattcagctactgttccgtcagcgttttgcagcggccagctgtcccacacatcaagtccttttgcagactcaatattttttaatcgttgattgatcgaattgaggcacttggtatttttcgttttgctgctgtttagggattgcccgctttccagtcgggaaacctgtcgtgccagctgcattaatgaatcggccaacgcgcggggagaggcggtttgcgtattgggcgccagggtggtttttcttttcaccagtgagacgggcaacagctgattgcccttcaccgcctggccctgagagagttgcagcaagcggtccacgctggtttgccccagcaggcgaaaaatcctgtttgatggtggttccgaaatcggcaaaatccgttttccaaaagtggcacgatattggctctgcgtagaccatggggtgaagtgtgcgtgcagtgaaacctggagtgaccctgaccgctgatacaagcaatggtgtggacgctgcttgcagacacgccgagcacccaagagtgcattcggggtgattccatttatatgatgtttcaaacaggaaacgttcatcaatgcggccggactcggtgatctcgttgagggcccggagcaggtcgccacctagcttcttgacattcctgaggtcatcaagcatggagtaggagaggtccatcagatagtacaggtcgatggggtagcccttggcccgccggaaggtcacgttgaacgctgctgcctggctgtccggatgaggataatcgggccctttagggcggctgctctgtgaattccctgagtgggtgagctcagtacccacgacgcactgcccgccgggcaccactacccctttcacagatgaggaaactgagggctcggggtaaggaagggcctggggcgtctgcccgctttccagtcgggaaacctgtcgtgccagctgcattaatgaatcggccaacgcgcggggagaggcggtttgcgtattgggcgccagggtggtttttcttttcaccagtgagacgggcaacagctgattgcccttcaccgcctggccctgagagagttgcagcaagcggtccacgctggtttgccccagcaggcgaaaatcctgtttgatggtggttccgaaatcggcaaaatcctgcccgctttccagtcgggaaacctgtcgtgccagctgcattaatgaatcggccaacgcgcggggagaggcggtttgcgtattgggcgccagggtggtttttcttttcaccagtgagacgggcaacagctgattgcccttcaccgcctggccctgagagagttgcagcaagcggtccacgctggtttgccccagcaggcgaaaatcctgtttgatggtggttccgaaatcggcaaaatcctgcccgctttccagtcgggaaacctgtcgtgccagctgcattaatgaatcggccaacgcgcggggagaggcggtttgcgtattgggcgccagggtggtttttcttttcaccagtgagacgggcaacagctgattgcccttcaccgcctggccctgagagagttgcagcaagcggtccacgctggtttgccccagcaggcgaaaatcctgtttgatggtggttccgaaatcggcaaaatccttgcccttgacaggcattgatggaatcgtagtctcacgctgatagtctgatcgacaatacaagtgggaccgtggtcccagaccgataatcagaccgacaacacgagtgggatcgtggtcccagacgtctttcattgccatacggaactccggatgagcattcatcaggcgggcaagaatgtgaataaaggccggataaaacttgtgcttatttttctttacggtctttaaaaaggccgtaatatccagctgaacggtctgcgctgttgtcaggctttgtttgccggtaatgtttaccggaatagtcagtgtagaataaacggatttttccgtcagaaatgtaaaggttgacagaaccggacccattcttgcgtctgatctttcaggatcggatcgttggcgtcgaacttatcgctggctttaaagacacggcccgcgtttttccaactgtcgattgagttgtcgccgaccttttgataaaacatgtagaatggagtggcatcagcggcttttcgggcttcccgcaagaagcaacacaacgggataacccgttggatttcagctcctggtcccgtcagcggtttggcgcggcccacttgtcccacacaacgaggcctttttccagactcaatattatttaattcgtgattgatcgaattgaggcacttggtatttttcgttttgctgctgtttaaggatctgcagcatatcatggcgtgtaatatgagagacgccgtacgtttctttgtatggcctttgggtaatttctttccgcgaaggcttgagtcgctcctcctaatttattgagagtttttagcatgaagggttgttgaattttgtgaaaggctttttctgcatctattgagataatcatgtggtttttgttttggctcttgtttatatgctggattacatttattgatttgcgtatattgaaccagccttgcatcccagggatgaagcccacttgatcatggtggataagctttttgatgtgctgctggattcgttttgccagtattttattgaggatttttgcatcaatgttcatcaaggatattggtctaaaattctctttttttgttgtgtctctgcctggctttggtatcagaatgatgctggcctcataaaatgagttagggaggattccctctttttctgttgattggaatagtttcagaaggaatggtaccagttcctccttgtacctctgatagaattcggctgtgaatccatctggtcctggactctttttggttggtaaactattgattattgccacaatttcagctcctgttattggtgtattcagagattcaacttcttcctggtttagtcttgggagagtgtatgtgtcaaggaatttatccatttcttctagattttctagtttatttgcgtagaggtgtttgtagtattctctgatggtagtttgtatttctgtgggatcggtggtgatatcccctttatcattttttattgcgtctatttgattcttctctctttttttctttattagtcttgctagcggtctatccattttgttgatcctttcaaaaaaccggctcctggattcattaattttttgaagggttttttgtgtctctatttccttcagttctgctctgattttagttatttcttgccttctgctagcttttgaatgtgtttgctcttgcttttctagttcttttaattgtgatgttagggtgtcaattttagatctttcctgctttctcttgtgggcatttagtgctgtaaatttccctctacacactgctttaaatgtgtcccacagattctggtatgttgtgtctttgttctcattggtttcaaagaacatctttatttctgccttcatttcgttatgtacccagtagtagttcaggagcaggttgttcagtttccatgtagttgagcagttttgagtgagtttcataatcccgagttctagtttgattgcactgtggtctgagagatagtttgttataatttctattcttttacatttgctgaggagagctttacttccaactatgtggtcagtttttgaataggtgtgctgtggtgctatgattgagaatatgcggtgtttggttggggggtcttgcggtagtttactgagaatgatgatttccggtttcatgcatgtcccccgcgttggaattttgccattgcccattgacacctttgaaccgaacactccgggggaaaacaggggggcaaaaaaatctttgttaaataaagattcttagactccggtatccgttttctgttcccgtgttggcttcgaatacaaggtatttatggcctttgtcttcaacgtagtgagggtctctcagcgtatggttgtcgccggatgtataattgccttcatcgataaactgctgaacgttctgatatgtttttccgtgctggcgtcaaaaatcgttttgtgatcttccactccgttgattttgagtgtgtcatcagattttgacacatttacctgcgctgttgtcaggctttgtttgccgtaatgtttaccggaatagtcagtgtaaaataaacggatttttccgtcagatgtaaaggttgcagaaccggaccattcttgcgtctgatctttcaggatcggatcgttggcgtcgaacttatcgctgtctttaaagacacggcccgcgtttttccagctgtcgattgagttgtcgccgaccttttgataaaacatgtagattgatgtgtcatcagcgtctttcgggcttcccgcatgagcaaacacaacgtgatagccgttgtattcacctactgttccgtcagcgttttgcaccggccagctgtcccacacatcaagtccttttgcagactcaatattttttaatcgttgattgatccaattgaagcactgggtattttttcgttttgcctgctgtttagggatctgcagcatatcatggcgtgtaatatgagagacgccgtacgctgatgaatccccgaacttggccgtaacctccacaaagagcgactcgctgtataccgttggcatgctagctttatctgttcgggcaatacgatgcccattgtacttgttgactggtctgatattcgtgagcaaaaacgacttatggtattgcgagcttcagtcgcactacacggtcgttctgttactctttatgagaaagcgttcccgctttcagagcaatgttcaaagaaagctcatgaccaatttctagccgaccttgcgagcattctaccgagtaacaccacaccgctcattgtcagtgatgctggctttaaagtgccatggtataaatccgttgagaagctgggttggtactggttaagtcgagtaagaggaaaagtacaatatgcagacctaggagcggaaaactggaaacctatcagcaacttacatgatatgtcatctagtcactcaaagactttaggctataagaggctgactaaaagcaatccaatctcatgccaaattctattgtataaatctcgctctaaaggccgaaaaaatcagcgctcgacacggactcattgtcaccacccgtcacctaaaatctactcagcgtcggcaaaggagccatgggttctagcaactaacttacctgttgaaattcgaacacccaaacaacttgttaatatctattcgaagcgaatgcagattgaagaaaccttccgagacttgaaaagtcctgcctacggactaggcctacgccatagccgaacgagcagctcagagcgttttgatatcatgctgctaatcgccctgatgcttcaactaacatgttggcttgcgggcgttcatgctcagaaacaaggttgggacaagcacttccaggctaacacagtcagaaatcgaaacctcaaaatttattcacacatggttacgctttggggaaattatgaggggatctctcagtaccaagtgcctcaattcgatcaatcaacgattaaaaatattgagtctgcaaaaggacttgatgtgtgggacagctggccgctgcaaaaacgttgaacgaaacagtagctgaatacaacggctatcacgttgtgtttgctcttgcggggaagcccgaaagacgctgatgacacatcaatctacatgttttatcaaaagggtcggcgacaactcaatcgacagatgggaaaaacgcggggccgtgtctttaaagacagcgataagttcgacgccaacgatcccgatcctgaaagatcagacgcaagaatggtccggttctgcaacctttacatctgacggaaaaatccgtttattctacactgactattccggtaaacattacggcaaacaaagcctgacaacagcgcaggtaaatgtgtcaaaatctgatgacacactcaaaatcaacggagtggaagatcacaaaacgatttttgacggagacggaaaaacatatcagaacgttcagcagtttatcgatgaaggcaattatacatccggcgacaaccatacgctgagagaccctcactacgttgaagacaaaggccataaataccttggttttcgaagccaacacgggaacagaaaacggataccaaggcgaagaatctttatttaacaaagccgtactacggcggcggcacgaactttttccgtaaagaaagccagaagcttcaagcagagcgctaaaaaacgcgatgctgagttagcgaacggcgccctcggtatcatagagttaaataatgattacacattggaaaaaagaatgaaggcgcctgatcacttcacacacggtaactgatgaaatcgagcgcgcgaatgttttcaacatgaacggcaaatggtacttgttcactgatttcacgcggttcaaaaatgacgatcgatggtattaactcaaacgatatttacatgcttggttatgtatcaaactctttaaccggcccttacaagccgctgaacaaaacagggcttgtgctgcaaatgggtcttgatccaaacgatgtgacattcacttactctcacttcgcagtgccgcaagccaaaggcaacaatgtggttatcacaagctacatgacaaacagaggcttcttcgaggataaaaaggcaacatttgcgccaagcttcttaatgaacatcaaaggcaataaaacatccgttgtcaaaaacagcatcctggagcaaggacagctgacagtcgggggccaaccccttcgcccagtgaaaaaccgcggccgggtctttaaaaacagcgatagttcgacgcccaacgatccgatcctgaaagatcagacgcaagaatggtccggttctgcaacctttacctctgagggaaaaatccgtttattctacactgactattccggtaaacattccggcaaacaaagcttgacaacagcgcaggtaaatgtgtcaaaatctgatgacacactcaaaatcaacggagtggaagatcacaaaacgatttttgacggagacggaaaaacatatcagaacgttcagcagtttatcgatgaaggcaattatacatccggcgacaaccatacgctgagagaccctcactacgttgaagacaaaggccataaataccttgtattcgaagccaacacgggaacagaaaacggataccaaggcgaagaatctttatttaacaaagcgtactacggcggcggcacgaacttcttccgtaaagaaagccagaagcttcagcagagcgctaaaaaacgcgatgctgagttagcgaacggcgccctcggtatcatagagttaaataatgattacacattgaaaaaagtaatgaagccgctgatcacttcaaacacggtaactgatgaaatcgagcgcgcgaatggtttcaaaatgaacggcaaatgcagtggcagtgtggacgtgtgtggactgtggcaaggtgctagccagcgccggggtgccagcctccatgcaggcatttgcagcagctgggtggcagcatggctggaggagggcagggggtccctgcaaggaatagaattgggcactcatgggggcagtctgctgttctccatgcttagttttgggcaggcagcagtgtcggcggcaggggctggtggtctcattgctgccagtgctcctatgacagtggtggtttactctagaggatccccgatcctgaaagatcagacgcaagaatggtccggttctgcaacctttacatctgacggaaaaatccgtttattctacactgactattccggtaaacattacggcaaacaaagcctgacaacagcgcaggtaaatgtgtcaaaatctgatgacacactcaaaatcaacggagtggaagatcacaaaacgatttttgacggagacggaaaaacatatcagaacgttcagcagtttatcgatgaaggcaattatacatccggcgacaaccatacgctgagagaccctcactacgttgaagacaaaggccataaataccttgtattcgaagccaacacgggaacagaaaacggataccaaggcgaagaatctttatttaacaaagcgtactacggcggcggcacgaacttcttccgtaaagaaagccagaagcttcagcagagcgctaaaaaacgcgatgctgagttagcgaacggcgccctcggtatcatagagttaaataatgattacacattgaaaaaagtaatgaagccgctgatcacttcaaacacggtaactgatgaaatcgagcgcgcgaatgttttcaaaatgaacggcaaatggtacttgttcactgattcacgcggttcaaaaatgacgatcgatgtctcaagccatcgaaaggccacgccgcgcacaccgcccagcgaccggccgccgcccgcgtgcggcagcaaagcaacacaaaaacaggcaccaccgaccaggcgtcccgggaaagacagaaaacccacaacacggcgccgacaactggggaagacacgcaagagggcccgagaacagagcggacgcccccgggcacaagagggaaacgccgaacaggaagacccggcacaacacaaaacgagcaaagggaagagagaaagagccaccaagcacaggaaaaggcgggacaggccaccagcaaacaaggcgagccacaccccccccacaacgaaatacgacctcacactcactagaacgcgacaatgtcctgtgcatgtagccagggtgttactccaactgaagtgggtcactttccatgactccaactccagagtattggtgcagatgttttgtgcaggggaagagcataatgaacgaggactcttagagtccaagaccgttcagctggatattacggcctttttaaagaccgtaaagaaaaataagcacaagttttatccggcctttattcacattcttgcccgcctgatgaatgctcatccggagttccgtatggcaatgaaagacggtgagctggtgatatgggatagtgttcacccttgttacaccgttttccatgagcaaactgaaacgttttcatcgctctggagtgaataccacgacgatttccggcagtttctacacatatattcgcaagatgtggcgtgttacggtgaaaacctggcctatttccctaaagggtttattgagaatatgtttttcgtctcagccaatccctgggtgagtttcaccagttttgatttaaacgtggccaatatggacaacttcttcgcccccgttttcaccatgggcaaatattatacgcaaggcgacaaggtgctgatgccgctggcgattcagttcattatgctgacatatcttttcatgttggcctggctgggagtcacggctttcacctcactgccagtttacatgtacttcaatctgtggaccatctgccggaacaccacattagtggagggagcaaatctctgcttggaccttcgtcagtttgccagtaaggatatacggcaggcattgaagagtttcgcggggaaggaagtggttttttatcgccctgaagaggatgccggcgatgaaaaaggctatgaatcttttccttggtttatcaaacgtgcgcacagtccatccagagggctttacagtgtacatatcaacccatatctcattcccttctttatcgggttacagaaccggtttacgcagtttcggcttagtgaaacaaaagaaatcaccaatccgtatgccatgcgtttatacgaatccctgtgtcagtatcgtaagccggatggctcaggcatcgtctctctgaaaatcgagtggatcatagagcgttaccagctgcctcaaagttaccagcgtatgcctgacctcccagcccgcttcctgcaggtctgtgttaatgagatcaacagcagaactccaatgcgcctctcatacattgagaaaaagaaaggccgccagacgactcatatcgtattttccttccgcgatatcactcccatgacgacaggatag

SEQ ID NO: 136044 - DNA, 4416 bp, Homo sapiens
atggaggtgattcctgaagggtacaggctttccgagttgaaaaaatgttctaaatggattgtggtgatggttgcacggctctatgaatatactaaaaaccaacaaattatacatttaaaatgggtgaatcatatgctgggatgcctactggaccgcaacgacccgctccgggatgtcgatgaggcagccgtgcctgtgctgtgtatctgcagtgctgacgaccccgtgtgtggacccccagaccacactctgacaactgaactcttccacagcaacccctacttcttcctcctgctcagtcgccacggaggccactgtggcttcctgcgccaggagcccttgccagcctggagccatgaggtcatcttggagtccttccgggccttgactgagttcttccgaacggaggagaggattaaagggctgagcaggcacagagcttccttccttgggggccgtcgtcgtgggggagccttgcagaggcgggaagtctcttcctcttccaacctggaggagatctttaactggaagcgatcatacacaaggttgatggcagcggcagctggggctgcagcggcgccgggctctagagagccgcaggatcggccagagtgcggagctggacacccgggtcccagatactacagacacccggagaggtggctccttcgccctgaagccttcctcggccccctacgcactcgggccccttccgcagaggattcgcagcgtgagcgccccgcagcccgctcaggaccagagatgcgagttcggtatcctgtggtggctgcagtcttggccccatacctggctttaagccaagatccaatggtcaagtcttctgcttctggacagggtgcctctgggagctacaaccacgtccgtgaagagatgctcatcaaggctggcggtgctatgagcagacgtgtggttcggcaaagcaagttccgccatgtgtttgggcaggcagcaaaggccgaccaggcctacgaggacatccgtgtgtccaaggtcacatgggacagctccttctgtgccgtcaaccccaaattcctggccattattgtggaggctggaggcggggtgccttcatcgtcctgcctctggccaaggtggtggctagcaggctaccgttgtgttccagcacacactgtggatgacgtctgggtgcatatcatccaggctcagcagcacctccccggtgcccacattccagatgatgatcacattgtcaccacctgcccagagtggccaggcatggtagcagggaatccaatggccccagacttctctttgaactcatttgctccacccttcgccaatggccttccccggaacgttctccaggatcctccagagagccccaaagctttctccctcccttcactcaggctgctgctcaaatgtcacctccttagaaaagcccaccctgacagcccatctgaggaggtgaggggcgcctctgcccggccaccaccccgtctgggaggtgtacccaacagctcattgagaacgggccatgatgacaataggcggttttgtggaatagaaaggggggaaaggaggagcgactcaagcttcgcgaaagaaaataaccaaaaagcatacaaagaaacgtacggcgtctctcatattacacgccatgatatgctgcagatccctaaacagcagcaaaacgaaaaataccaagtgcctcaattcgatcaatcaacgattaaaaatattgagtctgcaaaaggacttgatgtgtgggacagctggccgctgcaaaacgctgacggaacagtagctgaatacaacggctatcacgttgtgtttgctcttgcgggaagcccgaaagacgctgatgacacatcaatctacatgtttatcaaaagtcgcgacaactcaatcgacaatgatgaactcaaccctggctgggcatccatcagcaggggtgtgctggtgtgtgacgagtgctgcagcgtgcaccggagcctgggacgccacatctccattgtcaagcaccttcgccacagcgcctggcctcccacgctgctgcaggctttgcagaactttcagcggtataccggcatacagcatgtgcatcgcataggaatggcggaacgtatgtggtgtgaccggaacagagaacgtcacaccgtcagcagcagcggcgcaaccgcctccccaatccagaccgttcagctggatattacggcctttttaaagaccgtaaagaaaaataagcacaagttttatccggcctttattcacattcttgcccgcctgatgaatgctcatccggagttccgtatggcaatgaaagacgggtttattgagaatatgtttttcgtctcagccaatccctgggtgagtttcaccagttttgatttaaacgtggccaatatggacaacttcttcgcccccgttttcaccatgggcaaatattatacgcaaggcgacaaggtgctgatgccgctggcgattcaggaatatggctggaatctggaccgagcctatgactatgtgaaagaaagacgaacggtaaccaagcccaacccaagcttcatgagacaactggaagagtatcaggggatcttgctggcaagcgttatcaatcacaagaaacgtaaaaatagcccgcgaatcgtccagtcaaacgacctcactgaggcggcatatagtctctcccgggatcaaaaacgtatgctgtatctgttcgttgaccagatcagaaaatctgatggcaccctacaggaacatgacggtatctgcgagatccatgttgctaaatatgctgaaatattcggattgacctctgcggaagccagtaaggatatacggcaggcattgaagagtttcgcggggaaggaagtggttttttatcgccctgaagaggatgccggcgatgaaaaaggctatgaatcttttccttggtttatcaaacgtgcgcacaggtccattccagagggcgctttacagttgtaccatatgcaacccataaatcctcattcctcttctttatcgggttacagaaccggtttacgcagttttcggcttagtgaaacaaaagaaatcaccaatccgtatgccatggcgtttatacgaaatccctgttgtcagtatccgtaagcccgggatgggctcaaggcattctcctcttttgaaaatcgactggatcatagagcgttaccagctgcctcaaagttaccagcgtatgcctgacttccgccgccgcttcctgcagcattttctggctcatgctggctgtcccaaaggcacccagaacttcacgtttagaatgaaatttatcatcttctccattaaaaaagttttacctcctgttgacacaatcttagctcatgaccccgttatccatacttgtcatctgagagagtcctttggtagtgtctctccttcatctccaaaatctaatcggttaccatgccctgaagtgatcttatttcattatggtgaaagttggaacctcttacgtgccgatcaacgtctcattttcgccaaaagttggcccagggcttcccggtatcaacagggacaccaggatttatttattctgcgaagtgatcttccgtcacaggtatttattcgcgataagctcatggagcggcgtaaccgtcgcacaggaaggacagagaaggcgcggatttggggaagtgacggacagaacggtcaggaacctggattgtggaggcgcgatgccagccgctgctgctgacggtgtgacgttctctgttccggtcacaccacatacgttccgccattcctatgcgatgcacatgctgtatgcccggtataccgctgaaaggtctgcaaagcctgatgggacataagtgcatcaggtcaacgggaaggctaccccaaaggtttttgggcctggaatggggcttgcccgggcacccggggggcaggttggcaatggccgaagtctgatgcggttgggaatgcctaaacaattatcctgagaataaatgcccttggccctttatatggaaactgggaaactgagtggatatggctgtttttgtctgttaaacagaagaagcttggctgttatcccactgagaagcgaacgaaacaggccgggaaaatctccccttatcgtagagagatccggattatttaatctctggaaaccgggggtacgcttataggaaagaatggttctgtcatgatgcctgcaagccggtaacgaaaacgatttgaatatgccttcaggaacaatagaaatcttcgtgcggtgttacgttgaagtggagcggattatgtcagcaatggacagaacaacctaatgaacacagaaccatgatgtggtctgtccttttacagccagtagtgctcgccgcagtccagcgacagggcgaagccctcgagtgagcgagggagcacccaggaacagcacttatatattctggg

SEQ ID NO: 136045 - DNA, 697 bp, Homo sapiens
tgtgacaatctaaaaacttgtcacacttcacatggatctgtcatggcggaaacagcggttatcaatcacaagaaacgtaaaaatagcccgcgaatcgtccagtcaaacgacctcactgaggcggcatatagtctctcccgggatcaaaaacgtatgctgtatctgttcgttgaccagatcagaaaatctgatggcaccctacaggaacatgacggtatctgcgagatccatgttgctaaatatgctgaaatattcggattgacctctgcggaagccagtaaggatatacggcaggcattgaagagtttcgcggggaaggaagtggttttttatcgccctgaagaggatgccggcgatgaaaaaagctatgaatcttttccttggtttatcaaacgcatcccgaatttgctcctccatccacggggactgagagccattactattgctgtatttggtaagcaaaatacgtacatcaggctcgaaccctttaagatcaacgttcttgagcagatcacgaagcatatcgaaaaactgcagtgcggaggtgtagtcaaacaactcagcaggcgtgggaacaatcagcacatcagcagcacatacgacattaatcgtgccgatacccaggttaggcgcgctgtcaataactatgacatcatagtcatgagcaacagtttcaatggcccagtcggagcatcaa

SEQ ID NO: 136046 - DNA, 1350 bp, Homo sapiens; identical to SEQ ID NO: 119093
  misc_feature (1)...(1350): n = a,t,c or g

SEQ ID NO: 136047 - DNA, 1932 bp, Homo sapiens; identical to SEQ ID NO: 119300
  misc_feature (1)...(1932): n = a,t,c or g

SEQ ID NO: 136048 - DNA, 2235 bp, Homo sapiens
  misc_feature (1)...(2235): n = a,t,c or g
atgaaggacataaatattatcttagccaccagaacacagaatgttcttggtgagaagggccagtgggttggggaactgactgctgcagttgagaagaggtttggttttccagagggcagtgtagagctttatgctgataagatcagaaaatctgatggcaccctacaggaacatgacggtatctgcgagatccatgttgctaaatatgctgaaatattcggattgacctctgcggaagccagtaaggatatacggcaggcattgaagagtttcgcggggaaggaagtggttttttatcgccctgaagaggatgccggcgatgaaaaaggctatgaatcttttccttggtttatcaaacgtgcgcacagtccatccagagggctttacagtgtacatatcaacccatatctcattcccttctttatcgggttacagaaccggtttacgcagtttcggcttagtgaaacaaaagaaatcaccaatccgtatgccatgcgtttatacgaatccctgtgtcagtatcgtaagccggatggctcaggcatcgtctctctgaaaatcgactggatcatagagcgttaccagctgcctcaaagttaccagcgtatgcctgacttccgccgccgcttcctgcaggtctgtgttaatgagatcaacagcagaactccaatgcgcctctcatacattgagaaaaagaaaggccgccagacgactcatatctttttcgatatgcttcgtgatctgctcaagaacgttgatcttaaagggttcgagcctgatgtacgtattttgcttaccaaatacagcaatagtaatggctctcagtccccgtggatggaggagcaaattcgggatgcctggggaagcatggttctaaaaaatgttgtacgtgaaacggatgaagttggtaaagatacttcgttatcgacaccagctgccccgatggtggattcgttaattgcgcgcgtaggagtaatggctcgcggtaatgccattactttgcctgtatgtggtcgggatgtgaagtttactcttgaagtgctccggggtgatagtgttgagaagacctctcgggtatggtcaggtgctgtatcccagggaggtgagagttttatctatatgcccctgactggggctgctgcctttctttcagagatgccctgcccagagaggaggaatctaaagaagcagtgtggctacagtggctttgctgcatgcggttatcaatcacaagaacgtaaaaatagcccgcgaatcgtccagtcaaacgacctcactgaggcggcatatagtctctcccgggatcaaaaacgtatgctgtatctgttcgttgaccagatcagaaaatctgatggcaccctacaggaacatgacggtatctgcgagatccatgttgctaaatatgctgaaatattcggattgacctctgcggaagccagtaaggatatacggcaggcattgaagagtttcgcggggaaggaagtggttttttatcgccctgaagaggatgccggcgatgaaaaaggctatgaatcttttccttggtttatcaaacgtgcgcacagtccatccagagggctttacagtgtacatatcaacccatatctcattcccttctttatcgggttacagaaccggtttacgcagtttcggcttagtgaaacaaaagaaatcaccaatccgtatgccatgcgtttatacgaatccctgtgtcagtatcgtaagccggatggctcaggcatcgtctctctgaaaatcgactggatcatagagcgttaccagctgcctcaaagttaccagcgtatgcctgacttccgccgccgcttcctgcaggatcataactcttcaccagaaagggaacaaaactggatggagaatgagtttgacgaactgacagaagtaggcttcagaaggtgggtaataacaaactcctccgagctaaaggagcatgttctaacccaatgcaaggaagctaagaaccttgataaaaggttacaggaactgctaactagaataagcaatttagagaacatagatgacctgatggagctcaaaaacacagcacaagaacttcatgaaacatacacaagtatcaatagccaaactgatcaagcagaagaaaggatatcagagattggagatcaacttaatgaaataaacatgaagaccagattagaggagaaaaaaaaaggaaagggaacgaacaaaggcctccaagaaccactttggngatga

SEQ ID NO: 136049 - DNA, 436 bp, Homo sapiens; identical to SEQ ID NO: 119095
  misc_feature (1)...(436): n = a,t,c or g

SEQ ID NO: 136050 - DNA, 1173 bp, Homo sapiens; identical to SEQ ID NO: 119099

SEQ ID NO: 136051 - DNA, 1602 bp, Homo sapiens; identical to SEQ ID NO: 127341

SEQ ID NO: 136052 - DNA, 1281 bp, Homo sapiens
tcaggataattgtttcagcatcgcaaccgcatcagactccggcatcgcaaactgcacccggtgccgggcagccacatccagcgcaaaaaccttcgtgtagacttccgttgaactgatggacttatgtcccatcaggctttgcagaactttcagcggtataccggcatacagcatgtgcatcgcataggaatggcggaacgtatgtggtgtgaccggaacagagaacgtcacaccgtcagcagcagcggcggcaaccgcctccccaatccaggtcctgaccgttctgtccgtcacttcccagatccgcgctttctctgtccttcctgtgcgacggttacgccgctccatgagcttatcgcgaattaatacctgtgacggaagatcacttcgcagaatatatttttcctggtgtccctgttgataccgggaagccctgggccaacttttggcgaaaattagacgttgatcggcacgtaagatgttccaactttcaccataatgacataagatcactgcagaaccaccggccacgatctgccgagaagcctcgcgcactaagctgacttcaggcttggcggacatcttcgccaggcgggaggacaagggagtgggctgagatgcgtcaacgagctcgcagcctgcacagccttgcctgcttggtctatgtgaagatataaggttgtcagagtgccacactgtgaagctatttccttgtgttcccctggtgtcctcctcagtcctctttctcacagttgactgctgggttttttgttgttgttgttctttagtctgtgtatcagaatgtgatccccaagacttctttttcacttttagagacatttccatatgcttggctcgtgcaattgcttcatctctctcctcaatggctaattgcagtctagacataacagcttcatcacgttccttctgcgcaaaatacacttcttcaaccagagccttaagggaagtggtctcctctctggcccagagcaggtccagaaatgtcatccaagagtcaagttctggaatcagggactccaagagcccacttagtgttctacccaccggtggcaatgctggtattgtctccagaaggagccaaccctgccgacgaaagaagaaatttctgaaaattttctcccattttgtaggttgcctgttcactctgatggtagtttcttttgctgtgcagaagctctttagtttaattagatccgatttgtcaattttggcttttgttgccattgcttttggtgtattagacatgaagtccttgcccat

SEQ ID NO: 136053 - DNA, 906 bp, Homo sapiens; identical to SEQ ID NO: 119090

SEQ ID NO: 136054 - DNA, 3210 bp, Homo sapiens
  misc_feature (1)...(3210): n = a,t,c or g
atggcggaaacagcggttatcaatcacaagaaacgtaaaaatagcccgcgaatcgtccagtcaaacgacctcactgaggcggcatatagtctctcccgggatcaaaaacgtatgctgtatctgttcgttgaccagatcagaaaatctgatggcaccctacaggaacatgacggtatctgcgagatccatgttgctaaatatgctgaaatattcggattgacctctgcggaagccagtaaggatatacggcaggcattgaagagtttcgcggggaaggaagtggttttttatcgccctgaagaggatgccggcgatgaaaaaggctatgaatcttttccttggtttatcaaacgtgcgcacagtccatccagagggctttacagtgtacatatcaacccatatctcattcccttctttatcgggttacagaaccggtttacgcagtttcggcttagtgaaacaaaagaaatcaccaatccgtatgccatgcgtttatacgaatccctgtgtcagtatcgtaagccggatggctcaggcatcgtctctctgaaaatcgactggatcatagagcgttaccagctgcctcaaagttaccagcgtatgcctgacttccgccgccgcttcctgcaggtctgtgttaatgagatcaacagcagaactccaatgcgcctctcatacattgagaaaaagaaaggccgccagacgactcatatcgctatcagagatgccgagaaagcagggcgactaccgcacccggatatggaaattcgaggacgggttgagcaacgtgttggttatacaattgaacaaattaatcatatgcgtgatgtgtttggtacgcgattgcgacgtgctgaagacgtatttccaccggtgatcggggttgctgcccataaaggtggcgtttacaaaacctcagtttctgttcatcttgctcaggatctggctctgaaggggctacgtgttttgctcgtggaaggtaacgacccccagggaacagcctcaatgtatcacggatgggtaccagatcttcatattcatgcagaagacactctcctgcctttctatcttggggaaaaggacgatgtcacttatgcaataaagcccacttgctggccggggcttgacattattccttcctgtctggctctgcaccgtattgaaactgagttaatgggcaaatttgatgaaggtaaactgcccaccgatccacacctgatgctccgactggccattgaaactgttgctcatgactatgatgtcatagttattgacagcgcgcctaacctgggtatcggcacgattaatgtcgtatgtgctgctgatgtgctgattgttcccacgcctgctgagttgtttgactacacctccgcactgcagtttttcgatatgcttcgtgatctgctcaagaacgttgatcttaaagggttcgagcctgatgtacgtattttgcttaccaaatacagcaatagtaatggctctcagtccccgtggatggaggagcaaattcgggatgcctgtggactctaaaggacccccctggcttttcaagttccttaagaatggcctcaattttctcttacactcagttggaacacgagacctgtccaggttaagcaccattttatcgcccttatacaatactgtcgctccaggagcaaactgatgtcgtgagcttaaactagttcttgatgcagatgacgttttaagcacagaagttaaaagagtgataacttcttcagcttcaaatatcaccccagcttttttctgctcatgaaggttagatgcctgctgcttaagtaattcctctttatctgtaaaggctttttgaagtgcatcacctgaccgggcagatagttcaccggggtgagaaaaaagagcaacaactgatttaggcaatttggcggtgttgatacagcgggtaataatcttacgtgaaatattttccgcatcagccagcgcagaaatatttccagcaaattcattcttgcatcggcttgcataacgctgaccacgttcataagcacttgtttggggcgatatcgttacccaatgtttgataaaccaaggaaaagattcatagcctttttcatcgccggcatcctcttcagggcgataaaaaaccacttccttccccgcgaaactcttcaatgcctgccgtatatccttactggcttccgcagaggtcaatccgaatatttcagcatatttagcaacatggatctcgcagataccgtcatgttcctgtagggtgccatcagattttctgatctggtcaacgaacagatacagcatacgtttttgatcccgggagagactatatgccgcctcagtgaggtcgtttgactggacgattcgcgggctattcttacgtttcttgtgattgataaccgctgtttccgcatgacagatccatgtgaagtgtgacaagtttttagattgcacagttttaagcacagaagttaaaagagtgataacttcttcagcttcaaatatcaccccagcttttttctgctcatgaaggttagatgcctgctgcttaagtaattcctctttatctgtaaaggctttttgaagtgcatcacctgaccgggcagatagttcaccggggtgagaaaaaagagcaacaactgatttaggcaatttggcggtgttgatacagcgggtaataatcttacgtgaaatattttccgcatcagccagcgcagaaatatttccagcaaattcattctgcaatcggcttgcataacgctgaccacgttcataagcacttgttgggcgataatcgttacccaatctggataatgcagccatctgctcatcatccagctcgccaaccagaacacgataatcactttcggtaagtgcagcagctntacgacggcgactcccatcggcaatttctatgacaccagatactcttcgaccgaacgccggtgtctgttgaccagtcagtagaaaagaaaggatgagatcatccagtgcgtcctcagtaagcagctcctggtcacgttcattacctttatgggcagcaaccccgatcaccggtggaaatacgtcttcagcacgtcgcaatcgcgtaccaaacacatcacgcatatgattaatttgttcaattgtataaccaacacgttgctcaacccgtcctcgaatttccatatccgggtgcggggggcggcctgctttctcggcatctctgatagccttcat

SEQ ID NO: 136055 - DNA, 870 bp, Homo sapiens
agtatctggtgtcatagaaattgccgatgggagtcgccgtcgtaaagctgctgcacttaccgaaagtgattatcgtgttctggttggcgagctggatgatgagcagatggctgcattatccagattgggtaacgattatcgcccaacaagtgcttatgaacgtggtcagcgttatgcaagccgattgcagaatgaatttgctggaaatatttctgcgctggctgatgcggagtgtgacaatctaaaaacttgtcacacttcacatggatctgtcatggcggaaacagcggttatcaatcacaagaaacgtaaaaatagcccgcgaatcgtccagtcaaacgacctcactgaggcggcatatagtctctcccgggatcaaaaacgtatgctgtatctgttcgttgaccagatcagaaaatctgatggcaccctacaggaacatgacggtatctgcgagatccatgttgctaaatatgctgaaatattcggattgacctctgcggaagccagtaaggatatacggcaggcattgaagagtttcgcggggaaggaagtggttttttatcgccctgaagaggatgccggcgatgaaaaaggctatgaatcttttccttggtttatcaaacaaagcaacaacatcaacatcaacaaaaaggacaaccacacagaaactctatctgaaggtcaccagcagcaaagaccaaaggtagataaatccacgaagatgaggaaaaaccagcacaaaaaggctgaaaattccaaaaaccagaatgctgcttctcctccaaagggtcacaactcctcgtcagcaagggaacaaaaccggacggagaatgaatttgacgaattgatagaagtatgcttcagaag

SEQ ID NO: 136056 - DNA, 4306 bp, Homo sapiens
atggcggaaacagcggttatcaatcacaagaaacgtaaaaatagcccgcgaatcgtccagtcaaacgacctcactgaggcggcatatagtctctcccgggatcaaaaacgtatgctgtatctgttcgttgaccagatcagaaaatctgatggcaccctacaggaacatgacggtatctgcgagatccatgttgctaaatatgctgaaatattcggattgacctctgcggaagccagtaaggatatacggcaggcattgaagagtttcgcggggaaggaagtggttttttatcgccctgaagaggatgccggcgatgaaaaaggctatgaatcttttccttggtttatcaaacgtgcgcacagtccatccagagggctttacagtaaccggtttacgcagtttcggcttagtgaaacaaaagaaatcaccaatccgtatgccatgcgtttatacgaatccctgtgtcagtatcgtaagccggatggctcaggcatcgtctctctgaaaatcgactggatcatagagcgttaccagctgcctcaaagttaccagcgtatgcctgacttccgccgccgcttcctgcagtgcataaacgctggtcatgaaatgacgaaggctatcgccattgcacagtttaatgatgacagcccggaagcgaggaaaataacccggcgctggagaataggtgaagcagcggatttagttggggtttcttctcaggctatcagagatgccgagaaagcagggcgactaccgcacccggatatggaaattcgaggacgggttgagcaacgtgttggttatacaattgaacaaattaatcatatgcgtgatgtgtttggtacgcgattgcgacgtgctgaagacgtatttccaccggtgatcggggttgctgcccataaaggtggcgtttacaaaacctcagtttctgttcatcttgctcaggatctggctctgaaggggctacgtgttttgctcgtggaaggtaacgacccccagggaacagcctcaatgtatcacggatgggtaccagatcttcatattcatgcagaagacactctcctgcctttctatcttggggaaaaggacgatgtcacttatgcaataaagcccacttgctggccggggcttgacattattccttcctgtctggctctgcaccgtattgaaactgagttaatgggcaaatttgatgaaggtaaactgcccaccgatccacacctgatgctccgactggccattgaaactgttgctcatgactatgatgtcatagttattgacagcgcgcctaacctgggtatcggcacgattaatgtcgtatgtgctgctgatgtgctgattgttcccacgcctgctgagttgtttgactacacctccgcactgcagtttttcgatatgcttcgtgatctgctcaagaacgttgatcttaaagggttcgagcctgatggcacacaggcaaagatgacacaaggtgaacgcaggaacgtccccaaacaagaatacatatctcgtgggtatttcacccttaaagaaaccgtgatcgatacaagcaatggaagcaggatttctttcacgactcgtataaccggcaaagacgtagtaagaaccaccagcattgtaatgctggctaaagtcactttcctgagctgtataacgatgagcgattttactttttctggctatgaattggcctgctttgtaacacactccggtctatcccgtagcgccgggcatatcctgtcgcaatgtgcaaatctcgcggcaacaaccagtgaatacttcattcacaagcctcaccgcctgatcgcggcagaaactggttatagccaatcaaccgtcgttcgtgcattccgtgaagctgtaaacaaaggaattctgtctgtagagattgttatcggcgatcaccgtgaacgtcgcgctaacctgtaccggtttacaccatcctttttggccttcgcacaacaagccaaaaatgcgctgatagaaagcaaattaaagatctcttcagcggcaaccaagtgtgacaatctaaaaacttgtcacacttcacatggatctgtcatggcggaaacagcggttatcaatcacaagaaacgtaaaaatagcccgcgaatcgtccagtcaaacgacctcactgaggcggcatatagtctctcccgggatcaaaaacgtatgctgtatctgttcgttgaccagatcagaaaatctgatggcaccctacaggaacatgacggtatctgcgagatccatgttgctaaatatgctgaaatattcggattgacctctgcggaagccagtaaggatatacggcaggcattgaagagtttcgcggggaaggaagtggttttttatcgccctgaagaggatgccggcgatgaaaaaggctatgaatcttttccttggtttatcaaacgtgcgcacagtccatccagagggctttacagtgtacatatcaacccatatctcattcccttctttatcgggtttacagaaccggtttacgcagtttcggcttagtgaaacaaaagaaatcaccaatccgtatgccatgcgtttatacgaatccctgtgtcagtatcgtaagccggatggctcaggcatcgtctctctgaaaatcgactggatcatagagcgttaccagctgcctcaaagttaccagcgtatgcctgacttccgccgccgcttcctgcaggtctgtgttaatgagatcaacagcagaactccaatgcgcctctcatacattgagaaaaagaaaggccgccagacgactcatatcgatctggctctgaaggggctacgtgttttgctcgtggaaggtaacgacccccagggaacagcctcaatgtatcacggatgggtaccagatcttcatattcatgcagaagacactctcctgcctttctatcttggggaaaaggacgatgtcacttatgcaataaagcccacttgctggccggggcttgacattattccttcctgtctggctctgcaccgtattgaaactgagttaatgggcaaatttgatgaaggtaaactgcccaccgatccacacctgatgctccgactggccattgaaactgttgctcatgactatgatgtcatagttattgacagcgcgcctaacctgggtatcggcacgattaatgtcgtatgtgctgctgatgtgctgattgttcccacgcctgctgagttgtttgactacacctccgcactgcagtttttcgatatgcttcgtgatctgctcaagaacgttgatcttaaagggttcgagcctgatgtacgtattttgcttaccaaatacagcaatagtaatggctctcagtccccgtggatggaggagcaaattcgggatgcctggggaagcatggttctaaaaaatgttgtacgtgaaacggatgaagttggtaaagctgccccgatggtggattcgttaattgcgcgcgtaggagtaatggctcgcggtaatgccattactttgcctgtatgtggtcgggatgtgaagtttactcttgaagtgctccggggtgatagtgttgagaagacctctcgggtatggtcaggtaatgaacgtgaccaggagctgcttactgaggacgcactggatgatctcatcccttcttttctactgactggtcaacagacaccggcgttcggtcgaagagtatctggtgtcatagaaattgccgatgggagtcgccgtcgtaaagctgctgcacttaccgaaagtgattatcgtgttctggttggcgagctggatgatgagcagatggctgcattatccagattgggtaacgattatcgcccaacaagtgcttatgaacgtggtcagcgttatgcaagccgattgcagaatgaatttgctggaaatatttctgcgctggctgatgcggaaaatatttcacgtaagattattacccgctgtatcaacaccgccaaattgcctaaatcagttgttgctcttttttctcaccccggtgaactatctgcccggtcaggtgatgcacttcaaaaagcctttacagataaagaggaattacttaagcagcaggcatctaaccttcatgagcagaaaaaagctggggtgatatttgaagctgaagaagttatcactcttttaacttctgtgcttaaaacgtcatctgcatcaagaactagtttaagctcacgacatcagtttgctcctggagcgacagtattgtataagggcgataaaatggtgcttaacctggacaggtctcgtgttccaactgagtgtatagagaaaattgaggccattcttaaggaacttgaaaagccagcaccctga

SEQ ID NO: 136057 - DNA, 1200 bp, Homo sapiens
attctcaggataattgtttcagcatcgcaaccgcatcagactccggcatcgcaaactgcacccggtgccgggcagccacatccagcgcaaaaaccttcgtgtagacttccgttgaactgatggacttatgtcccatcaggctttgcagaactttcagcggtataccggcatacagcatgtgcatcgcataggaatggcggaacgtatgtggtgtgaccggaacagagaacgtcacaccgtcagcagcagcggcggcaaccgcctccccaatccaggtcctgaccgttctgtccgtccacttcccagatccgcgctttctctgtccttcctgtgcgacggttacgccgctccatgagcttatcgcgaataaatacctgtgacggaagatcacttcgcagaataaataaatcctggtgtccctgttgataccgggaagcccctgggccaacttttggcgaaaatgagacgttgatcggcacgtaagaggttccaactttcaccataatgaaataagatcactatgatgatccatttttcaaactgccaactcttctctagaattatccttttcattttgcaaggcttttggctcattgatgtttctgtattattcccaagtttatcactgatacgtaaatatttttccgcatcagccagcgcagaaatatttccagcaaattctttctgcaatcggcttgcataacgctgaccacgttcataagcacttgttgggcgataatcgttacccaatctggataattcagccatctgctcatcatccagctcgccaaccagaacacgataatcactttcggtaagtgcagcagctttacgacggcgactcccatcggcaatttctatgacaccagatactcttcgaccgaacgccggtgtctgttgaccagtcagtagaaaagaagggatgagatcatccagtgcgtcctcagtaagcagctcctggtcacgttcattacctgaccatacccgagaggtcttctcaacactatcaccccggagcacttcaagagtaaacttcacatcccgaccacatacaggcaaagtaatggcattaccgcgagccattactcccacgcgcgcaattaacgaatccaccatcgaaacagctggtgaagataacgaagtatcttcaaccggttgagtattgagcgtatgttttggaataacaggcgcacgcttcat

SEQ ID NO: 136058 - DNA, 2627 bp, Homo sapiens
atgtaacaaaaagtgggggtttccttagaagccaagaaccgtcggaaaattcccatatggtagagaccgccttttatttcacggagctttgaacggttataagaaggaatggctgtcatatgcctccaaccggtaacggaaagggtttgataacccttccaggacaaataaaattttcggccggttgttcggttaagtggaagcggatttatgtcaccaatggcccgaccacctaatgaacccggaccctgatgtggtttgtccttttacagccagtagtgctccccgcatttgaaccgcaagggacaagccctttaatgagccaaggaagccccagggaacagcacttataaatttcgctttccacccgatgcctaaaaaaactttcccttgggggtaacccccttatccacggggatattttaataattattttttcaatagtttttagatcttcttttttagagcgccttgtaggcctttatccatgctggttctagagaaggtgttgtgacaaatttgccctttcagtgtgacaaatcaccctcaaatgacagtcctgtctgttgacaaaatggcctttaaccctgtgacaaaattgccctcagaagaagctgttttttcacaaagcttatccctgcttattgactcttttttatttagagtggcaatctaaaagcctgtcacccttcacatggatctgtcatggcggaaacagcgggttatcaatcacaagaaacgtaaaaatagccctcgaatgcgaacagtaaaaagacggctatcagcaggcatatagtctctcccgggatcaaaaacgtatgctgtatctgttcgttgaccagatcagaaaatctgatggcaccctacaggaacatgaccggcatcctgccagatccatggtgctcaataccgctgacaaatctccgattgaccttttgcggaagccagtaaggatatacggcaggcattgaagagtttcgcggggaaggaagtggttttttatcgccctgaagaggatgccggcgatgaaaaaggctatgaatcttttccttggtttatcaaacgtgcgcacagtccatccagagggcttttcagtggacatattccccccatatctcattcccttctttatcggggtaaagaaccggctaacacaaattctgcttatttgaaacaaaagaaatcccccatccgtctgccctggcgttattacgagagcctgggtcaggatcggaaggccggatggttcaagcatcggctctctgaaaaatcgactggatcatagagcgttaccagctgcctcaaagttaccagcgtatgcctgacttccgccgccgcttcctgcagcattttctggctcatgctggctgtcccaaaggcacccagaacttcacgtttagaatgaaatttatcatcttctccattaaaaaagttttacctcctgttgacacaatcttagctcatgaccccgttatccatacttgtcatctgagagagtcctttggtagtgtctctccttcatctccaaaatctaatcggttaccatgccctgaagtgatcttatttcattatggtgaaagttggaacctcttacgtgccgatcaacgtctcattttcgccaaaagttggcccagggcttcccggtatcaacagggacaccaggatttatttattctgcgaagtgatcttccgtcacaggtatttattcgcgataagctcatggagcggcgtaaccgtcgcacaggaaggacagagaaagcgcggatttggggaagtgacggacagaacggtcaggaacctggatatgtcgaggcgggttgcccgccgctgctgctgacggtgtgacgttcatctgatcccggtccaccacaatacgttccgccattcatatgcgatgcacatgctgtatgcccggtaataccgctgaaagttttgcaaagcctgatgggacataagtccatcagttcaacggaagtctacacgaaggtttttgcgctggatgtggctgcccggcaccgggtgcagtttgcgatgccggagtctgatgcggttgcgaatgcctgaaacaattattcctaagaaataaatgcccttggccctttatatggaaactgggaaactgaggggataatgctggttttggtctgtttaacaaagaaaacgggctgtgatacccattgagaagcgaacggaaccagtcggggaaaatctccccttattggggaagatccggattatttaatctaaggaccctggggtaccgtttataggaaagaatggttctgtcatgatgcctgcaagccggtaacgaaaacgatttgaatatgccttcaggaacaatagaaatcttcgtgcggtgttacgttgaagtggagcggattatgtcagcaatggacagaacaacctaatgaacacagaaccatgatgtggtctgtccttttacagccagtagtgctcgccgcagtccagcgacagggcgaagccctcgagtgagcgagggagcacccaggaacagcacttatatattctgcttacacacgatgcctgaaaaaacttcccttggggttatccacttatccacggggatatttttataaatattttttttataggttttagatcctcta

SEQ ID NO: 136059 - DNA, 414 bp, Homo sapiens
  misc_feature (1)...(414): n = a,t,c or g
agctcttctaccgagtgctgacttcggacgtggagaagttcatgccaatcgtgtacacgcctaccgtggggctggcctgtcagcactatggcctgactttccgcagccccggtgagcccccgtggagtgagggctctgggaggggctgcctcatagaggggaataaattctttccgcccttcatgcatattgggactctggaggctaactctgattgggtcagtggtccaacaaaaagacatttgatttcaagcacttgctcagaaaaatgaccccgtaagcagagaaatgagtgaaaagagtagctagcaagggtttattgacttcttcttcacctccaaattaataaatggcccagcatgcttcaggagttgggcctgaggaggagagtttcaggttgttatttnttctcat

SEQ ID NO: 136060 - DNA, 531 bp, Homo sapiens
atgcccattcgcggaccaggtagccacgtcatagattgtgtctgcgtgtgcaccctcggaggcggcacgcatcgtgctgggctgtgcgactggtgtctcccatacagacatctcgtgacgtcagcaacgcccttgcccctgcgatccaatccccgttcagaaggtactccgtgtaaccgagcatggcgagcgaactggcgaggaagcaaagaagaactgttctcgtcagatagctcttacgctcagcgcaagaagaaatatccaccgtgggaaagactccaggagctgctcagagaccctctgtacatcggcctgaaacaccagcgcgtgcacgggaaggcatacgatgacttgctggatgagttcatgcaggctgtgacagacaagatgagagatcgggcccgacccagtatctaccctgacagtgttagaacaatgctagaaatcgccctacgcaccactctcatgatgcctgtatgtgctgatcagacgttttccattgcctccgagaccccaacacatcctcgctag

SEQ ID NO: 136061 - DNA, 831 bp, Homo sapiens
  misc_feature (1)...(831): n = a,t,c or g
caagtttggaataaattgcctcatccaatttgaagacttcgccaatgccaatgccttccgcctgctcaacaaataccgtaacaagtactgcatgttcaatgatgacatccaaggaacaacctgccacactttcagctgcccatggcatttatgggcacaagtcatgttccagcacatccctggacccatgggcttctcagagtggttacctcgaaacactaagtagcttcctttccagttttaaacccctagtgcatagcccaagagcaccccaaaaatgcaggttaatgatggagataactttatttgccaaattttgtaatttggagcttaagaaccactgtttttcctcttgagttctggcctgtaccaagtgcagaaatagcttcccaaaggaaaaaaatgggcaacagtaccaaatgctgctgagaggtcaagaaagaagaaggctgagaactgattactgaatttggccacctggaggtacttggggaccctgacaagaggcacagcctccgcttgctgtggcagggatcttggctgctctgcgaatcaccaacaacaagctttccaatcacgtgtttgttttccaaggtgcaggcgaggcagctatgggcattgcccacctccttgtcatggccctaagaagaaagaaggtgtaccgaacgcacganggccacaagaaagatctggatggtggactctaaaagggctcatttgtcaaggggaaggaagccacctgganaccatgaaaaggagatgtttgcccaagaccatcctgaagtcaactccctggaggaggtggtgaggctggtgaagcccacagccatg

SEQ ID NO: 136062 - DNA, 2069 bp, Homo sapiens
cggaaggagaggaccgaggtctgccaaggaccatgggtgccgcgctggggacaggcacgcggctggctccctggccgggccgggcctgcggcgccctcccgcgctggacacccaccgcgcccgcccaaggctgccactccaagcctggcccggcgcgccctgtgcccctgaagaagcgcggatacgatgtcaccaggaaccctcatctcaacaaggggatggcctttacccttgaagaaaggctgcagcttggaatccacggcctaatcccgccctgctttctgagccaggacgtccagctcctccgaatcatgagatattacgagcggcagcagagtgacctggacaagtacatcattctcatgacactccaagaccggaacgagaagctcttctaccgagtgctgacttcggatgtggagaagttcatgccaatcgtgtacacgcctaccgtggggctggcctgtcagcactatggcctgactttccgcaggccccgtggactgttcatcaccattcatgacaaaggtcatcttgcaacaatgctgaattcttggccagaagacaatattaaggccgtggtggtgactgatggggagcgcatcctgggcctgggagacctgggctgctacggcatgggcatccctgtgggcaagctggccctgtacacggcatgcggaggggtgaacccgcagcagtgcctccctgtgctgctggacgtcggcaccaacaatgaggagctgctcagagaccctctgtaacatcggcctgaaacaccagcgcgtgcacgggaaggcatacgatgacttgctggatgagttcatgcaggctgtgacagacaagtttggaataaattgccctcatcccaatttgaagacttcgccaatgccaatgccttccgcctgctcaacaaataccgtaacaagtactgcatgttcaatgatgacatccaaggcacagcctccgttgctgtggcagggatcttggctgctctgcgaatcaccaacaacaagctttccaatcacgtgtttgttttccaaggtgcaggcgaggcagctatggggcattgcccacctccttgtcatggccctagaggaaagaaggtgtaccgaaggcaggaggccacaagaaagatctgggatggtggacttttaaagggctcattgtcaaggggaggagccacctgaaccatgaaaaggagatgtttgcccaagacccatcctgagtcaaactccctggatgaggtggtgaggctggtgaagcccacagccatcataggtgttgctgccatcgcagaagcccttcacggagcagattttaaggaacatggcttccttcccgaagggccccaatcatttttgccctgagcaacccacccagaaaggccgagtgcacggcttgagaagtgctaccgggtcaccgaggggccgaggggattttttgccagtgggaagtcctttttaaggagtgttgatttgggagcatgggcaagaccttcattcctgggggcaggggaaacaatgcttaacgtgttccccgggggtggcaactgggagtccattcgcccggcggggatcccgggcacatccccagatgagatcttcctccctgacagcagagccaaattgccccaggaagtctctgagcagcatctggtcccaggggagactctaccccaccactcagcacccatccgagacgtgtctttgagaattgccatcaaagttctcgactacgcgtacaaacacaacctggttttcctactacccagagcctaaggacaaggaggctttttgtaagatccctgggtcttacactccagactatgactccttttacactgggacagctacatttgggcccaagggaaggccatgaatgttcagacggtctgaggcagtctcagaggctagtatggggctagatgaagcccagagtaacacccacaatataaatgggttccaaaatggcccaagtgaatccttgtcgctgtgttttttcttttaaactttctggtgtgagaggagatgccaaggcatacagtgaataaaagccttgtctctgaaaaa

SEQ ID NO: 136063 - DNA, 567 bp, Homo sapiens
  misc_feature (1)...(567): n = a,t,c or g
aaggggnnnnnnagcnngcncnnnnnnnnnttctgaaactgccggctgcatgaattcggcacgagcgttgctggtgcgagtccttatgaaccagactagcatttctcagtgggttccagtatgcagccgattgatacctgtgtctcctacccaaggacagggggacagggctctgtctcgcacttcccagtggccccagatgagccagtcccaagcatgtggtggatcagaacagattcctggaatagacatacagctgaataggaagtatcacaccacacgtaagctttctactaccaaagattccccacagcctgttgaggagaagcgatcttgggatatgatgaggggatcctttcagatgatcatgggctggccgctgccctctggagaaccttcttcaaccggaaatgtgaagaccctcgacatcttgaattgctggtagagtatgtgaggaaacagatacagtacctggactccatgaacggggaggatctgcttctgacaggggaggtgagctggcgccctctagtggagaagaatcctcagagcatcctgaagccccat

SEQ ID NO: 136064 - DNA, 603 bp, Homo sapiens
  misc_feature (1)...(603): n = a,t,c or g
cgtccttaggaaccagactagcatttctcagtgggttccagtatgcagccgattgatacctgtgtctcctacccaaggacagggggacagggctctgtctcgcacttcccagtggccccagatgagccagtcccaagcatgtggtggatcagaacagattcctggaatagacatacagctcgaataggaagtatcacaccacacgtaagctttctactaccaaagattccccacagcctgttgaggagaaggttggtgctttcacaaagataatagaagccatgggattcacgggacctttgaaatacaggtgtcagatgcctgatacattcaattcatggtttcttataaccctactccacgtctggatgtgtctagtccgaatgaagcaggaaggccggagtgggaagtacatgtgtcgtatcatagttcattttatgtgggaggatgttcagcagccggcagagtcatgggggttaatccctatatcctgaagaagaacatgatcctaatgacaaatcatttctatgcagcgatcntgggatatgatgaagggatcctttcagatgatcatgggctggccgctgccctctggangaactt

SEQ ID NO: 136065 - DNA, 417 bp, Homo sapiens
agacgtgtccttgggaggtgtgtgtctgtctccattcagaggtgtgatagggaattccctaactgcccccgccacccagctccccagtgactgctttctctgaaccaccttagtgaaattatctaggagatcagagacggcttggcctgggacggcttggtctgggacctgggatggtcagaagcccccctcatgccccgtccccttccttcctctcctctgggaggctggttcctgacgctggctcctcacctctgccctgcctctgtcgcttcctccttccccctcccctggttgcagatacagtacctggactccatgaacggggaggatctgcttctgacaggggaggtgagctggcgccctctagtggagaagaatcctcagagcatcctgaagccccattctccgacttac

SEQ ID NO: 136066 - DNA, 454 bp, Homo sapiens
  misc_feature (1)...(454): n = a,t,c or g
tgtccagcgcggtggaattccagtgggttccagtatgcagccgattgatacctgtgtctcctacccaaggacagggggacagggctctgtctcgcacttcccaggtcccctggttggaaacttctgcttcagaatggcatcctcagacagggtcttgcnnnnnnnnnnnnnnnnnnnnnnnnnnnnnnnnnnnnnnnnnnnnnnnnnnnnnnnnnnnnnnnnnnnnnnnnnnnnnnnnnnnnnnnnnnnnnngggtgtcagatgcctgatacattcaattcatggtttcttataaccctactccacgtctggatgtgtctagtccgaatgaagcaggaaggccggagtgggaagtacatgtgtcgtatcatagttcattttatgtgggaggatgttcagcagcgcggcagagtcatggggttctgatgggaggccctggtatggggcctgcact

SEQ ID NO: 136067 - DNA, 1892 bp, Homo sapiens
cgcctcgccccgtaattcccgggtcgacgatttcgtggttattgaggaacatggcgttgctggtgcgagtccttaggaaccagactagcatttctcagtgggttccagtatgcagccgattgatacctgtgtctcctacccaagggacagggggacagggctctgtctcgcacttcccagtggccccagatgagccagtcccaagcatgtggtggatcagaacagattcctggaatagacatacagctgaataggaagtatcacaccacacgtaagctttctactaccaaaagattccccacagcctgttggaggaagaaggttggtgctttcacaaagataatagaagccatgggattcacgggacctttgaaatacagtaaatgggaagatttaagattgcgggccctgcgcattgtatactagctgtgtgggagaaaacttgacttcgagggattcttttctaaggtgttcagatgcctgatacattcaattcatggtttcttattaacccctacttccacgtctggatgtgtctagtccgaatgaagcaggaaggccggagtgggaagtacatgtgtcgtatcatagttcattttatgtgggaggatgttcagcagcgcggcagagtcatgggggttaatccctatatcctgaagaagaacatgatcctcatgacaaatcatttctatgcaagcgatcttgggatatgatgaggggatcctttcagatgatcatgggctggccgctgccctctggaagaaccttcttcaacccggaaatgtgaagaccctcgacatcttgaattgctggtagagtatgtgaggaaacagatacagtacctggactccaatgaacggggaggatctgcttctgacaggggaggtgagctggcgccctctagtggagaagaatcctcagagcatcctgaagccccattctccgacttacaacgaccgagggacttttgatgggctgggccctccgcacggcccgccagctggcttccgaggaacctccagggaagagaagtgcctggttggtcccaggacccctgccagaaagtggcctgaacttgacctcttgaacaagcatctgtccaaatacctggcccccatttgtgttgagtttcctcttagtgtgccccaggagtctgatctgctggggtacagggcttgggagaaccccttagctctcccggggtgtccgtcgtcccttaggggaagccccgagtgagagtcccccagcacacactcccccaaccccctccagcaactacatgtgactgatagcttttcccaaaggccaaggaagggatggtgtaggttcaaaagggaaaccccccagggcctgctgtggcctaggagcagattgtaatgctgccgagtccggtcggtgaccacgcgttgtccgctcggctttcagccatggggttgagttggccattaaaagaaacagagacttctctctgccatggcccttctttattccaggggacttagaaactttgcctgagatggtggacgcagtaatgagggcaccgcgcagctcagttagagacggagaaagggaagaggctgggatggtctctgctgctcttgcctctaagttcatggagatgtgtctctgttcaggccaagatacagccagccaggcctgtcgtctgggacccaggaggccttttgattaccaagggctttcacatcctaagtcatttggaaggaggccttgagaacaaagtcacctttgtcactcccagtgaactgaatgaggaacatgctgtctcctgtcttggcctccctttcatgagatactgggggagaagagaacattcctcctggcttagttgtagcagacccagacctgtgccagctttggtccccttccaactt

SEQ ID NO: 136068 - DNA, 435 bp, Homo sapiens; identical to SEQ ID NO: 118869

SEQ ID NO: 136069 - DNA, 753 bp, Homo sapiens
tcatcgtagctctcccttttgggcatcaccacagccaaacatcgcctcttccaaatctactgcaaactgcggcttgtctcttgcttcattttttacttttgtctggggtcgagacgggcaggccgggcccgtggcagcctcgaatccgagcccggggcccacccgcccctccaggcccagcgcggcctgccaagccccggcgtcgagttgccgcgggccggccagagaggcctgctggtacggctgccgcaggccggctcgaccgccgccagcgccgccaacgccaacgcatggcgcagccggcagcagggaagcagagcgagcgagcgagctagctgaggggcgcggccgctgcggcttgggagcgcaggaactatcatggtctctgcatgtgttccctgattcttcaaaattgcagtgggtggaaggggacttctctagtgatacctctggtgacacagattttccggccacagaaatcggggaagtttttcctggtgtgggctttccgtgggtaactccttgtgtctggtgcaccagttcttgagcttttgggggatacaaaacaggttgttttttggcttctggtttaggatttagctttcttgggtctgctgagtcagttaccacttgcatcctgcttctagctttcagaaatttattgctgcttcctttcctgttgttgtaagtttttttgccttgagcaccaagccatttgcagtagaaccatgaaattgatagagccagcgacat

SEQ ID NO: 136070 - DNA, 872 bp, Homo sapiens
ggtatgggccaccgtcatgtagcctctgcaataatcgatgagtcctctgagcgcacagagaaagcgtaagacatggacccccccccttagcacgtgctgacctctaaaaatccatgggatagggtgtaaacctgactatcaggatccattaattagagggagaccaactcctgaaatggccccataccttcctgcagctgaagtggtcaggcaaaaaagacaggaaaaacccaaatccaagttaaaagaggaatgcccatgaaaaaaagttaacatgaaaaatccccatcatttccctatccctcaagctgggtcaagcatcatcaaaaatcatcccgaccccacaaaatcctcatctctccccaggaaccaaaagggatagtagctttcagccttggtccctctccgctttcatcataactgggcagtgttgtagctacattgtaagatgggggctttggaaacccagactcatccttgtagtcaaaaaatatgctgcgctctctgcagaaatgctgctggtaaaggtggaggagccatcacctgcagcctgttcaggttctccagactcttcttcattctgcaactgctggtaaccggctgccgcaggccggctcgatccgccgcccagcgcccgccaacgcccaacgcccataagcgcagccggcagcagggaagcagagcgagcgagcgagctagctgaaggggcgcggccgctacggcttgggagcgctgggaggccgagggggacgcgccttgggtgggtctcgatggccgccgccgctcccgggcgagacgctcttctcaggctgtaagcaccgccgccgccgccgaggctccgacgcggcccctggggaagaggcggggactac

SEQ ID NO: 136071 - DNA, 457 bp, Homo sapiens
tttgttctgagtaaatttattattattatcaggagaggtctctgcaaagcagaaccctgtagaaactgcattcctgtgaatggcatccagaccctcgttaactaaaatgccgctccattttcacgccacgctgcatttcaaggatttagttgggctgtctgtatcttccggctccccgcagagcgtgcactgcgactctttccggcttcctgcctggttctcccaggtggaccatcaggtgtggcacctgcacggctggccgctgccgaccactgctcctcctctgctccagggcgtctggcgagtcgaggtaggcgagcacgagatggcagagattttctcctctgctaagaaggaagctgccggtgctcttcagaggccctgtattcctgtctggtaagatacagcaatgcttctgcagaatgccaggcaaaacctcccagggcaatgaatcctt

SEQ ID NO: 136072 - DNA, 1809 bp, Homo sapiens
atgagaggaaacactgcagggggcccaggagacgagaaacctgattccactcatcccccatgggagggaacgctgcaggaggcccaggagatgaaaaaggtagtgcggttcatgtggacatctggtggcccagaccctcaacattggcgtggctcaggtttatatggacagctggtggcccagatgctccacattgacgtggctcaggtttatatggacagctggtggcccagatgctccacattggcgtggctcaggtttatatggacagctggtggcccagatgctccacattggcttcgctcaggtttaggtggacagctggtggcctggatgctacatgttggtgtagctcaggtttatgtagacagctggtggcccagctgctccgcatccatgtggcttagctttatggaacataaacagtgcttgaccctgggctatgaagtagccctttttctacagcattttctatccagggcctttgtcttggtttgggttccccggaaagaaaaggctcaggtattgagacaagggctcagtctcacttttcgggagaaccctggtgtatgtgtgatgagcagttaccgcccctggctcatcactgctgcagctgacatgcagccgtccaagccaggaggcacaggctcctactgcagctactggagccccactgacaacaccccacgccttgctgctgcgtgcacctggaacctgggctctagtcatgggtctgcccctggtgtaaggaccttcattgaggcaggattttcacctcctttcctggcacccaaagccttggccttgacactgagcgacagtgactcccgctggggcccgaaccctgtgtatgctcaaccccaaccgcggaaccggcctggggcccaaatcctgtgtaaggtcaaccccaaccgcggaatcggcctggggcccgaaccctgtgtatgctcaaccccaacagcggaaccgccatggggcccgaaccctgtgtcaaccccaaccgcggaaccggcctggggcccgaaccctgtgtatgctcaaccccaacagcggaaccgccatggggcccgaaccctgtgtaaggtcaaccccaaccgcggaaccggcctggggcccgaaccctgtgtacggtcaaccccaaccgcggaaccggcctggaagccgcaccacaaggcaacctgtactgcagcgctgccctcggtgccaccgacccatcgcaatcctggcaccaatgttcacaaaaccttctgcccgcagacaagggcgcaaagcgagaagcaccttggcgaggccaccgagtggggaggtggaccatcaggtgtggcacctgcacggctggccgctgccgaccactgctcctcctctgctccagggcgtctggcgagtcgagcagacacctgccagtcatcaccgtcaaccaaggccccgccagtcatcaccgtcaaccaaggccccgccagtcatcaccgtcaaccaaggccccgccagtcatcaccgtcaaccaaggccccgccagtcatcaccgtcaaccaaggccccgccagtcatcaccgtcaaccaaggccccgccagtcatcaccgtcaaccaaggccccgccagtcatcaccgtcaaccaaggccccgccagtcatcaccgtcaaccaaggccccgccagtcatcaccgtcaaccaaggccccgccagtcatcaccgtcaaccaaggccccgccagtcatcaccgtcaaccaaggccccgccagtcatcaacgttaaccaaggccccgccagtcatcaccgttaaccaaagccctgccagtcatcaccgttaa

SEQ ID NO: 136073 - DNA, 1367 bp, Homo sapiens
tttcgtgcctgatacagtctaggtgacgcatccttgccgggccagcccgagcagaagctgggtcggcaagcgacaggagcacgggtcatcttttccccagaggcgtcggaatggacctgtgccacccacagcccgcggagctgagcagcggggagacggatgagttaccgaggatctagtggcaccgaaagcagctcctggaggacatccagaaactgaaggatgagattgcggatgtgtttgcccaaatcgactgcttcgagagtgcgggggacagccggatggcccataaagagaatgagctgtgtattgggcgcaagaagttcaacatggacccccgccaaggtaggtggctgtggagggcccgggccacagggtgtgggggctgcatgggagcacctgcctggtgtcctctcaggcgagggcctcaacaagacagccattggtacctacctgggggagaggtaagaacgagtggagccttagcgaggcaggaaatgaaggtgtgcaggtgtgtacaggtgtgtggatgtgcaggccctcaggtgagtagtcctggggcagggtcccggccctcaagggtggcacagccccagtggctgggggtgtcgcgatcctcgatactgcctctgcaacccaggcgtcttccagtccacaggtgccaggaggggagtgggacccagggctccgggaccccttcagcattgccaggcatagatttcacagaccaggccgccttttgagcgctttgtgtccatgaaccgcggcatcaacaatggtagcgacctgcccgaggaccagctgcgggtgagagaggcgcagcccacccagcctggccccggggaatccaggagggacctgtccttagatggatggcccttcttcaatccagaccgggagggttggctgctcaagctaggtgagagaccgacagacacacgtcgtcgcacacacactcatgcacgcgcgggcacacatcgttgcatgcacaccactgtgagcagggttctcctgggccttcccctgcccccgcctctccccgcacaacccacttcccaactcccactagtaggtgttcaggttgcaggatcccgaggctggagccactgggaaatttcctaaacagaacgtggggagagcagggtggtggagggcaagcacgaatcgtaccgcatctcagccaccagtgccgaggaacgtgaccagtggatcgagtccatccggtaaggggtgcccaggtctggggacggcttcccgtcaccttccagaaggccctgcttcttttgggtcttgcgagattcctggaggtggcactgggggctggtcaccctgagagtcccatcgcctgcagcacctggagacccacc

SEQ ID NO: 136074 - DNA, 356 bp, Homo sapiens; identical to SEQ ID NO: 109736

SEQ ID NO: 136075 - DNA, 3847 bp, Homo sapiens
cgccccggcgcggggccctgcggtagcctcaggcccctcccctggacccgccgcagagccagtgcagaatacagaaactgcagccatgaccacgcacgtcaccctggaagatgccctgtccaacgtggacctgcttgaagagcttcccctccccgaccagcagccatgcatcgagcctccaccttcctccatcatgtaccaggctaactttgacacaaactttgaggacaggaatgcatttgtcacgggcattgcaaggtacattgagcaggctacagtccactccagcatgaatgagatgctggaggaaggacatgagtatgcggtcatgctgtacacctggcgcagctgttcccgggccattccccaggtgaaatgcaacgagcagcccaaccgagtagagatctatgagaagacagtagaggtgctggagccggaggtcaccaagctcatgaagttcatgtattttcagcgcaaggccatcgagcggttctgcagcgaggtgaagcggctgtgccatgccgagcgcaggaaggactttgtctctgaggcctacctcctgacccttggcaagttcatcaacatgtttgctgtcctggatgagctaaagaacatgaagtgcagcgtcaagaatgaccactctgcctacaagagggcagcacagttcctgcggaagatggcagatccccagtctatccaggagtcgcagaacctttccatgttcctggccaaccacaacaggatcacccagtgtctccaccagcaacttgaagtgatcccaggctatgaggagctgctggctgacattgtcaacatctgtgtggattactacgagaacaagatgtacctgactcccagtgagaaacatatgctcctcaaggtgatgggctttggcctctacctaatggatggaaatgtcagtaacatttacaaactggatgccaagaagagaattaatcttagcaaaattgataaattctttaagcagctgcaggtggtgccccttttcggcgacatgcagatagagctggccagatacattgagaccagtgctcactatgaagagaacaagtccaagtggacgtgcacccagagcagcatcagcccccagtacaatatctgcgagcagatggttcagatccgggatgaccacatccgcttcatctccgagctcgctcgctacagcaacagtgaggtggtgacgggctcagggctggacagccagaagtcagacgaggagtatcgcgagctcttcgacctagccctgcggggtctgcagcttctatccaagtggagcgcccacgtcatggaggtgtactcttggaagctggttcatcccacagacaagttctgcaacaaggactgtcctggcaccgcggaggaatatgagagagccacacgctacaattacaccagtgaggaaaaatttgccttcgttgaggtgatcgccatgatcaaaggcctgcaggtgctcatgggcaggatggagagcgtcttcaaccaggccatcaggaacaccatctacgcggcattgcaggacttcgcccaggtgacgctgcgtgagcccctgcggcaggcggtacggaagaagaagaatgtcctcatcagcgtcctacaggcaattcgaaagaccatctgtgactgggagggagggcgagagccccctaatgacccatgcttgagaggggagaaggaccccaaaggtggatttgatatcaaggtgccccggcgtgctgtggggccatccagcacacagctgtacatggtgcggaccatgcttgaatcactcattgcagacaaaagcggctccaagaagaccctgaggagcagcctggatggacccattgtcctcgccatagaggactttcacaaacagtccttcttcttcacacatctgctcaacatcagtgaagccctgcagcagtgttgtgacctctcccagctctggttccgagaattcttcctggagttaaccatgggccgacgaatccagttccccatcgagatgtccatgccctggattctaacggaccatatcctggaaaccaaagaaccttccatgatggagtatgtcctctaccctctggatctgtacaacgacagcgcctactatgctctgaccaagtttaaaaagcagttcctgtacgatgagatagaagctgaggtgaacctgtgttttgatcagtttgtctacaagctggcagaccagatctttgcttactacaaagccatggctggcagtgtcctgttggataaacgttttcgagctgagtgtaagaattatggcgtcatcattccgtatccaccgtccaatcgctatgaaacactgctgaagcagagacacgtccagctgttgggtagatcaattgacttgaacagactcattacccagcgcatctctgccgccatgtataaatccttggaccaagctatcagccgctttgagagtgaggacctgacctccattgtggagctggagtggctgctggagattaaccggctcacgcatcggctgctctgtaagcatatgacgctggacagcttcgatgccatgttccgagaggccaatcacaatgtgtccgccccctatggccgtatcaccctgcatgtcttctgggaactgaactttgactttctccccaactactgctacaatgggtccactaaccgttttgtgcggactgccattcctttcacccaagaaccacaacgagacaaacctgccaacgtccagccttattacctctatggatccaagcctctcaacattgcctacagccacatctacagctcctacaggaatttcgtggggccacctcatttcaagactatctgcagactcctgggttatcagggcatcgctgtggtcatggaggaactgctaaagattgtgaagagcttgctccaaggaaccattctccagtatgtgaaaacactgatagaggtgatgcccaagatatgccgcttgccccgacatgagtatggctccccagggatcctggagttcttccaccaccagctgaaggacatcattgagtacgcagagctcaaaacagacgtgttccagagcctgagggaagtgggcaatgccatcctcttctgcctcctcatagagcaagctctgtctcaggaggaggtctgcgatttgctccatgccgcacccttccaaaacatcttgcctagagtctacatcaaagagggggagcgcctggaggtccggatgaaacgtctggaagccaagtatgccccgctccacctggtccctctgatcgagcggctggggacccctcagcaaatcgccattgctcgcgagggtgacctcctgaccaaggagcggctgtgctgtggcctgtccatgttcgaggtcatcctgacccgcattcggagctacctgcaggaccccatctggcggggcccaccgcccaccaatggcgtcatgcacgtcgatgagtgtgtggagttccaccggctgtggagcgccatgcagttcgtgtactgcatccctgtgggaaccaacgagttcacagctgagcagtgtttcggcgatggcttgaactgggttggttgctccatcattgtcctgctgggccagcagcgtcgctttgacctgttcgacttctgttaccacctgctaaaagtgcagaggcaggacgggaaggatgaaatcattaagaatgtgcccctgaagaagatggccgaccggatcaggaagtatcagatcttgaacaatgaggtttttgccatcctgaacaaatacatgaagtccgtggagacagacagttccactgtggagcatgtgcgctgcttccagccacccatccaccagtccttggccaccacttgctaa

SEQ ID NO: 136076 - DNA, 3879 bp, Homo sapiens
gctgctctgggtgcacgtccacttggacttgttctcttcatagtgagcactggtcttaatgtatctggccagctctatctgcatgtcgccgaaaaggggcaccacctgcagctgcctggagagagggagccggtgtcctacgtcagagccgccgccgccgccggagccgccgccggggaggagcagccgctgccgcccaggactgggcccttatggaggaggaggcgagaagatggcggacgaccccagtgctgccgacaggaacgtggagatctggaagatcaagaagctcattaagagcttggaggcggcccgcggcaatggcaccagcatgatatcattgatcattcctcccaaagaccagatttcacgagtggcaaaaatgttagcggatgagtttggaactgcatctaacattaagtcacgagtaaaccgcctttcagtcctgggagccattacatctgtacaacaaagactcaaactttataacaaagtacctccaaatggtctggttgtatactgtggaacaattgtaacagaagaaggaaaggaaaagaaagtcaacattgactttgaacctttcaaaccaattaatacgtcattgtatttgtgtgacaacaaattccatacagaggctcttacagcactactttcagatgataggcaagtttgggatttcattgtaataggtgggtagtgggtgcactttttgggcacactcccaagggaaacacaagaggaggtccctggcacaaattcactgtggggatcttccccaaggaaacacgggtaggagggaggtcagttcagccttgcgttttgcccgtttaagaatggaaaagcgacataactatgttcggaaagtagcagagactgctgtgcagctgtttatttctggggacaaagtgaatgtggctggtctagttttagctggatccgctgactttaaaactgaactaagtcaatctgatatgtttgatcagaggttacaatcaaaagttttaaaattagttgatatatcctatggtggtgaaaatggattcaaccaagctattgagttatctactgaagtcctctccaacgtgaaattcattcaagagaagaaattaataggacgatactttgatgaaatcagccaggactcactggcaagtactgttttggcgttgaagatacactaaaggctttggaaatgggagctgtagaaaattctaatagtctatgaaaatctgggatataatgagatatgttcttcattgccaaggcaccagaagaggagaaaattctctatctaactccagagcaagaaaaaggataaatctccatttcacagacaaagagaccggacaggaacatggagcttatcgagagcatgcccctgttggaatggtttgctaacaactataaaaaatttggagcctacgttggaaatgttcacagataaatcccagaaggggtctccagtttgatgaaaggatttgggtggaattggagggtatcttgcggtaccagagtagatttccaggggaatggaataccaagaaggagacgatgaattttttgaccttgatgactactaggtagtcgacatgggtccggcaaaaccgtgcctcacccctccagcatccaaccccaaggagcatacccatggtggaatccaaacagatccctgtccttacaattggaacatttccagaacttaatccatgagcattggatattgaaaagaaaacccgaaacaaaaccagacccagccctacactttggtttgtcatggtgtcagcgcagcagcctaactaactaatgttccttcaaaagccactttggacgtaatttaaaaaagaatcccagtttttacttttactggatggtgaaattggttgctcttgtattttatgaaaaaaaatgatttttttaaccttcatacatagaagcaaaaatactttaactgctgtaaaccttcaaaagttaatagaagtgagatcatactggtttgtttcttatttttgattggagaaaaattaaattgctgcatttcgcctaggtgacccatttacatgggcattctcagcttagactgcgtaagaaagaaatatatgtggtgaaaatgttggaaacccatttcctcctccttgggtcctctgtttaatgttgaaaggggtgagcctaatagggagggcactttccaactttcactcccttcacggttaccccgttcccccttccaggactgggcagtttcaagggatgcaaattgcattgcaaaatcaaactgactcatgaagcatttgggccagtgcactgtttacttccatctgtttgcagacacgatttgtgcccggcgtttgggagccctttgtatcaatgttctgacaagggtccctataaccttaacctactcgaaaccggtttggggatgggatatgatgggggcttctgtggctattgctggggattggggaggaaataaaacatggcaattttaagtggaagcgaagaaatttaaagaggattttattttgcttgggtcaatccttgttaaaagggaggtggatgtgttttccttgtgttggatggcatgagattatgtgaatgttttgatttattaaaatgaactgcaaggtttttcacaggaacgacagacatgtatgactgcatgtaattataaactcctgacctcctggtggggttggagcatctgtttcaaatgtgggacttacaagcacttctcacatgagaaattatgggcgggtgggaagggatgggacacatcttctggcaccatggatttaagaccatgttggatcctaaagttggtctgaaacccctgaagctgatgcttcacagctgggctgtaagtcagacttgaacccagctgatatgcaaggtcatggcgtgcccagggtggtgacagttgaacaaagtgtatagtacgtgcccagtggtagcgatggaaaaaagtataccaaatggactttgaaggaccaaaaggttttaaaagtcaattgggtatcacctccacactgacctagggtagtgggggtgcatttggttttcaaattgggtacttttaacactttagtgcctgactgctgttctttactgaccttgattcagtcactcgtagctttaattgggcctgaaccagctcccttggttccccaggttaacagaccctgcctaatcgttccaataaatcctggtttcacttgaatgaaggggaggtatgtcttaaaatgtaaagtttcttggttctcacacttgtactctgagggtccaaatactgttctggttcaatgtgtaacgctgatgttttcaaccccctgtgagaagagtccattatttggtgttcaccaacgtgggagacttcaccggaacaggcttttttgctttgggctctgctatttgtttgcagaacaccccaggagccgagtaaacatgctctcttcacagccagtacctttagggttttgcccattgtaaaatgggtctgatgtgatatgaccaagacccaggagaaattggatgtaaatttacatttttgaatatgctttgttgtttcacatgataccatttagggtatgccagccccctttgtagtttttatttttactatttaagtttggaaatgatgcccaaatttttgtatttctttaatcaatgtgttctcttcggtgatatatattgcattatatattgatgtgtgtatcaatatatattgatatgtattacacttacacatacaaacacatataagagggggtgaaaaccgtagcctttgcattctctatagcctctgcagagagatactaagcagcaaaatcttggtgttgtgatgtacagaaatggagaagagtattaaaccatatttaagaataa

SEQ ID NO: 136077 - DNA, 394 bp, Homo sapiens
gtcgaggatgagcgggtgtgcgcaggcccagcgtgggagaggcaggcaggccaggagcggcccgccagaaaggtgcaagggaaagccccagaggcggaggggaagcacggatgccttctggacatcctggtctgcacgtacctagccgagaaggggctctctggcagctgtgggctgacagaggcactggtggcctttggggagggcagcagtttaggaagaaagaactgcagagacccctggggctccctcaggcaggagcctcactggtcagaccctcggatctcttcatgtctagtggccatgctgaagcaggaaggcaacttcttcctcttaggagtgaaagagtggtgtgattaccagcaagatcattattcttatctccatttctcag

SEQ ID NO: 136078 - DNA, 732 bp, Homo sapiens
ttaattgcctgatgcagatctgttctgcccggcttgcggcgcagccgccggcagagctcgatctgcgggaatgagacccgtctttgcagtcagcgtggctcggactccaagcccacggcgccaccagccgagcctcagtttcctcgcctgccgtgtggctctataggatccccctttttcagagacatagataccatccaaaaatttcctgatatgctgagcagtttctttttcagagacatagataccatccaaaaatttcctgatatgcttgtttttaactgttgttgcttgctgaatcaaagccgctgaatttgaaacaagctcaatgtcatttccttcaaggattaattcatgtttctgggtttgacatactgaacaagcaacacctggtctcatcctaaccctgcggatgtatttttcacccaagaaatttcggatttcaacaaaagacccattctcccgggtaacgatgttgatggggaagtgagcatacacagatctcatcttgtaatggaagcccagtgtaacacccttgatcatgttctcaccacaagtgttgttaagccggagcctcttttttttctttacaagaagactgagttctatactgatgtgattgaagtccctccacagagttcctctggggcccttcacaataactctgcatcccttcagagtaatgacattttccggaatatcaacagtctgattgctgcggatggtcttcat

SEQ ID NO: 136079 - DNA, 3528 bp, Homo sapiens
cgcggccgcagccgcattgcccgctcggcgtccggcccccgacccgcgctcgtccgcccgcccgcccgcccgcccgcgccatgaacgccaaggtcgtggtcgtgctggtcctcgtgctgaccgcgctctgcctcagcgacgggaagcccgtcagcctgagctacagatgcccatgccgattcttcgaaagccatgttgccagagccaacgtcaagcatctcaaaattctcaacactccaaactgtgcccttcagattgtagcccggctgaagaacaacaacagacaagtgtgcattgacccgaagctaaagtggattcaggagtacctgggagaaagctttaaacaagaggttcaagatgtgagagggtcagacgcctgaggaacccttacagtaggagcccagctctgaaaccagtgttagggaagggcctgccacagcctcccctgccagggcagggccccaggcattgccaagggctttgttttgcacactttgccatattttcaccatttgattatgtagcaaaatacatgacatttatttttcatttagtttgattattcagtgtcactggcgacacgtagcagcttagactaaggccattattgtacttgccttattagagtgtctttccacggagccactcctctgactcagggctcctgggttttgtattctctgagctgtgcaggtggggagactgggctgagggagcctggccccatggtcagccctagggtggagagccaccaagagggacgcctgggggtgccaggaccagtcaacctgggcaaagcctagtgaaggcttctctctgtgggatgggatggtggagggccacatgggaggctcacccccttctccatccacatggtgagccgggtctgcctcttctgggagggcagcagggctaccctgagctgaggcagcagtgtgaggccagggcagagtgagacccagccctcatcccgagcacctccacatcctccacgttctgctcatcattctctgtctcatccatcatcatgtgtgtccacgactgtctccatggccccgcaaaaggactctcaggaccaaagctttcatgtaaactgtgcaccaagcaggaaatgaaaatgtcttgtgttacctgaaaacactgtgcacatctgtgtcttgtttggaatattgtccattgtccaatcctatgtttttggtcaaagccagcgtcctcctctgtgaccaatgtcttgatgcatgcactgttccccctgtgcagccgctgagcgaggagatgctccttgggccctttgagtgcagtcctgatcagagccgtggtcctttggggtgaactaccttggttcccccactgatcacaaaaacatggtgggtccatgggcagagcccaagggaattcggtgtgcaccagggttgaccccagaggattgctgccccatcagtgctccctcacatgtcagtaccttcaaactagggccaagcccagcactgcttgaggaaaacaagcattcacaacttgtttttggtttttaaaacccagtccacaaaataaccaatcctggacatgaagattctttcccaattcacatctaacctcatcttcttcaccatttggcaatgccatcatctcctgccttcctcctgggccctctctgctctgcgtgtcacctgtgcttcgggcccttcccacaggacatttctctaagagaacaatgtgctatgtgaagagtaagtcaacctgcctgacatttggagtgttcccctcccactgagggcagtcgatagagctgtattaagccacttaaaatgtttgtcactttgccaaggcaagcacttgtgggtttttgttttgtttttcattcagtcttacgaatacttttgccctttgattaaagactccagttaaaaaaaattttaatgaagaaagtggaaaacaaggaagtcaaagcaaggaaactatgtaacatgtaggaagtaggaagtaaattatagtgatgtaatcttgaattgtaactgttcgtgaatttaataatctgtagggtaattagtaacatgtgttaagtattttcataagtatttcaaattggagcttcatggcagaaggcaaacccatcaacaaaaattgtcccttaaacaaaaattaaaatcctcaatccagctatgttatattgaaaaaatagagcctgagggatctttactagttataaagatacagaactctttcaaaaccttttgaaattaacctctcactataccagtataattgagttttcagtggggcagtcattatccaggtaatccaagatattttaaaatctgtcacgtagaacttggatgtacctgcccccaatccatgaaccaagaccattgaattcttggttgaggaaacaaacatgaccctaaatcttgactacagtcaggaaaggaatcatttctatttctcctccatgggagaaaatagataagagtagaaactgcagggaaaattatttgcataacaattcctctactaacaatcagctccttcctggagactgcccagctaaagcaatatgcatttaaatacagtcttccatttgcaagggaaaagtctcttgtaatccgaatctctttttgctttcgaactgctagtcaagtgcgtccacgagctgtttactagggatccctcatctgtccctccgggacctggtgctgcctctacctgacactcccttgggctccctgtaacctcttcagaggccctcgctgccagctctgtatcaggacccagaggaaggggccagaggctcgttgactggctgtgtgttgggattgagtctgtgccacgtgtatgtgctgtggtgtgtccccctctgtccaggcactgagataccagcgaggaggctccagagggcactctgcttgttattagagattacctcctgagaaaaaagcttccgcttggagcagaggggctgaatagcagaaggttgcacctcccccaaccttagatgttctaagtctttccattggatctcattggacccttccatggtgtgatcgtctgactggtgttatcaccgtgggctccctgactgggagttgatcgcctttcccaggtgctacacccttttccagctggatgagaatttgagtgctctgatccctctacagagcttccctgactcattctgaaggagccccattcctgggaaatattccctagaaacttccaaatcccctaagcagaccactgataaaaccatgtagaaaatttgttattttgcaacctcgctggactctcagtctctgagcagtgaatgattcagtgttaaatgtgatgaatactgtattttgtattgtttcaagtgcatctcccagataatgtgaaaatggtccaggagaaggccaattcctatacgcagcgtgctttaaaaaataaataagaaacaactctttgagaaacaacaatttctactttgaagtcataccaatgaaaaaatgtatatgcacttataattttcctaataaagttctgtactcaaatgta

SEQ ID NO: 136080 - DNA, 1467 bp, Homo sapiens
tcagcctccagacaggcctctgttgctgaattttcctccatcagaaaagtcctctatgctctggtacctccatgatccccacagcagcacaaatgaaatactccttaaatatccgtgaccatcatcacattcagtaagaactgccacatactcgtcgctgaggcagagcgcggtcagcacgaggaccagcacgaccacgaccttggcgttcatggcgcgggcgggcgggcgggcgggcggacgagcgcgggtcgggggccggacgccgagcgggcaatgcggctgcccggcttgcggcgcagccgccggcagagctcgatctgcgggaatgagacccgtctttgcagtcagcgtggctcggactccaagcccacggcgccaccagccgagcctcagtttcctcgccggccgcagcgctggggctccggcgccctctggtggcggcgcctccctccccgctcccagagctctggccagctccattcctgcgcagctgatgaaacccgggagggcgaaggggtccgcgggaaatctacacccgggtggaggggcgccctggagctcggagatccgaccctgcgggagccgcgcgcagcctcgcttgcccttaaatctggccaaagcaaacgccatcgcctctcgcttcttcttcttctttttttctatcagaaaccccagagtgtgcacactgagagtgtgaacagcattgacactggagtcaccctgtgctgcgtgccttctgtcacctttctccttgcatctagctgatgaggtgggttcaatggcaaggccattccctgagaaatggagataagaataatgatcttgctggtaatcacaccactctttcactcctaagaggaagaagttgccttcctgcttcagcatggccactagacatgaagagatccgagggtctgaccagtgaggctcctgcctgagggagccccaggggtctctgcagttctttcttcctaaactgctgccctccccaaaggccaccagtgcctctgtcagcccacagctgccagagagccccttctcggctaggtacgtgcagaccaggatgtccagaaggcatccgtgctggctttctggctgctgcataacagcatgttcatttgaacgagtggcttgagcatgccagacctgggtctttctcatcttcccctccgcctctggggctttcccttgcacctttctggcgggccgctcctggcctgcctgcctctcccacgctgggcctgcgcacacccgctcatcctcgacctggctgagcagcacggccgcatatgctttgccattccacttcccaatggcagagccatgtaaactggagcagggcccagcagcaggcatggcagggatggcagggaggaaggtgtgggcctggtggagctcatatccagtggggaggatgaaccatgggcacaggagcaaggaaatcagatgatacagagagctcat

SEQ ID NO: 136081 - DNA, 323 bp, Homo sapiens
acggacccccggggctgcaaccgccagcgcctcaggggccgccgaggatggggcctgcggctgcctgcccaacccgggcacattcgaggagtgccaccggaagtgcaaggagctgtttcccattcagatggagggtgtcaagctcacagtcaacaaagggttgagtaaccattttcaggtcaaccacacagtagccctcagcacaatcggggagtccaaataccactttcccatatcctcggtataaatcatgtttataagttatggaagaaccgggacattttacagaaaaaaagcaaaaagcaacaaaaaatatacgtggg

SEQ ID NO: 136082 - DNA, 930 bp, Homo sapiens
ttgcctgaggacgtggggctttacggttctgcccccagcacgtcccggttgtgcgacctccccgcaggtcgagcccatcgccctgagcctgattctcgtaccctcagacccccaacacagcaggcgcaggggccacaggggcatcatcgggggcatcatcgccgccatcattgctactgctgtggctgccacgggatccttatctgccggcagcagcggaaggagcagacgctgcagggggcagaggaggacgaagagttaaagttcctgtccctcattctacacacccacagaccaaagcatacagtaatgacagggtcgagcccgccgccggccgatggcatctacgtgatcatcagccgatcagttttttggtgtgagatgcagggctctgagctccaggtcacaatgcacgacacccggggccgcagtcccccataccagctggactcccaggggcgcctggtgctggctgacgcccaggtggcgaacgagcgagactacgtgtgcgtgcaaagcagaggcactgaggtctcccccaacaaagggacactgtctgtgatggaggactctgcccaggagctgcaggtgggtgtggagtttgaggccagcacaaggatgcaggacaccagcgtctccttcgggtaccagctggacctgcccaaggccaacctcctcttcaaaggtgatcggcatcgcggaggaaccctgtacacagcttgcgcacgatataaagcaaggcgcacccgcagctcctcgatactctctccgagcatggcctgcacctcgccacgatacttaaccaagcgtcctcttactttctccatattctctcccagccggtctttctatgcctgcaactccttagacaaccgtgcccgcatctcctccgccaccgaggtcagttgttcctccaattccgatttataa

SEQ ID NO: 136083 - DNA, 1080 bp, Homo sapiens
atgtgggatggaggttctgtgggtcaaggcagcaagtccacatcagtgaggtcaaatcctggcaccagaaatccaggacagttgaaagacaaaaagctggggccccaggccaacaggaaacaagaaactggaaaccagtgccagaatgatcaaatcaagctcatggccatggagggcaaactggaagctgccaggtttcttaagccccggcctgcaatcagcagggtgccacttttcccacattctgtaggtgaccatggggaaagtgttggcagtcagctccctgcctgcagggccgccgccaccacctgtgccggccctcgtgggactgccgccacctccgccctagcatccaggcttcaggctgccgccgctgggaggcggcctgggcgccaggaccagtgtgggtcgaggtttggagcggacccccggagctgcaaccgccagtgctgcagggggtgccgaggatggggcctgccgctgcctgcccaacccctgcacattcgaggagtgccaccggaagtgcaaggagctgtagatggaaggtgtcaagttcacagagaacaaagcgttgtgtccaagatggccatccagacccagcagtcaaagtttgtgaagtggcaggtggatggggagtaccggggctctgacttcacagtggacgtcaccctgtggaacccagacgtcttgatgggttcaggaatcctcgtagcccattacctcaagagcatcacgccttgcttggccctgggcagtgagctggtctaccaccgacggcctggggaggagggcactgtcatgtctgtagctgggaaatacacattgaacaactggttggcaacggtggatgtggagtttgaggccagtacaaggatgcaggacaccaatgtctcctttgggtaccagctggacctgcccaaggccaacctcctcttcaaaggctctgtggacagcaactggattgtgggtgccacgctggagaagaagctcccgcccctgcctttgacactggcccttggggccttcctgaatcaccgcaagaacaagttacggagtggctttggcctcaccatcagctga

SEQ ID NO: 136084 - DNA, 1689 bp, Homo sapiens
ggcggcggcagcgggttcggttgcgcgtggcgcacggggtgggagcggagcccaggccgggagcaggcgccgccgccagcgaccatggggaacgtgttggctgccagctcgccgcccgcagggccgccaccgccgcctgcgccggccctcgtggggctgccgccacctccgccctcgccgccgggcttcacgctgccgccgctgggaggcagcctgggcgccggcaccagtacgagtcgaagttcggaacggacccccggggctgcaaccgccagcgcctcaggggccgccgaggatggggcctgcggctgcctgcccaacccgggcacattcgaggagtgccaccggaagtgcaaggagctgtttcccattcagatggagggtgtcaagctcacagtcaacaaagggttgagtaaccattttcaggtcaaccacacagtagccctcagcacaatcggggagtccaactaccacttcggggtcacatatgtggggacaaagcagctgagtcccacagaggcgttccctgtactggtgggtgacatggacaacagtggcagtctcaacgctcaggtcattcaccagctgggccccggtctcaggtccaagatggccatccagacccagcagtcgaagtttgtgaactggcaggtggacggggagtatcggggctctgacttcacagcagccgtcaccctggggaacccagacgtcctcgtgggttcaggaatcctcgtagcccactacctccagagcatcacgccttgcctggccctgggtggagagctggtctaccaccggcggcctggagaggagggcactgtcatgtctctagctgggaaatacacattgaacaactggttggcaacggtaacgttgggccaggcgggcatgcacgcaacatactaccacaaagccagtgaccagctgcaggtgggtgtggagtttgaaggccagcacaaggatgcaggacaccagcgtctccttcgggtaccagctggacctgcccaaggccaacctcctcttcaaaggctctgtggatagcaactggatcgtgggtgccacgctggagaagaagctcccacccctgcccctgacactggcccttggggccttcctgaatcaccgcaagaacaagtttcagtgtggctttggcctcaccatcggctgagccctcctggcccccgccttccacgcccttccgattccacctccacctccacctccccctgccacagaggggagacctgagcccccctcccttccctccccccttgggggtcggggggggacattggaaaggagggaccccgccaccccagcagctgaggaggggattctggaactgaatggcgcttcgggattctgagtagcaggggcagcatgcccagtgggcctggggtcccgggagggattccggaattgaggggcacgcaggattctgagcaccaggggcagaggcggccagacaacctcagggaggagtgtcctggcgtccccatcctccaaagggcctgggcccgccccgagggggcagcgagaggagcttccccatccccggtcagtccaccctgccccgtccactttcccatctcctcggtataaatcatgtttataagttatggaagaaccgggacattttacagaaaaaaaacaaaaaacaacaaaaaatatacgtgggaaaaaaaa

SEQ ID NO: 136085 - DNA, 434 bp, Homo sapiens
catttgttcataatgctactgccaaggaattctctctcctccaccttgtccaccttttctcctggggagtgcccagacgagcgccatctgctcctgggtcagaggagtccctgcagagtcatcgacttcctcatttccaaaagccccataggttgcactggagtcccgaggcgaagcgccgacacttcatctgcccgtcacctcccgatttttgcaatgtgtttcttctgaacaagaatgtgtgccctggaagccaactcaagtcccagacctaggtttctcgacatttccccaagtcccacctgcgtcaggttgtaggctccggggccagtccctttcgatccgcatcaaaaaacctggcgatcccctttgggcacaagagctcagggcgttggtccccgcgatcgcgactcgtgccgaattgttccagggca

SEQ ID NO: 136086 - DNA, 2142 bp, Homo sapiens
ttgctgaacctcaaaggaaaaatgaattgactctttattatgaacttcccgcacacaaatcgccatctcagtgtctgtttcctagggaactgaccgatgacaaaaagcaagtgactgatgcctacggtggtctcttgaggtcaaagtaagtctaaatgtggcccagtctttcaggaatcatttaccataacaagaagataaatttccacaaagcatgccgtttgatagtagcttataatgtggaagtaaggcatcctgtcatccggccggttagctcagttggttagagcgtggtgctaataacgccaaggtcgcggggtttagaagggaaggtgaggagagtcaaaggcacatggagcattaacagttggaataaacgacagagacacggaaacctccgaggtttccagagcggacccggaaatgacgccaggggatgcaaacccttctgcccctttttgctacccctgaagcttactgttatgtggtcgagtttttctggaagtgggcttccgcgatcgcggggaccaacgccctgagctcttgtgcccaaaggggatcgccaggttttttgatgcggatcgaaagggactggccccggagcctacaacctgacgcaggtgggacttggggaaatgtcgagaaacctaggtctgggacttgagttggcttccagggcacacattcttgttcagaagaaacacattgcaaaaatcgggaggtgacgggcagatgaagtgtcggcgcttcgcctcgggactccagtgcaacctatggggcttttgggaaatgaggaagtcgatgactctgcaagggacttctctgacccaggagcagatggcgctcgtctgggcactccccaggagaaaaggtgcatcgggaagcagcctggcttgtggatggtggacaaggtggaggagagagaattccttggcagtagcattatgaacaaatgcagggctgagaaacagcatggtggccttactaagtttatggcgacagcagatggagtcttgctctgtcgcccaggctagagtgcagtggcgcgaatctcagctcactgaaacctctgcctcccgggttcaagtgattctcctgcctcccgaataactgggatttcaggtgcccgccaccatgcccagctaattttttgtatttttagtagagatgaggtttcaccatgttggccaggctggtctcaaactcctgacttcgggtaatccacccaccttggtctcccaaagtgctgggattacagtcgtaagccaccgccccggcccccaagaccaatcatttctttcttttttttttttgagatggagtctcgctcttgtcgcccaggctggaatgcagtgggacgatctcagctcactgcaacctctgcctcccgggttcaagtgattctcctgcctcagcctcctgagaagctgggattacgggtgcccaccaccacgcctggccaattttgtgtgtgtgtgcgtttgtgttttagtagagatgggggtttcaccatgttggccaggcttggtctcgaactcctgacctcaggtgatctgccccccttcggcctcccaaagtgcttgggatttacaggcatgagccactgcgctaggccaatcttttttttttcttgagatggagtcttgctttgccacccaagctggagtgcagtgttgcgatctcagctcattgcaacctctgcctcccaggttcaagtgattctcctgcctcagcctcctgagtagttgggactacaggcacatgccaccatgcctggctaatttttttttggcatttttagtagagacagggtttcatcatgttggccaggcaggtctcaaactcctgacctcaagtgatccacctgtctcagcctcccaaagtgctgggatttacaggcatggagccactgcacccggcctaaaaatgattacttcttataaaaaggatttcttccccttcacaacactcagcttcctttttctttcctggtaactatgggtctggtgttgtcataaggatctaccttccacatgctggacagtgggggttgctgcttgaggagactcaggccagatacagatcactgtggggaacactaagcttacttggttagagcacggcactaacatttctgcctct

SEQ ID NO: 136087 - DNA, 421 bp, Homo sapiens; identical to SEQ ID NO: 118442

SEQ ID NO: 136088 - DNA, 417 bp, Homo sapiens
tgttcagccagagagctgttcttcagattctcacttgtaggcccacttaatcagggtcaggtcttagagtctccaagttttatctagtttatcccctgcttttagctagaatatacttcaaagcatgatcctactttacagttcaaatcttaacactgttctgcttttataaacagctgcttgtcctaatcttaaaaggtcttcaggaaaaagacggtttgctggtttccttgataaaatatccccgagcatctcattccttctctttgtgcatctgtttctctttgggtaacataagcactcctggagaagttgcatcttggctgccggcgctgccctccagtccccggaatcctgggactcaggttcgagctgtcgctgtcgctgtcgctgcgcctgtgaagcgcccctcgtgcc

SEQ ID NO: 136089 - DNA, 185 bp, Homo sapiens
atggcaggggaggcctcggaatcatggcgagaggcaaaaggcacttcttatgtagcagcagcaagagaaaatgaggaagatgcaaaagcagaaccccccacccccggaataaaaccatcagatctcgctggtgttgtctgtggcttttccaggcacacgatgcaagttggatctgccattctggg

SEQ ID NO: 136090 - DNA, 516 bp, Homo sapiens; identical to SEQ ID NO: 118444

SEQ ID NO: 136091 - DNA, 2610 bp, Homo sapiens; identical to SEQ ID NO: 118447

SEQ ID NO: 136092 - DNA, 2178 bp, Homo sapiens
tcaccaccagctgcgaactctttccatagagtcctgagtgtggacattgcaagcagctctcaccatgcacagtcctgttttgcaaggtaaatttccactggaggatcttactcctgattcaggggcatagaatctgctggaggaggccacattcttgcagcaaattatactatttagcagcatcaataagtcctttaatatggaagatgtcacactggaaataggggacaggggagggcttcctagagcaggccacatttgagctggacctagaaggatgcgcagaatatcagcatgggcagtcagcactcctctgactgattcaccttcaccagggcaccagcctgcagtgaagtagctggggctggttccttttagtgacacccaccaccccttgcccttccaggtattgtccacagatgacacctcctcctcctcctcctgctcctcctcctgctctgcctcctcctcctccccctgctcctgcttctcctcctcttcctcctgctccttctcctcctcctcatgctcctcctcaagctcttcctcctcctcctgctcttcctcctcctcctcctgcttctcctcctcttcttcctcctgctctttctcctcctcttcctgctcctcctctccttctgctcctcctgcttctcctcctcctgctcctcctcctccacctgctcctcctccttctcctcctcctgctcctcctccttctgctccttcttctcctgctcctcttcctcctgctcctgcttctcctcctttctcctgctcctcctcctcctgctcctcctcctgctcctcatcctccttctcctcctgctcctccttgtcctcctctgcccaggccgaggggtccctccgtgccccaagagaaagttcaccaagtttagatcccagtgccccgcagcgggtgaaggtggtcccgccccaggccggatctggccacagggctggcggcgcgctggaaaaccgcccacgtgggaagaagccctggctgcatttccgccctggactgcgctcccgcctgccagcgcggtccctgcgcagccgccccgcgcccactaggtggcgcctgcgctctagtgggcgcttcacaggcgcagcgacagcgacagcgacagctcgaacctgagtcccaggattccggggactggagggcagcgccggcagccaaggtaggattcctgagccccgggcgtctccctggagcctctgaggtcggggtggacagcggggcggccgctgggcaccgcttgcggtccccacccgaatttcatcttgaattgtactcccataaatcccatgtgttgtgggagggacccagtgggagataatttgaatcatgggggcggtttcccccatactgttctcttggtagtgaataagtctcacgagatctgatggttttattccgggggtggggggttctgcttttgcatcttcctcattttctcttgctgctgctacgtaagaagtgctttttgcctctcgccatgattcagaggcctccttgtgggtatgcagtaagccaccccaaaatacgaggagagtagatatcagtgaactgcacgcaacatctgtgattactgatttgcagaagtccttaaggacaggacaggatgtgtctctggacaaagctgcctctgcagcgaggcggcagggaagggtgcgtgccctttcatgaccttcatgagcagcgtgatccactgcggggagctgagggcgccgcacacctgcggcgtgagagcgatgctccgcacaaaccccagcatgcaccagctccggtgttgctccctgtacaccagcctgtttggagaagggggaaaaagccctgggttgcattttccgccttgaattgcgttcccgcttgcaagcgcgttccttgcgcagccgccccgcgcccattaggtggggcctgcgttttagtgggcgcttcacaggcgcagcgacagcgacagggacagctcgaacctgagtcccaggattccggggattggagggcagcgccggcagccaaggtaggattcctgagccccgggcgtctccctggagcctttgaggtcggggtggacagcggggcggccgctgggcaccgcttgcggtaacaagggctttagctgccgctgtgttctgatgactctgttgggaggaaaattcttcctcttccat

SEQ ID NO: 136093 - DNA, 2004 bp, Homo sapiens
atgatagaagatataaatgataacccacctcattttccccaaaatagcattgttttacaaatcaatgaactagcaattccaggcattcggtttggcctggaatctgctatagatgcagatgtagggcctcactctctccagagttaccagctcagttctaatgaacatttctctctgatgatggacaagactaaaggcaagaacgctccagaattagtgctggagaagcccctgggccaggagcaacagagctctcatctcctggtcctggaagcaatggacatgggtgacccagtcccaactggcactgctgcaattcaaattgaggtcactgatgccaacgataatgccccagtttttagccaggatgtatacaaagtcagccttagagagaatgtgcccccaggcacctctgtactaaaggtgacagccactgaccaggatgagggtgtcaatgcggagatcacctactctttcaaatccctacgagatgatattggaaatatgtttgtgctagaccatcaaaatggggaaattaaatccaaagacttaatagacttcgaatttcgtagcagttataccatgagagtagaagctaaggatggtggaggcatgaccagcgaatgtaaaattatagtagaaatccagatccgctacaggattcccgaggaaatgcccaagggctccgtagtggggaacctcgccacggacttggggttcagcgtccaggagttaccgactcgaaaactgcgcgtcagttcggagaagccttacttcaccgtgagcgcagagagcggggagttgcttgtgagcagcaggctagacagggaggagatatgcgggaagaagccagcttgtgctctggaatttgaggctgttgctgaaaatccactgaacttttatcactacccgcctttccgggatgaagagttaaaagtaaaagttaatgaaaatgcggctgcagggacacggttagtgcttcccttcgcgcgggatgcggatgtgggtgtgaactctctccggagttaccagctcagctccaatctgcacttctctctggatgtggtaagcggaactgatggacaaaagtatccggagctggtgttggaacagcccctagaccgcgagaaagagactgttcacgacctcctcctcacagctttagatggcggagacccggtactctccggcaccacgcacatccgtgttacggtcctcgacgcaaacgacaatgcgcccctgttcaccccatccgagtacagcgcttccacggtcattcactatgagatcccggaggaaagagagaggggtttcgctgtgggcaacgtggtcgctaaccttggtttggatctcggtagcctctcaccccgcagggtccagctggtgtctggagctagccgaagattctttgaggtgaaccgggagaccggagagatgtttgtgaacgaccgtctggatcgagaggagctgtgtgggacactgccctcttgcactgtaactctggagttggtagaggagaacccgctggagctgttcagcgtggaagtgagcgcgcaggatgctgatgtgggaagcaactctttacaaacgtatgagctgagccgaaatgaatactttgcgcttcgcgtgcagacgcgggaggacagcaccaagtacgcgcagctggtgttggagcgcgccctggaccgagaacgggagcctagtctccagttagtgctgacggcgttggacggagggaccccagctctctccgccagcctgcctattcacatcaaggtgctggacgcgaatgacaatgcgcctgtcttcaaccagtccttgtaccgggcgcgcgtcctggaggatgcaccctccggcacgcgcgtggtacaagtccttgcaacggatctggatgaaggccccaacggtgaaattatttactccttcggcagccacaaccgcgccggcgtgcggcaactattcgccttagaccttgtaaccgggatgctgacaatcaaaggataa

SEQ ID NO: 136094 - DNA, 9616 bp, Homo sapiens
atggtcccagaggcctggaggagcggactggtaagcaccgggagggtagtgggagttttgcttctgcttggtgccttgaacaaggcttccacggtcattcactatgagatcccggaggaaagagagaagggtttcgctgtgggcaacgtggtcgcgaaccttggtttggatctcggtagcctctcagcccgcaggttccgggtggtgtctggagctagccgaagattctttgaggtgaaccgggagaccggagagatgtttgtgaacgaccgtctggatcgagaggagctgtgtgggacactgccctcttgcactgtaactctggagttggtagtggagaacccgctggagctgttcagcgtggaagtggtgatccaggacatcaacgacaacaatcctgctttccctacccaggaaatgaaattggagattagcgaggccgtggctccggggacgcgctttccgctcgagagcgcgcacgatcccgatgtgggaagcaactctttacaaacctatgagctgagccgaaatgaatactttgcgcttcgcgtgcagacgcgggaggacagcaccaagtacgcggagctggtgttggagcgcgccctggaccgagaacgggagcctagtctccagttagtgctgacggcgttggacggagggaccccagctctctccgccagcctgcctattcacatcaaggtgctggacgcgaatgacaatgcgcctgtcttcaaccagtccttgtaccgggcgcgcgtcctggaggatgcaccctccggcacgcgcgtggtacaagtccttgcaacggatctggatgaaggccccaacggtgaaattatttactccttcggcagccacaaccgcgccggcgtgcggcaactattcgccttagaccttgtaaccgggatgctgacaatcaagggtcggctggacttcgaggacaccaaactccatgagatttacatccaggccaaagacaagggcgccaatcccgaaggagcacattgcaaagtgttggtggaggttgtggatgtgaatgacaacgccccggagatcacagtcacctccgtgtacagcccagtacccgaggatgcccctctggggactgtcatcgctttgctcagtgtgactgacctggatgctggcgagaacgggctggtgacctgcgaagttccaccgggtctccctttcagccttacttcttccctcaaagaattacttcactttgaaacccagtgcagacctggatcgggagactgtgccagaatacaacctcagcatcaccgcccgagacgccggaaccccttccctctcagcccttacaatagtgcgtgttcaagtgtccgacatcaatgacaaccctccacaatcttctcaatcttcctacgacgtttacattgaagaaaacaacctccccggggctccaatactaaacctaagtgtctgggaccccgacgccccgcagaatgctcggctttctttctttctcttggagcaaggagctgaaaccgggctagtgggtcgctatttcacaatacatcgtgacaatggcatagtgtcatccttagtgcccctagactatgaggatcggcgggaatttgaattaacagctcatatcagcgatgggggcaccccggtcctagccaccaacatcagcgtgaacatatttgtcactgatcgcaatgacaatgccccccaggtcctatatcctcggccaggtgggagctcggtggagatgctgcctcgaggtacctcagctggccacctagtgtcacgggtggtaggctgggacgcggatgcagggcacaatgcctggctctcctacagtctcttgggatcccctaaccagagcctttttgccatagggctgcacactggtcaaatcagtactgcccgttccagttccaagacacagattcacccaggcagactctcacggtcttgatcaaagacaatggggagccttcgctctccaccactgctaccctcactgtgtcagtaaccgaggactctcctgaagcccgagccgagttcccctctggctctgccccccgggagcagaaaaaaaatctcaccttttatctacttctttctctaatcctggcttctgtggggtttgtggtcacagcgttcggagtaatcatattcaaagtttacaagtggaagcagtctagagacctataccgagccccggtgagctcactgtaccgaacaccagggccctccttgcacgcggacgccgtgcggggaggcctgatgtcgccgcacctttaccatcaggtgtatctcaccacggactcccgccgcagcgacccgctgctgaagaaacctggtgcagccagtccactggccagccgccagaacacgctgcggagctgtgatccggtgttctataggcaggtgttgggtgcagagagcgcccctcccggacagatccgctacccggtcccagaggagtcacaggaagggacttttgtagggaatgtcgctcaagatttcctgctggatacggacagtctgtcagctcgcaggctgcaggtcgctggagaggtgaaccaaagacacttccgtgtggatttggacagcggagccctgctcatcaagaacccaatcgaccgagaggcactgtgtgggctcagtgccagctgcatcgtgcccctggagtttgtcaccgaaggtcctttggaaatgtaccgagcagaggtagagatcgtagatgtgaatgatcacgccccccgttttccgcggcagcagctggacttggaaattggggaggcagctcctccaggacagcgtttcccgttggaaaaggctcaggatgcagatgtggggagcaattcgattagcagctataggctgagctccaatgaacactttgcactggatgtgaagaagcgcagcgacggcagcctggtcccagagctgctcctggagaagcctttggatcgagagaagcaatcggactaccgcctggtgctgactgctgtcgatggagggaacccgccgagatctggcaccgcagagctccgggtatccgtgctggacgtaaacgacaacgccccagccttccagcaatccagctacaggattagtgtgttggagagcgcaccagcgggcatggtgctcatccagctcaatgcctcagacccggacctgggtcccagtggtaacgtcaccttttatttcagtggtcatacccctgatcgtgtaagaaacctctttagcctgcaccccactactggaaagcttactcttttggggcccctagactttgagagtgagaattactatgaatttgatgtgcgggctcgcgatgggggttctccagccatggagcaacattgcagccttcgagtggatctgctggacgtaaatgacaatgccccttacatcacagtgacctcagagcttggaaccctccccgagagtgcagaacctggcactgtggtggcacttatcagtgtgcaggatccagactcagggtcaaacggagatgtgagcctccgcattcctgaccacttgccatttgccctcaagtctgccttcaggaaccagttctccctggtgactgctggacccttggatcgagaggccaaatctagctatgacatcatggtcactgcttctgatgctgggaaccctcctctcagtacccacagaactattttcctcaatatttcagatgtgaatgataatccaccctctttctttcagaggtcacatgaggtgtttgttcctgagaacaatcgcccaggggacctgctttgctcccttgcagcctctgacccagactctggcttgaatgcgcttatctcctactcactcctggagcccaggaatcgagatgtatcagcttcctctttcatctctctgaacccccagacaggagctgttcatgctactcgatcctttgactatgagcaaacccagacactgcagtttgaggtgcaggcccgggatcggggcaacccaccccttagcagcactgtaacagttcgtctatttgtgctggacctcaatgacaatgctccagctgtgctccgtcctcgggcccggcctggttccttatgtccccaagcactgcctccatcagttggtgctggccacctaatcacaaaggtgactgctgtggacttggattcaggttacaatgcttgggtttcctatcagctcctggaggccccagatcccagcctgtttgcagtctctcgatatgctggggaggtgcggacggctgttcctatcccagctgacctcccaccacagaagctggtcattgtggtaaaggatagtggtagtccaccactctctacctctgttactctcttagtgtccttagaggaagacactcatccagttgtcccagatcttcgagaatcttcagctccaagggaaggagaatctcgtctaaccctctacttggctgtgtccctagtggcaatttgctttgtctcctttggctcattcgtggcactactctctaagtgtcttcgtggggcagcctgtggagtcacatgctttcctgctggcacctgtgcctgtctcaccagatctcgaaggagggaggggcttcccccttccaatgggatcctccgaatccagctagggtcagatgaccctatcaagtttgttgatgtgggaggccactctcatggctgtacacccttggcttctgcacccactcggagtgatagcttcatgatggtgaagtcacccagtgcacctatggcaggggagcctgttcgcccaagctgcccaccctctgatcttctctatgggctagagcttcgttactcagtggtggaggagtctgagccggggacgctggtggggaatgttgctcaggatctgggcttaaagatgacagatctgttgagccggcggctgcaattgggctctgaggagaatgggcgctatttttccctgagcttgatgagtggtgccctggcagtgaatcaaaagattgaccgagaaagcctatgtggagccagcaccagctgcctgctgccagtgcaggtggtgactgaacaccccctggagctaatccgtgtagaggtagagatcctggatctcaatgacaactctcctagctttgccacccctgagcgagagatgcgcatctcagaatcagcagcatctggggcacgattcccactggacagtgcccaggatccggatgtgggcaccaatactgtgagcttttacactctaagccccaacagccacttctctctgaatgtgaagaccctaaaagatgggaagccattcccagagctggtgctagagcagcagctggatcgtgaagcccaggcaagacatcagctggtgcttactgctgtggatggggggaccccagcccgctcagggaccacccttatctctgtcatcgtgctggacatcaatgataatgctccaaccttccaatcctcagttctacgtgtgggaatcccagagaatgcacccattggtactctgctgctccgcctcaatgccactgatccagacgagggcaccaacggccaactagactattcttttggagaccacacatctgaggcagtgcggaacctctttggcctagaccctagcagtggggcaatccatgtgttgggtcccatagactttgaggagtcacgtttctatgaaattcatgcaagagcccgtgaccagggacagcctgccatggagggccactgtgtgattcaagtggatgtgggggatgtcaatgacaatgccccagaggtgctattggcctctttggccaaccctgtcctagagagcacaccagtgggcacagtagtggggttgtttaatgtgcgagaccgggactcaggtagaaatggtgaagtgagccttgatatctctccggacctgccatttcagattaagccttctgagaaccactactcgctgctaaccagccagcctttggaccgggaggccacatcccactatatcatcgagctgctggccagcgatgctggttcaccttccctacacaaacatctcaccatcaggctcaacatttcagatgtcaatgacaatgcaccccgcttcaaccagcagctttacactgcttacatcctagaaaaccggcctccgggctcccttctttgcactgtggctgcctcagatccagacactggggataatgcccgcctcacctactccattgtaggaaatcaggttcagggagccccagcctcctcctttgtgtatgtcaacccagaggatggacggatctttgcccagcgtacctttgactatgaattgctgcagatgctgcagattgtggtgggggttcgagactccggctctcccccattgcatgccaacacatctctgcatgtgtttgtcctagacgagaatgataatgccccagctgtgctgcacccacggccagactgggaacactcagccccccagcgtctccctcgctctgctcctcctggctccttggtcaccaaggtgacagccgtggatgctgatgcaggccacaatgcgtggctctcctactcactgttgccacagtccacagccccaggactgttcctcgtgtctacacacactggtgaggtgcgcacagcccgggccttactggaggatgactctgacacccagcaggtggtggtcctggtgagggacaatggtgacccttcactctcctccacagccacagtgctgctggttctggaggatgaggaccctgaggaaatgcccaaatccagtgacttcctcatacaccctcctgagcgttcagaccttaccctttacctcattgtggctctagcgaccgtcagtctcttatccctagtcaccttcacctttctgtcagcgaagtgccttcagggaaacgcagacggggacgggggtggagggcagtgctgcaggcgccaggactcaccctccccggacttctataagcagtccagccccaacctgcaggtgagctcggacggcacgctcaagtacatggaggtgacgctgcggcccacagactcgcagagccactgctacaggacgtgcttttcaccggcctcggacggcagtgacttcacttttctaagacccctcagcgttcagcagcccacagctctggcgctggagcctgacgccatccggtcccgctctaatacgctgcgggagcggagccagcaagccccgcccaacacggactggcgtttctctcaggcccagagacccggcaccagcgggccatacactggctttgaagcagaattcaccattgaacctggaagccccaccaactgcctctcatgtgtcctctggggtgagcaccttacccctgcctcaactcccattccatcaaatgagaggcttagtggcctggaatacatgtgggagctcttggagatatggaggagaagctcccaaaatggcgatgacaccggcacctggcccaacaaccagtttgacacagagatgctgcaagccatgatcttggcgtccgccagtgaagctgctgatgggagctccaccctgggagggggtgccggcacccatgggattgagcgcccgctacggaccctagttcaccctgcagcacgtgctgcagggtgaactggggtccgactaccgccagaatgtctacatcccaggcagcaatgccacactgaccaacgcagctggcaagcggggatggcaaggccccagcaggtggcaatggcaacaagaagaagtcgggcaagaaggagaagaagtaacatggaggccaggccaagagccacagggcagcctctccccgaaccagcccagcttctccttaccttgcacccaggccttcagagtttcagggcttaacccccagaatactggttaggggccaagggccctggttcccttgggaaacagaaacaagtgcccagtcagcacctaccccttcccccccagggggttgaatatgcaaaagcagttccgctgggaacccccatccaatcaactgctgtacccatgggggtagtggggttactgtagacaccaagaaccatttgccacaccccgtttagttacagctgaactcctccatcttccaaatcaatcaggcccatccatcccatgcctccctcctccccaccccacttccaacagttcctctttcccgagttaaggtggttggggtgttgaagtaccaagttaacctacaagcctcctagttctgaaaagttggaagggcatcatgacctcttggcctctcctttgattctcaatcttcccccaaaagcatggtttggtgccagccccttcacctccttccaagagcccaagatcaatgctcaagttttggaggacatgatcaccatccccatggtactgatgcttgctggatttagggagggcattttgctaaccaagcctctttcccaacgccctggggaccagtcttctgttttgtttttcattgttttgacgttttccactgcaatgcctttgacttcccccacctcctcctcaaacaaggaggattccattgcatgtttccaaggacagtatggggggttggtaaggttaagggaaggggaagtgtgtggatgtggatggtgggggcatggacaaagcttgacacatcaagttatcaaggccttggaggaggctctgtatgtcctcaggggactgacaacatcctccagattccagccattaaaccaataactaggctgggacccttcccacttacataattagggcttcagccagggcaggccagctttgggctgagctaacaggaccaatggattaaactggcatttcagtccaaggaagctcgaagcaggtttaaggaccaaggtccccttgagaggtcagaggggcctctgtgggtgctgggtactccagaggtgccactggtgggaagggtcagcggacccccagcaggaagggtgggccagccaggccatttcttagtccctgggttggggaggcagggagctaggggcagggaccaaattgaacagaaagtttttagcccaggatggggctttctttcaacagggccccctgcccctcctgaagcctcagtcccttcaccttgccaggtgccgtttctcttccgtgaaggccacttgcccaggtccccagtgcggccccctagtggccatagcctggttaaagttcaccaagtgcctccttgtgcaaaaaaccttcttctcccacccccttctgccccctgggtccccggccaatcccaagcggggctgcccagagaaccccaaaacctgcccttacaagtagtgtagcgccccctcccatctttcgggctggtgtagaatagccagttagtgttagttgcggtgtgctttttacgtgatgggcgggtggggcagcgggcggcggggttccgcgcagccgttctgttccttgattctgcccgcggcggcccgtgttgtgttttgtgctgtgtccacgcggctaaaggcggaccccccctcccccgtactgacttctcctataagcgcttctcttcgcataagtcacgtagctcccaccccaccctcttcctgtgtctcacgcaagttttatactctaatatttataatggctttttttcttcgacaaaaaaataataaaacgtttcttctgaaaaaaaaaaaaaaaaaaa

SEQ ID NO: 136095 - DNA, 560 bp, Homo sapiens; identical to SEQ ID NO: 129610

SEQ ID NO: 136096 - DNA, 1946 bp, Homo sapiens
ataatgggaagattgatttgaatgtgatgatggatgaagttaaaaatgttacagagtcgacctgcaggcatgcaagcttggcttgcggttctttcacaaaaaccttcgttccaaggcttgttggccttggaatacgccccccagtaaaaattagggtggaagggcccttgatgtcaaccaagccctttgccacctcagttggggacccctctccacaagtccaggaggaagaggaggaagaaaaggtgaagaggaaggcccagagtgcccttaagaaaaaactcacaaaacctgtcgctgtgggcgtggatgtggtaaaaggggaacactctaacactgctggtgggagtgtaatctattacaaccactatggaaaatggtgtggagagtggcttaaagaactaaaagtagaactactatgtgatctagcagttccactactggtatcaacccagaggaaaagaagtcattatatgaaaaagatacctgtacacacgtttatggcagcacagctcgcaattgcaaaaaagtggaaccaacccaaatgcccatcaatcaacaagtggttacagaaactgtggtatatttatatgatggaatactattcagccataaaaaggaatattaacggcatttgcagcaacctggatgagattggagactattattctaagccaaggggatcctctagagtcgacctgcagtcgatcgcaagcgaaccgacaagagataacaagtgtgccgaaagcatagaggaaggagaacccttgtacactgtggttggaaatgtaaagtggtataaccttaacagaaaacagtatggatgttcctcaaaaaattggagcagaactaccatacgattcagcaatcagtggggtcgggccagggaacaggggatgtggagatgctgccacctgggcttggtcggcccattcgtgggcaccgatggcggcaggagcccgggcagctggagggcaggaggactctcagggaggggagagtcagctgcacagaatcagagccggagggcgtggctccaggacacagagggtggccacggggaggatgagatgccctctgctgatggggatgagaggcgtctgatttgggctttgggggtcagccgtggactcctgtgggaccctcagcagagacatcctaaagtctcccaacaagctggcgacacaaggagggtgccttggctaaaagctgtgaggggatcctcacaaccatcacaccccgggttgtgtttttccggacccattgggtgcctgtggcccacagcttcagcagatttaatcattccctgcttgctggctctgaagagagcagctgatcccgacaagagggattctcccagcacagcgcaccgactctggaagggtgcctggctaaaaggctgtgatcaccgggccaagtatgcccagtcccaagttctgcctgcagaagttccccgggccacctgttcacttaccgtgcaggaagtgcctctcactggccagcagctgcaccagtgcccagaatgcatcctcctcaggaaattaaaggaggaacaaggcggcgatgtggctcagagcacctgggggaaggggtgtctgtggcccacagcttcagcagatttaatcattccctgcctgctggctctgaagagagcagctgatcccgacaagagggattctcccagcacagcgcaccgactctgggtcgacagatacctcatacaagagagctccatttggcatcagcgtggtgcccctctgggacgaagcttccagaggaaggagcagggagcaatctttgctgttctgcaggcttcactggtgacacccaggcaaacagggtctggagtggacctccaacaaacttcagcagacctgcagaagaggggcctgactgttagaagaaaaactaacaaacagaaagcaacaacatcaacatcagcataa

SEQ ID NO: 136097 - DNA, 469 bp, Homo sapiens
attcccgggtcgacgatttcgtaagacgccgaggcctgggccatggaactggcggacgtgggggcgtgagccagctcgcagggtgcgccgcagccagaggagccagcggcctccttgggtgtaaatgagaagggtggggcaggcggacgctcggggcggcggccactggggcgcgaccgtccccgccccactcggctcctctaagagagggctgcctccctctgccttgtgttacgcggcgggtacctctagaggaatggcttcacccagcaggagtagggtggggcgcgtccacactacaaatacgtgtcgagggtttatctgcgccgtcctttcctctgtgaggggcgaggtggggcgggaatccctcagccagcccgacgaaaactgcagaggcttctgggccttttaactttggagaagttgaggaccttgtcgctcatttggcagaaggtgggacccggatctc

SEQ ID NO: 136098 - DNA, 2566 bp, Homo sapiens
atggagaagctgggggtggagccggaggaggaaggcggcggcgacgacgaggaagacgccgaggcctgggccatggaactggcggacgtgggggcggcagccagctcgcagggtgcgccgcagccagaggagccagcggcctccttgggtgtaaatgagaagggagttcatgatcaagtgttgcccacaccaaatgcttcatccagagtcatagtacatgtggatctggattgcttttatgcacaagtagaaatgatctcaaatccagagctaaaagacaaacctttaggggttcaacagaaatatttggtggttacctgcaactatgaagctaggaaacttggagttaagaaacttatgaatgtcagagatgcaaaagaaaagtgtccacagttggtattagttaatggagaagacctgacccgctacagagaaatgtcttataaggttacagaattactggaagaatttagtccagttgttgagagacttggatttgatgaaaattttgtggatctaacagaaatggttgagaagagactacagcagctgcaaagtgatgaactttctgcggtgactgtgtcgggtcatgtatacaataatcagtctataaacctgcttgacgtcttgcacatcagactacttgttggatctcagattgcagcagagatgcgggaagccatgtataatcagttggggctcactggctgtgctggagtggcttctaataaactgttggcaaaattagtttctggtgtctttaaaccaaatcaacaaacagtcttattacctgaaagttgtcaacatcttattcatagtttgaatcacataaaggaaatacctggtattggctataaaactgccaaatgtcttgaagcactgggtatcaatagtgtgcgtgatctccaaaccttttcacccaaaattttagaaaaagaattaggaatttcagttgctcagcgtatccaaaagctcagttttggagaggataactcccctgtgatactctcaggaccacctcagtcctttagtgaagaagattcatttaaaaaatgttcatctgaagttgaagctaaaaataagattgaagaactacttgctagtcttttaaacagagtatgccaagatggaaggaagcctcatacagtgagattaataatccgtcggtattcctctgagaagcactatggtcgtgagagtcgtcagtgccatattccttcacatgtaattcagaaattagggacaggaaattatgatgtgatgcccccaatggttgatatacttatgaagctttttagaaatatggtgaatgtgaagatgccatttcgccttacccttctaagtatgtgcttctgcagccttaaagctgtaaatactgctacgacacggcttattgattattatttaatgccaacaatatcaattacttcacgctctggcaagcacagttttaaaatgaaagacactcatatggaagattttcccaaagacaaagaaacaaaccgggatttcctaccaagtggaagaattgaaagtacaagaactagggagtctccactagataccacaaatttttctaaagaaaaagacattaatgaattcccactctgttcacttcctgaaggtgttgaccaagaagtcttcaagcagcttccagtagatattcaagaagaaatcctttctggaaaatctagggaaaaatttcaagggaaaggaagtgtgagttgtccattacatgcctctagaggagtattatctttcttttctaaaaaacaaatgcaagatattcccataaatcctagagatcatttatccagtagcaaacaggtatcctctgtatctccttgtgaaccgggaacatcaggctttaatagcagtagttcttcttacatgtctagccaaaaggattattcatattatttagataatagattaaaagatgaacgaataagtcaaggacctaaagaacctcaaggattccactttaccaaattcaaaccctgctggtgtctgcttttcattccatttcccaacttgcagagtgagcaacttttctccagaaaccacactacagatagccataagcaaacagtaggcaacagactcttcatgaaggacttacaggaaaataggaggagccagattctgttgatgaggaaaattacctttccccctcctgacattggacccctcaagttttcctatgaacctccccgaagcagtacaaaggggaacctgcctggcagagtggaagagagccgggatcagatttcccacattggacataaataagcatattcagcaaaaaggtctgaaaagccaagggaatacccattattttcggattagcggtttattaagctcttcctatattaaacactaatagatattcaataacggagtaaactgttccagataaagcaagaatagttgcaagaagtaaattctggcacaaagcgtaaaaatataacagaagaaataatgtaaaatacttatcttttatgtctaaagccattttatatatacttttcaataaaaagaatatcatggtcaaaaaaaaaaaaaa

SEQ ID NO: 136099 - DNA, 434 bp, Homo sapiens
ggagcagtttctgcgccggcagattgcctcagaaaaagaagagattgaacgcctcaaagctgagattgctgaaattcagagtcgccagcagcacggccgaagtgagactgaggagtactcctctctccttctgcagttctaaaccacagtctataagcccgagtcaccaggacggcctgtctggccacagacaggggctgcctgtggagcctgcccaccggcccccggcagtgcagtccagcggggaggaggctgcccgttcctgccagttcctcactgcggggaccagcaaaggccttctcactgggttggtcaaaggtagtcaccttggcctggtgcatccacagaggatgttgttcaaaccaaaaatcttttaaacgactgaccttccttaaaaacagaatgactcccaatgcttgttgggctagaatgac

SEQ ID NO: 136100 - DNA, 489 bp, Homo sapiens
  misc_feature (1)...(489): n = a,t,c or g
aattccgnagcacggagcctggcctgtcttcgcggtnctgtcactnctgacagagtgcgcctgcagcacgttgccttccaggggcccagctggcttggtttggcaaatgccttctcacaagtntcacatttaaacactcttgtttaagagcatatatatggcttattcaggcaaggagacgtgtacattctagcccaagcaagcaatcggagtcattctgtttttaaggaaggtcagtcgtttaaaagatttctggtttgaacaacatcctctgtggatgcaccaggccaaggtgactacctttgaccaacccagtgagaaggcctttgctggtccccgcagtgaggaatggcaggaacgggcagcctcctccccgctggactccagacggccacgcaggctgctcagatggacgtctccttcctatccctgctgggcgatgctttgccggctccttgccctnctttggctgctctttagctgcttttg

SEQ ID NO: 136101 - DNA, 1056 bp, Homo sapiens
tcagcgctgcgcctgctgtggccgccgcgagccacgccctctgggatctctggtaccgtcactcttgcttgtgccttccacaccttctcggtgcagatccctatgggggagctgcctcacgttctctgactggtcagagcagcgcctggtgggtgttccctggcccactctcctctctccttctgcagttctaaaccacagtctataagcccgagtcaccaggacggcctgtctggccacagacaggggctgcctgtggagcctgcccaccggcccccggcagtgcagtccagcggggaggaggctgcccgttcctgccagttcctcactgcggggaccagcaaaggccttctcactgggttggtcaaaggtagtcaccttggcctggtgcatccacagaggatgttgttcaaaccagaaatcttttaaacgactgaccttccttaaaaacagaatgactccgattgcttgcttgggtttgtacccctcacctctgcagacacggggagaaccccggacccctggcatgcatgctggcggcggcatgcctcccttccacaagcccatgctgctgcagagggagcctgtgtttgcaaaacccagtggactgggctgggtctgctgtctgagcagctcctggctccggtgggaaccagtgtaggcaggaaagtctgggttttcttcataaccttcaaaagcagtcttgttgaacttcagttttttcattggcaaaatggtggagataatcttgatttccaaaggctgcttagataaataatggctagtaagtacctggcatagggcttttggcgtcatactccaattcattttccagcctcctactgatccctgcaggccacctaccactcgcaaagggacacggcttgctagtaaaagactgagccaagcggatgggtctggggcagctgtgccctgtccatgactgaccctggctgcccccagggtggcagtgatgccgcagcagccactacagccacaagctgtgacccccacaagccgtgaccaccacaagccatgacgaccactagtggtcat

SEQ ID NO: 136102 - DNA, 1580 bp, Homo sapiens
tttcgtcctcgtttgtggtgctctcgggggccgggggtggagagttaggagtccccaggcctcggggaagctcttggggggcgcctggacagaggctaggggacccagccctcacggttggtggatcgtgcccggcatagtggccaggctccagggcttacccaggggaccaggacaggctcctggtgtcgcccaccgctggcactgagcagtgggcgcctttgggtgctgcgatccttccttcaggtttcagtgggaatggacagacagatctgaagttgaaaattcttttcacaactcatgttcaactatgtgtgttgtcagaatgctcttaatgaggtgtaatggataggtaacagagaagacctcgtcccttccctagtcagggcatcagcatgactgagtgcttcctgccccccaccagcagccccagtgaacaccgcagggtggagcatggcagcgggcttacccggacccccagctctgaagagatcagccctactaagtttcctggattgtaccgcactggcgagccctcacctccccatgacatcctccatgagccctcctgaagtaatggcttgatggatgagaaagaccatgggaagaaaaaaggaaattttaagaaaaaggaaaagaggaccgaaggctatgcagcctttcaggaagatagctctggagatgaggcagaaaagcttatgcctagatttgaagaggcttatgggaggaccacagagactgagaaagtgcaggaattccagcgtttactcaaagaactgccagaaggtaactatcttctgatttctttgttcgttgtgcacatggaccatgtcatcacaaaggaactggaagcaaaaatgaatatacagaacatttatatagtggtcagcccaactgtgcagatcagcaatctagtcctgtatgtgttcttcacacatgtgcaagaactctttggaaatgtggttctaaagcaagtgacgaaaactcggcgatggtctaacgtggccacgatgcccacgctgccagagacccaggcaggcttcaaggaggagatcaggatacaggagttgcttttgaattgtttacatcaagatctgcagggtgggataaaggatttgtctgaagaagaaagattatgggaagagaaagagatcctgactaaacaggaggagctcctgggcatggagcagtttctgcgccggcagattgcctcagaaaaagaagagattgagtgcctcagagccgagactgcggaaattcagagtcaccagcagcagggcctaagcgagactgaggagtactcctccgagagcgagagtgaggatgaggaggagctgcagatcattctggaagatttacagagacagaacgaagagctggaaataaagaacaaccatttgaatcaagcaattcacgaggagagtgaggccgtcatcgagccgcgcatgcagccctggctgctccagttgcagccagacagggccaagcagcaggcgcaggaggacgaggagcccgagtggcgcggaggtgccatgcagacgcccaagaatggcatcctcgagccagtagcagctaaatag

SEQ ID NO: 136103 - DNA, 4507 bp, Homo sapiens
agtctggtttaactggttggaacgactaaagcacgctggcgcaaggaaagctctcaacttcgggagctgaggcgcaggctggccagagcgtggagaggaaagccctttccatcctcaaggccgttgcaggagatgcccgcgagccaccttcgccagcaccacaccggggtgtaatggataggtaacagagaagacctcgtcccttcctagtcagggcatcagcatgactgagtgcttcctgccccccaccagcagccccagtgaacaccgcaggggtggagcatggccagcgggccttaccccgggacccccagcctctgaagagatccagcccctacctaagtttcctggattgtacccgcactggcgagccccctcaccctcccccctgacatccctcccatgagccctccctgatgtagtgtcctgatgatgagaaagatcatgggaagaaaaaagggaaatttaagaaaaaggaaaagaggactgaaggctatgcagcctttcaggaagatagctctggagatgaggcagaaagtccttctaaaatgaagagggtccaagggaatccatgttttcaagaagcccagcttttctaaaaaggagggaaaaggattttaaaataaaagagaaacccaaagaagaaaagcataaagaagaaaagcacaaagaagaaaaacataaagagaagaagtcaaaagacttgaccagcagctgatgttgttaaacagtggaaggaaaagaagaaaaagaaaaagccaattcaggagccagaggtgcctcagattgatgttccaaatctcaaacccatttttggaattcctttggctgatgcagtagagaggaccatgatgtatgatggcattcggctgccagccgttttccgtgaatgtatagattacgtagagaagtatggcatgaagtgtgaaggcatctacagagtatcaggaattaaatcaaaggtggatgagctaaaagcagcctatgaccgggaggagtctacaaacttggaagactatgagcctaacactgtagccagtttgctgaagcagtatttgcgagaccttccagagaatttgcttaccaaagagcttatgcccagatttgaagaggcttgtgggaggaccacggagactgagaaagtgcaggaattccagcgtttactcaaagaactgccagaatgtaactatcttctgatttcttggctcattgtgcacatggaccatgtcattgcaaaggaactggaaacaaaaatgaatatacagaacatttctatagtgctcagcccaactgtgcagatcagcaatcgagtcctgtatgtgtttttcacacatgtgcaagaactctttggaaatgtggtactaaagcaagtgatgaaacctctgcgatggtctaacatggccacgatgcccacgctgccagagacccaggcgggcatcaaggaggagatcaggagacaggagtttcttttgaattgtttacatcgagatctgcagggtgggataaaggatttgtctaaagaagaaagattatgggaagtacaaagaattttgacagccctcaaaagaaaactgagagaagctaaaagacaggagtgtgaaaccaagattgcacaagagatagccagtctttcaaaagaggatgtttccaaagaagagatgaatgaaaatgaagaagttataaatattctccttgctcaggagaatgagatcctgactgaacaggaggagctcctggccatggagcagtttctgcgccggcagattgcctcagaaaaagaagagattgaacgcctcagagctgagattgctgaaattcagagtcgccagcagcacggccgaagtgagactgaggagtactcctccgagagcgagagcgagagtgaggatgaggaggagctgcagatcattctggaagacttacagagacagaacgaagagctggaaataaagaacaatcatttgaatcaagcaattcatgaggagcgcgaggccatcatcgagctgcgcgtgcagctgcggctgctccagatgcagcgagccaaggccgagcagcaggcgcaggaggacgaggagcctgagtggcgcgggggtgccgtccagccgcccagagacggcgtccttgagccaaaagcagctaaagagcagccaaaggcaggcaaggagccggcaaagccatcgcccagcagggattaggaaggagacgtccatctgagcagcctgcgtggccgtctggagtccgtgagactgaaaggacccgtgcatcttactgtaacccgggggccaggccggctctctcgctgtacattctgtaaaggtgtcttctcttctcagactcttcctctgtcacacgtctgactccttcacgtcaggctcaggttccatgggaggacgaagcagtggacgcattgtgggctttagggacagatgagttttccagatagtgtcagcttatttgaagattaattttctttgttaacttaaaaataactattttaacccttgagtggcttctttttaaaccaaaaaccgtctttctttgcttttttatcacagcagaaatcaggatctctttctcattcaaggggggaaccaccccagggtcagcgctgcgcctgctgtggccgccgcgagccacgccctctgggattcttttggtaccgtcactcttggcttgtgccttccacaacttctcggttgcagatccctatggggggaagctgcctcacgttctctgactggtcagagcagcgcctgggtggggtgttccctgggcccactcttcctcttcttccttcttgcagtttttaaaaccacagtcttataaaggcccgagttcaccagggacgggcctgtttgggccacagacagggggcttgcctgtgggagccttgcccaaccggcccccggcagttgcagttccagcggggaggaggctgcccgttcctgccagttcctcactgcggggaccagcaaaggccttctcactgggttggtcaaagatagtcaccttggcctggtgcatccacagaggatgttgttcaaaccagaaatcttttaaacgactgaccttccttaaaaacagaatgactccgattgcttgcttggggttaggaatgttacacgtctccttgcctggaataagccatattatatggttcttaaaacaaaagtttgaaattatccatatcactctcagtttatccttctggtggactcccaattgacaagatggagcagtagaaaaaaattcctttcctttgaatgatagctgtgattcaccccaccccattttcttgtttctggtccatccgatgagacggatgctctgatgctctgaggcttctggggaggctgggccctggggagggcaacgtgctggcagggcgcacttctgtcagagttgaacagcacccgcgaagacagggccaggctcgtggcttcggaagaccaaacccccacacacactcaaggggtccgaaaacaaacccccacacgaagggctcttcacctccttctcctagggtagtatttattttttcagtcacctgtttgatgccagtttttaaacccctcctaccctattgccactgttgtgaccccgttggcccattattttgatttttgtacggaaaaaaagcttttgtttataggaaatcagccatactatttttttttaaatctggagagaagatattctggtgactgaaagtatggtcgggtgtcagatataaatgtgcaaatgccttcttgcctgtcctgtcggtctcagtacgttcactttatagctgctggcaatatcgaaggttccttttttgtttgtgtaaactctaatttctatcaaggtgtcatggatttttaaaattagtatttcattacaaatgtctcagcattggttaactaatttttgccaggaccattattggatcaagcaaataaattcaacagccgatttgggaaaaaagaaaagcttctagttttttttgtacacatccttttctgtggagggaggattggagtactctgcagctggcgaggagttggttgaggcacttcttcaaggcccaagggggaacacagtgttttgtttccagcttcactttgtaccccctcacctctgcagaccacggggagaaccccggacccctggcatgcatgctggcggcggcaatgccctccccttccccacaagccccatgctgcctgcagagggagcctgtgtttgcaaaaccccagtggactgggctgggtcctgctgtctgagcagctccctggtctccggtgggaactgcacacaagtcccactggcctggcttggccccaggcattgcaattgacagacatttgcatttcatacggtaaatgaggactcagcacagccaaccataatcagcatgtctgggatagactggtctagaataaaaatgaagtttacattgataagattgactttaaaaattccacaataaaaatatctgacattgaaagcttaaaaaaaaaaaaaaaaa

SEQ ID NO: 136104 - DNA, 382 bp, Homo sapiens
ccagctgggctgtgcagcacattacaccctcccatggaaaataaagcaaaaggcaccggggtgcagctgctcactccagactcttggaatatcccgctaacagatgctcggaggaaggccccctccccggtggctacagctggccaaagccagggccctggcccgtcggcgtccaccaccgtctctccatctgacactgccaactgctctgtcactaaaatccccacgccagtgcccaagtccatccccatcagcgagactccaaatatccctcctgtctccgaccctgctcgtgccgtaccccgtgatcgtgcccctaccggtgcccatccccatccccatccctatcccacacgtcagcgactccaagcccccctgtatt

SEQ ID NO: 136105 - DNA, 2464 bp, Homo sapiens
atggacattttctacaaagagacccaggccaatcttccagctgggctgtgcagcacattacaccctcccatggaaaataaagcagaaggcaccggggtgcagctgctcactccagactcttggaatatcccgctaacagatgctcggaggaaggccccctccccggtggctacagctggccaaagccagggccctggcccgtcggcgtccaccaccgtctctccatctgacactgccaactgctctgtcactaaaatccccacgccagtgcccaagtccatccccatcagcgagactccaaatatccctcctgtctccgtccagccacctgctagcatcgggcctccccttggcgtcccgcctcggagccctcccatggtgatgaccaaccgcggcccggtgccgctgcccatcttcatggagcagcagatcatgcagcagatccgcccgcccttcatccgcgggcctccgcaccatgcctccaaccccaacagccccctgtccaaccccatgcttcccggcatcgggcccccgcccggtggccccagaaacctgggccccacttccagccccatgcaccggcccatgctatcgccccacatccaccccccgagcacccccaccatgcccgggaaccccccaggcctgctgcccccgccgcctccgggcgccccgctgccgagtcttcccttcccgccagtgagcatgatgccaaatggcccgatgccggtgccccagatgatgaatttcgggctgccgtcgcttgccccgctggtgccgcccccgaccctgctcgtgccgtaccccgtgatcgtgcccctaccggtgcccatccccatccccatccctatccctcacgtcagcgactccaagccccccaacgggttctccagcaacggggagaacttcattccgaacgcccctggcgactccgcggcggcgggcggcaagccaagcggacactccctgtccccccgggactccaagcagggctcgtccaagtccgcggactcgccccccggctgctcgggccaggccctgagcctggcgcccacgcccgccgagcatggccggagcgaggtggtggacctgacgcggcgcgccggcagccccccgggccccccgggcgcgggcggccagctcggcttcccaggcgtgctgcagggcccgcaggacggcgtcatcgacctgaccgtgggccaccgagcccggctgcacaacgtgatccaccgcgcgctgcacgcgcacgtcaaggcggagcgcgagccgagcgccgcggagcgcaggacctgcggcggctgcagggacggccactgcagcccgcccgccgccggcgacccaggcccgggcgccccggcgggccccgaggcggccgcggcctgcaacgtcatcgtgaacggcacgcgcggcgccgccgccgagggcgctaagagcgcggagccgcctcccgagcagccgccgccgccgccgccgcccgcgccccccaagaagctgctgtcgcctgaggaaccggcggtgatgcgagctagagtcggtcaaggagaataactgtgcttccaactgccacctggacggggaggcggccaaaaagctgatgggcgaggaggccctggcggggggcgacaagtcagacccgaaccttaataaccccgcggacgaggaccatgcctatgctctgcggatgctgcccaagaccggctgcgtgatccagcctgtgccaaaacccgcggagaaggctgccatggcaccgtgcatcatctcctcgcccatgctcagcgccgggcctgaggacctggagccgccgctcaaaaggaggtgcctccgaattagaaatcagaataagtaaaaggaacgttcactcacagggtacgctcatggagagagggcgcagagcaaaccatgtcacgccatccaatgacaccagctggtcagctcaccaccccctctggctaaaactcaagcaaataaagccgcttcctgtcattaagcatcttaaaagaaagcagccttccttcgatggcctctagcccagagaagcccgcgcatcttggacccaccaagcaggcccagccttcctgctgccaccatctctgcttctccccagaggaacttagagatttcacccctggcttttaaaaaaaacgaaataccgacaagccacaaggaccaatgtaggtattctccccgccccatcttcaaggctcagcgactgaggctggaagatgatatggattggaacacaaaaaatcttttttttaatctttttaaaaactgctgtggttttgctgctacactaagaattgtgatttgcattgtacggttttggacctatattgttcacgttttgatggcggagaggggtggtcctggaggcccaatgcttcagagtcatctctgtcctgcccgggatgcacttttaaatgaagagttagaatattttattggctaaaaaaaaaaaaaaaaa

SEQ ID NO: 136106 - DNA, 6519 bp, Homo sapiens
  misc_feature (1)...(6519): n = a,t,c or g
caggtggctactggctctgcattaggcagcatagccagaccttgctgatacttacagggccactgtaaggatttgcacttctcttgaggagcaatggaaggaaaacctcaaaagcgtttcgaacacggggcgttgggggacgatcagatctgagttgtggagtctgacacatgtgttcatctgtgtctccctccctgcacaggccacaccatgaggccccagccccaccagaggccccgcgctgccctggcccccggtgcaccgtgctagcccccagccagggcgtttttttnngggagggcggtgccatggccagtcacgtggacctgctgacggagctgcagctgctggagaaggtgcccacgctggagcggctgcgggctgcccagaagcgccgggcccagcagctgaagaaatgggcacagtacgagcaggacttgcagcaccgcaagcgaaagcatgagcggaagcgcagcacgggcggccgccgcaagaaagtgtccttcgaggccagcgtggccctgctggaggcctcgctgaggaacgacgccgaggaagtacgctacttcctgaagaataaggtcagccctgatttgtgcaatgaggacggactcacagccctacaccagtgctgcatcgacaactttgaggaaattgtgaagctgctcctctcccatggtgccaatgtgaacgccaaggacaacgagctgtgggacacctctccatgctgcagccacctgcggccacatcaacctgggtgaagatcctcgttcagtatgggggccgacttgcttgcttgttcaacttgggattggggaacatgccatattgaccttttgcgagggatggaacccaccctgggatgttcattcgaggaccttgcattggcataaccagggggcatcacccaagaggaaaatcaacgagatgcgggtggctcctgagcagcagatgatttgcggacatccacttcatgatcgcagcgggccaggacctggactggatagatgcccagggtgccacactgctgcacatagctggagccaatggatacctgcgggcagctgagctcctcctggaccatggagtgcgtgtggatgtgaaggactgggatggctgggagcccctgcatgcagctgccttctggggacagatgcagatggcagagctattggtgtcccatggagctaatcctcaatgcaaggacatccatggatgagatgccaatagacctgtgcgaggaggaagagttcaaggtcctgttgctggagctaaaaacacaagcatgatgtgatcatgaagtcacagctgaggcacaagtcatccttgagccggaggacctcccaccgccaggcaagcccgtgggaaaggtggtgcggcgaacccagcctgtcggaacaggacccaacctgtaataggaaggagtatgaagggaagaggccatcctgtggcagcggagtgccagctgaggatcagcggacctccacctacaacggggacatcagggagacccaggacagaccaagagaataaggaccctaaccccaggctggagaagcaccgtgctactctccgaatttcctaccaagatcccacgaggtgaactggacatgcctgttgagaatggcctccgggctccggtcagtgcctaccagtatgcgctggccaacggggatgtctggaaaggtgcatgaggtgcctgactacagcatggcctatggcaaccctggcgtggccgacgccaccccgccctggagcagctacaaggaacagagccctcagacgcttctggagctgaagcggcagcgggctgcagccaagctgctcagccaccccttccttagcacacacctgggcagcagcatggccaggacgggcgagagtagcagtgaaggcaaggcccccttgatcggaggcagaacttcaccgtacagcagcaatgggacctcggtatattacacggtcaccagcggagatcccccactcttaaagttcaaggcccccatagaggagatggaggagaaggtgcatggctgttgccgtatctcctaatctccgtgtgatggaggagggagatgcctggggaggggctcctggaatccaggccagcccaacagccctggctggggaggtgtcagggcagctggggagaggtgggctctgcttttcagaggaactcagaccccagccctcagctggctgcccatagcatcccatgtcccacgtcccgtggttctgcttcctgctgcatcgtctgccatctgacacaaggcctgtcgtggcctcctggttcactctgctgtctgatcttgggagggtgggcttgagatcccagctctattcttggtataaaggcttctccggatcagtacatgcatgtcacattaacacacacacacacacacatatacacacacacacaagctcgatcagtgtgtgtaggaatgacatacctgggctcaggggaagcaagggggcttagaatttgtggggtattcccaaaaggatggaagttaagactcagagtctcattaccactgccaatgtggttttagcaggggaggggacctgctaagctgagacccatagtcctgctcagagttatcccaaagtctgagccaccagccacacctgacaggggtgagaagtcctcgctgtgttcagagggagccaggaatctacatgggtagatgagatagacacagacctgctccccgcagccttgttgagagccacacttctgcccatgccaggagccagctgtgtgaccatccaggggtggagggggaaaaccaggcaatttcgttcctggaatcaaccaaatcatgttttcctcttggatggaagtgtcaaaggcagaagggtgtgggagggggacaaggtcagtatttaccaaagtgtatctgattttaaaaattcctttagtctgtaaaactcctagagggagggaggtaactgaattcacttctttttgtggatcgtatcaaggtcactgggttttactggctggtgctgggaaaatgaagctaagtgaggagcttccattggaatgcttttccagggagagaggccagttaatttaaaaaaaacagtcgctagttaacagcgacagagcccagcaccctggggtctttgtgaatatccagactgtttcagcccagcccatctcagccaaccctccttagactgagctgtcagagcaagcaattaggggccagcctgcctccacctcccacccccttccacctccatcagtcatgtgtgcagagtcagtgctcgggatcccgggcccagcttttgcctttttggggatgcttggtgagacagatttgccagtcagcccttttgagttcccgcctcacccaggggctcccagcctgcacttgcaggagtggtgatgccccaagtctgcgaatccagggtgcacgtggtcaatatcccctcctgcattcaggagagccatggtagggctggagttgggtcttgcccagccctgcagtttcatagtcccagccttcctggtgctggggagggaggactgtgaatggctgttctcccctcactgctgagtctcccaggaccccctttggagatgcccatggcatgggcactgcccacaggctcagccagaacctcttggtgtacccgataagctgcaggttatcccttgctctgtgcgccttttatttgtccttaaactacctccttagagctctgaaggggtctcctagttccagattttaatttggggaacagatctgggttctttttaaccctcttctttctcagtctatgagaaacttgccctgaggggcacctgggctaggggcttgggactggaagaccatccccgccttgtgccacaactttggtcatgggatctgctctttgtcattcttagccccctactgtggcccccatagccccataacccagagagggagctggacttcagggagcctgagtgatgctttcccaggagcagggcagctggctggaccagaaagtagagggcccatgggagtgactgcacccttggtggctgctggaaagggagaggttctcagcatcaggccacctccaccccaatgccaggatagatgtattcttagagtaggggtggaggcggcccagggaggctgaatgacaggtgcacagatgctttcccacgaccttgccatttggggtgggctcttcaacatcttcaggctgtggctggaacaggacaggatgatctaaaacacacgtaccattggctgtaaaacagtatgagcccagactgacgctgaaatccctcatgagccaaccttagctacaaggtagggagttctgagggaagccgcgtgctcctcaggagagagctgtttaggttttccgatctttttgctcaggggccaaacactgaaggcacgtactgcccaacccactgagcgcctgaggccattccctccttttccgcatgcctcctgcctcctgggctattcctctccacccagaaggctgggaatcccagctgattccctgacaggagccgacttcacacacaggtgactctcaggcattggctcatgttttcagccagggataaaccatcccttcttggggctttaagtccctggggagctttccctgtaggtctcctgggtgttgagagacaagttggagaccaacctccaatgaatgagccgcggtcattcattaattcactcacgtaatttactgagtagctgcaacatgccagcctctacgttaggttctgcggataaaggaggaataagacagagtcaggagaactgttccttgtggtttccgtcccttggggaccacaggcatcagcagtcccattcaagtcacctgaggcaaagtgtctgcatcttcgtccagcgaccctttgcttttcggctcctagaatccttagagtctgaattcctttagctgggaacagctgtcatggtcacccctggataacatttgccaccaagtatagatgctggatcttgggttccaggcagacatcatccaggtccatctggaactttcagtgatagctgccttcagccagcatctttgggggactctattattagcagcttgagatcagtgtctagaagactgttctgcaatttgctgccaaatggcntttcaggtttttaaagtcattgtttcttgctcatggtggctcatttattacatagtcccctcaccccactaatggataatgggaggaaaagttgctgcttccttcagcatcaaagcctttccttgggaatctgcctccctccatggcaggggtggattcgggagctgggagtaaccagggcaaagtcaaccagatgcctagctcctgctgagacccaggtcctatggcagctcctcattagattaaaggagaccacttccaaagcaggtgctgcatggctcaccatcatatgccccaaacaactgaaagttgggcggttatcaccagactgttgagtttctgggcaagttagcttggggggaagctgaattaaacttttagggcccagggttactaaagacttcaggatagaattctccatcaaatatacagcataagtaaaactgctctgcactgtttaatccatttccaaggggcttagaaaagctaacaagggtgtgtcccctgtcctgccccaccggtttgctggctttgtaataacataacaccattgtggttgttggtgtcaaaaaaaccttccccaccctgagctctcctaaccctacctgctctctctccctagagcaggaatactggggtaacttttaaaaaagggtgcctcccttttaaaaatgccccagaaaaagctgtatttaactcttgcctatttgttaacttggggggatgggtctccccctggccccggggcacattaaggaggcaaaggctcccaatgggtcagtgggatggactctggccaaaagtggaccccctgtggccagaagctatagccctctcccccaacaggtctctcttgttgggccagagggccttggcttccccatggggcattgcaagtgcccacccgtgcgggggccctggctcctgcacaccccaggaaaagtcttgcaggacccccccagcccctccggcaataattccaccccagacccagaagcccactgggtgtaccagagaacacttaaaaaaaatgtattttatgtgaaaaaaaaattaaaactctgtatacctgtatccagcagctttgtgtaaaaatggcaatcaagagagtcgtaatatatttaaaactttttttaaaaaaaatcttcgcagatctttgatatcgtactgaggtaacttccacgtagccccttgccactgcggcaccggtgggccttgggtccaaaatctgtggctcagccacatcccaaagggggcacatgtccctggagttgcttccagcttgccaagggcctgtgacagaattcgctgttaagagtttttagattagaattattaaattccttttaataaccaaaaaaaaaaaaaaaaatgggggg

SEQ ID NO: 136107 - DNA, 306 bp, Homo sapiens
atccaaagaggccttcgccatcggcttgggaggcggcagtgcctctgggaagaccactgtggccagaatgatcatcgaggccctggatgtgccctgggtggtcttgctgtccatggactccttctacaagatgcctttgacttcgacctcatcatttccaccctcaagaagctgaagcaggggaagagtgtcaaggcgcccatttatgacttcaccacgctcagccggaagatggactggaaaacactgtatggtgcaaacgtcatcatctttgagggcatcatggcctttgctgacaagacactg

SEQ ID NO: 136108 - DNA, 573 bp, Homo sapiens
tgaacacggcacgcaatccaaagaggccttcgccatcggtgagagcagcgggggggtgggacctgctgccggacgcctgcctccggctcccctccagtgcctgtggagcaggagaaggaagccgggcaaccgcaggcagcggcagcgggatgggcacctctgggacctatctgtgccggcagcctgcctgttcctcacagagggtctccactcccgccggcaggcttgggagggcggcagtgcctctgggaagaccactgtggccagaatgatcatcgaggccctggatgtgccctgggtggtcttgctgtccatggactccttctacaaggtgggcccccgcccagctcccccgaggacccctttgtcctctccctgaccctggaccccctgcaaaagtaggtccctggtctcagccccagcgtggctgctcctgggaggcctagagcccctgtccgctggcattgggtgagggccctactgtgcccacagctgctccacagcctcccccaccaggtgctgactgagcagcagcaggaacaggccgcacacaacaacttcaacttcgaccac

SEQ ID NO: 136109 - DNA, 1380 bp, Homo sapiens
gcagcggggcgggacgggacagccaagagacactgagccagctttgccccccacccccctctcttgaggggccgcgcaccacctcggggaggagccagggcggggcctgaccccacaaagctttagttcccccggggagaggctggggacaagctacccattctggggtatgacacctatcagcacgtgtgagcccgccctgtgcccggcccacttctgcttcctcttagcgcaggaggggtcccgcactgggaggggccctcacagcctaccccgctagctttctgcctgatggtgagcttgccccgttgttcgccgccatctttcgcctttgcctgacagctcaggtagggcgacgtctccccccagctcagccccaggcagaagtcaggcccgctctgcacctcgtgctgtgcctggcccgtgtgttcccctcacagtgacgcacagccgtcctgtggggagggagggctctgggaaaagacccccttcttgagtgttccccatcggtttgtccccagggctgcgctggcctcggcacaccagtgccacccgctgccccggacgctgagcgtcctgaagagcacgccgcaggtacggggcatgcacaccatcatcagggacaaggagaccagtcgcgacgagttcatcttctactccaagagactgatgcggctgctcatcgagcacgcgctctccttcctgccctttcaggactgcgtcgtacagaccccgcaggggcaggactatgcggatcaccggtgtgtccattctgcgcgccggtgaaaccatggagcccgcgctgcgcgctgtgtgcaaagacgtgcgcatcggcaccatcctcatccagaccaaccagcttaccggggagcccgagctccactacctgaggctgcccaaggacatcagcgatgaccacgtgatcctcatggactgcaccgtgtccacgggcgcggcggccatgatggcagtgcgcgtgctcctggaccacgacgtgcctgaggacaagatctttttgcttgtcgctgctcatggcagagatgggcgtgcacttcagtggcctatgcatttccgcgagttaagaaatcatcaccacggcggtgggacaaagcgggtcaattgacctttttccgcatcatcccaggcattgggaactttggcgaccgctactttgggacagacgcggtccccgatggcagtgacgaggaggaagtggcctacacgggttagctgcccaagtgagccatcccgtccccaccaccctcctcctgcctcctgacccaggactgctgaatacaaagatgttaatttttaaaatgttactagtataatttattctatgcattttataaaataaataaagctttagaaaaatgaaaa

SEQ ID NO: 136110 - DNA, 2747 bp, Homo sapiens
cctgcctcagcctccctagtaggtgggataacaggcacccaccaccgcacccaggtaatttttttttttaatttttagtagagacgggtcttcaccatgttggccaggctggtctcaaactcctgacctcaaatgatccacctgcctcggcctcccaaagtactgggattacaggcatgagccaccacgcccagcccaggcagagttcttatgtacccccaatgagcctgcccgcctcagccatgcctgttgagggggtggggggggatgccctgtgggccggccatgccagcgggtacctgggaggtggccagctctgggccacatccgagtacatccctctctgcagcagcaatgcagagtccctggacaggctcctgccacctgtgggcactgggcgctctccccggaagcggaccaccagacagtgcaagtcagagcctcccctgctgcgtacaagcaagcgtaccatctacaccgccgggcggccgccctggtacaatgaacacggcacgcaatccaaagaggccttcgccatcgtgcctgtggagcaggagaaggaagccgggcaaccgcaggcagcggcagcgggatgggcacctctgggacctatctgtgccggcagcctgcctgttcctcacagagggtctccactcccgccggcaggcttgggaggcggcagtgcctctgggaagaccactgtggccagaatgatcatcgaggccctggatgtgccctggggtgggtctagcctgtccatggactccttctacaaggtgctgactgagcagcagcaggaacaggccgcacacaacaactgcaacttcgaccacccagatgcctttgacttcgacctcatcatttccaccctcaagaagctgaagcatgggaagagtgtcaaggtgcccatttatgacttcaccacgcacagccggaagaaggactggaaaacactgtatggtgcaaacgtcatcatctttgagggcatcatggcctttgctgacaagacactgttggagggcccaggtcctgccccttgtacaggcccagaggactccatcatccggcacatagcagcccccagcctccacaaggcctcttcacgggccaactactgtgtgctgagcatggggacagaccctaaactcgccacgtcccccattccccagtgtgttggtgcaagttaccccaagcaaaggtgccctggggaagtggctctggccaggcccacggaccaggcggcctcagtgcaggggctggtcccagtgtctccatgcccactgctggcatctggccactcactggcccgctgtctccaccagctcctggacatgaagatctttgtggacacagactccgacatccgcctggtacggcggctgcgccgggacatcagtgagcgcggccgggacatcgagggtgtcatcaagcagtacaacaagtttgtcaagccctccttcgaccagtacatccagcccaccatgcgcctggcagacatcgtggtccccagagggagcggcaacacggtgggccatcgaccttgattgttgcagcacgtgcacagccagctggaggaggtgagcggggtcccacgtccccacggcctagcccccagcccctctacccacttctccgctgccaccacccccagctggcctgtacacctcatccccctgcgttcactgtcccctgccagctctgtcctcgcagcccgcacagctctgccagcaggaactgggcaactgcagcaagaagcttgggctgggccggggccgcatcccactgtccctccccaagggcaggcatgcagggggggctgcgctggcctcggcacaccagtgccacccgctgccccggacgctgagcgtcctgaagagcacgctcgcaggtacggggcatgcacaccatcatcagggacaaggagaccagtcgcgacgagttcatcttctactccaagagactgatgcggctgctcatcgagcacgcgctctccttcctgccctttcaggactgcgtcgtacagaccccgcaggggcaggactatgcgggcaagtgctatgcggggaagcagatcaccggtgtgtccattctgcgcgccggtgaaaccatggagcccgcgctgcgcgctgtgtgcaaagacgtgcgcatcggcaccatcctcatccagaccaaccagcttaccggggaggcccgagctccactacctgaggctgcccaaggacattcagcgatgaccacgtgatcctcatggacttgcaccgtgttccacgggcgcggcggccatgatggcagtgcgcgtgctcctggaccacgacgtgcctgaggacaagatctttttgctgtcgctgctcatggcaaagatgggcgtgcactcagtggcctaagcatttccgcgagtgagaatcatcaccacggcggtggacaagcgggtcaatgaccttttccgcatcatcccaggcattgggaactttggcgaccgctactttgggacagacgcggtccccgatggcagtgacgaggaggaagtggcctacacgggtcctgcccaccctgctttccgagcaggccccccccgggctccccgagaggagtcgccgccgtggtttactgaggaagaggaggcgccagtgtctttctgcgtggaagtccacggccaaaagcgtggcgtcctcggagcctggcacctcgattatgccggatcccggatcctggacaggggtctgctgacgaagggagggacggcgtaa

SEQ ID NO: 136111 - DNA, 488 bp, Homo sapiens
tttaagtgtgatggtaaaattatactaaaaatgcatttgtcaggacttgaaagacagtgagatgattcaagctcagaggaagagcggagagtcactacccgagttattcgccggcgtttgattataaagggagaggaagcaaaaaacattcctggtgaatctgtcacagaagaacaatttactgatgaagaaggcaacctcatcaccagaaaaatcactcggaaagtattaagacgaattgttatcccacaagagagaaaacgtgatgatgtgcagggagaaggttttaaggtgaaaacgaagaaagaaatccggcatgtggaaaagaagagccactcgtaacagcgaacggtcagtcaaggatcataagtttttactgccagtattgagaaattcgtggaagaaatgtcagcaggaagtaaaaattcaccgagaagtgtgtgtgtgttcgctgcttccacacattaatggcatgattttttttatgc

SEQ ID NO: 136112 - DNA, 1089 bp, Homo sapiens
atgaatgacttgtgtcaggcatatgccccccctgctggtgacactttttctcaatccagtgacccatacccaagagagagaaaaactttctggaagaagggaggctacaccaaatggagagaggaagtctggggcctggggaaggctctggggcaggttatggtcattctacacacagagtacaaagtaatcttaaatgtcaacactgaagtataccgcgttatcacggcgatgaacagacgttctccgaacgctattacactagcgcgttcttgtcatactataacacgagaagtcgtcttcttcgtgagaacaagacagcactctttgtttatagaagatgcggccgccgctctgctcatggaaatgtggaaagcacaaggcttgttggagagcaaggggactaccagaggatgtagagttgagtgccacattgtgagtggccagtcagtgattaggatgagcaccatagcccgtggccacaggaaggatggccacttcagcagcatgactgtgtgctctttgctcatgaggtattggaacatccataccccaattactaaggactctttggctaagaaggaggttgtgcaactggaatggaccagtggagctgacactttcaaaagggaagcttttgatgtgggcttactctctacatctgcaggtgaagatgcaatgaccggggacacagacaaatatcttgggccacaggaccttaaggaattgggtgatgattccctgcctgcagagggttacatgggctttagtctcggagcgcgttctgccagttcggataggtcttacaccttgaacagaagctcctatgcacgggacagcatgatgattgaagaactccttgtgccatccaaagagcaggctgcagctgccatagataatgattcctctgatggatgtgggcaaagtaaattgaatgccttctggaaaggattcaccattctagatgccattaagaacattcatgattcatgggaggtcaaaatagcagcattaacagaagtttggaagaaggtgactccagtcctcatggatgactatgaggattcaagacttcagtggaggaagtaa

SEQ ID NO: 136113 - DNA, 501 bp, Homo sapiens
atggacatagcgacaactctgctggaatatggtgctgatgccaacgcagttacccggcaaggaattgcttccgtccatctcgcagctcaggaagggcacgtggacatggtgtcgctgctcctcggtagaaatgcgaatgtgaacctgagcaataagataggagaagttgttggcaattttgaaggaacttgtgaagactgttccctaaactcttcaaacacccatgctgtcatctttgatatgctcattattcatgaagaaaagactagagttttgtcaagcaaagtgaaagttcagccgacaattaaccagaaacttgttaatgaagttactgcctctccctctgatgccttaacttcggtcttgacaaaaattaatcgaatagatatagtgacactgctagaaggaccaatatttgattatggaaatatttcaggcaccagaagttttgcagatgagaacaatgttttccatgaccctgttgatggtaatcgaatttag

SEQ ID NO: 136114 - DNA, 3397 bp, Homo sapiens
ggagctcttctcactcaagcccgagtttctatgttcagacatagtacattcatcactgtgtccttccaggatttggaagtctgacaaaacaccattccagtagctgcatctccaggttttgagtctagaaatgaatttaagatgtgatctcttggataagaaagctaaccccaatgccaaagccctgaatggctttacccctcttcatattgcctgcaagaagaatcgaattaaagtaatggaactccttctgaaacacggtgcatccatccaagctgtaaccgagtcgggccttaccccaatccatgttgctgccttcatggggcatgtaaatattgtatcacaactaatgcatcatggagcctcaccaaacaccaccaatgtgagaggagaaacagcactgcacatggcagctcgctccggccaagctgaagttgtgcggtatctggtacaagacggagctcaggtagaagctaaagctaaggatgaccaaacaccactccacatttcagcccgactggggaaagcagacatagtacaacagctgttgcagcaaggggcatctccaaatgcagccacaacttctgggtacaccccacttcacctttccgcccgagaggggcatgaggatgtggccgcgttccttttggatcatggagcgtctttatctataacaacaaagaaaggatttactcctcttcatgtggcagcaaaatatggaaagcttgaagtcgccaatctcctgctacagaaaagtgcatctccagatgctgctgggaagagcgggctaacaccactgcatgtagctgcacattacgataatcagaaagtggcccttctgcttttggaccaaggagcctcacctcacgcagccgcaaagaatggttatacgccactgcacatcgctgccaaaaagaaccagatggacatagcgacaactctgctggaatatggtgctgatgccaacgcagttacccggcaaggaattgcttccgtccatctcgcagctcaggaagggcacgtggacatggtgtcgctgctcctcggtagaaatgcgaatgtgaacctgagcaataagagcggcctgaccccactccatttggctgctcaagaagatcgagtgaatgtggcagaagtcctcgtaaaccaaggggctcatgtggacgcccagacaaagatgggatacacaccactgcatgtgggctgccactatggaaatatcaagattgttaatttcctgctccagcattctgcaaaagttaatgccaaaacaaagaatgggtatacgccattacatcaagcagcacagcaggggcatacgcatataataaatgtcttacttcagaacaacgcctcccccaatgaactcactgtgaatgggaatactgcccttggcattgcccggcggctcggctacatctcagtagtggacaccctgaagatagtgaccgaagaaaccatgaccacaactactgtcacagagaagcacaaaatgaatgttccagaaacgatgaatgaagttcttgatatgtctgatgatgaaggtgaagatgcaatgaccggggacacagacaaatatcttgggccacaggaccttaaggaattgggtgatgattccctgcctgcagagggttacatgggctttagtctcggagcgcgttctgccagcgataggtcttacaccttgaacagaagctcctatgcacgggacagcatgatgattgaagaactccttgtgccatccaaagagcagcatctaacattcacaagggaatttgattcagattctcttagacattacagctgggctgcagacaccttagacaatgtcaatcttgtttcaagccccattcattctgggtttctggttagctttatggtggacgcgagagggggctccatgagaggaagccgtcatcacgggatgagaatcatcattcctccacgcaagtgtacggcccccactcgaatcacctgccgtttggtaaagagacataaactggccaacccacccccacatggtgaaaggagagggattagcagtaggctggtagaaatgggtcctgcaggggcacaatttttaggccctgtcatagtggaaatccctcactttgggtccatgagaggaaaagagagagaactcattgttcttcgaagtgaaaatggtgaaacttggaaggagcatcagtttgacagcaaaaatgaagatttaaccgagttacttaatggcatggatgaagaacttgatagcccagaagagttagggaaaaagcgtatctgcaggattatcacgaaagatttcccccagtattttgcagtggtttcccggattaagcaggaaagcaaccagattggtcctgaaggtggaattctgagcagcaccacagtgccccttgttcaagcatctttcccagagggtgccctaactaaaagaattcgagtgggcctccaggcccagcctgttccagatgaaattgtgaaaaagatccttggaaacaaagcaacttttagcccaattgtcactgtggaaccaagaagacggaaattccataaaccaatcacaatgaccattccggtgcccccgccctcaggagaaggtgtatccaatggatacaaaggggacactacacccaatctgcgtcttctctgtagcattacagggggcacttcgcctgctcagtgggaagacatcacaggaacaactcctttgacgtttataaaagattgtgtctcctttacaaccaatgtttcagccagattttggcttgcagactgccatcaagttttagaaactgtggggttagccacgcaactgtacagagaattgatatgtgttccatatatggccaagtttgttgtttttgccaaaatgaatgatcccgtagaatcttccttgcgatgtttctgcatgacagatgacaaagtggacaaaactttagagcaacaagagaattttgaggaagtcgcaagaagcaaagatattgaggttctggaaggaaaacctatttatgttgattgttatggaaatttggccccacttaccaaaggaggacagcaacttgtttttaacttttattctttcaaagaaaatagactgccattttccatcaagattagagacaccagccaagagccctgtggtcgtctgtcttttctgaaagaaccaaagacaacaaaaggactgcctcaaacagcggtttgcaacttaaatatcactctgccagcacataaaaagattgagaaaacagatagacgacagagcttcgcatccttagctttacgtaagcgctacagctacttgactgagcctggaatgagtgagtttcctgacacgtccactaatccgggtcaatgttttaggagaagagacattttttctatgcgctctaaattatga

SEQ ID NO: 136115 - DNA, 1656 bp, Homo sapiens
atgaaagaggacctaatgcggatgaccgcaatactacagacagatgtgcctgaggagaagccattccaacctgaactcccaaaggaagggagaatagatgatgaagaacctttcaaaattgtagagaaagtaaaggaagacttagtgaaagttagtgaaatccttaaaaaggatgtatgtgtagataataaaggatcacccaaatcaccaaagagtgacaaaggacactctcctgaagatgactggatagaatttagttcggaagaaatccgggaagccagacaacaagctgctgcgagccagtctccatctctgccagagagagtgcaagtaaaagcaaaagccgcctccgaaaaggattataacttgaccaaagttattgattacctaacaaatgatattgggagtagttcactgacaaacttaaaatacaagtttgaggatgcaaagaaggatggtgaggagagacagaaaagagttttaaaaccagcaattgctttgcaggaacacaaactcaaaatgcctccagcctccatgaggacttccacctctgagaaagaattgtgtaaaatggctgattccttttttggaacagatactattttagagtctcctgatgacttttctcaacacgaccaagataaaagtcccttgtctgacagtggctttgaaacaagaagtgaaaagacaccttcagccccacaaagcgctgaaagcactggtcctaaaccactttttcatgaagttcccatccctcctgtcattacagaaacaagaactgaagtggttcatgttatcaggagctatgatccctcagctggggatgttccccagacccaaccagaggagcctgtgtcacctaaaccttcacctacttttatggaattggaaccaaagcccaccacctctagtattaaagaaaaggttaaagcatttcaaatgaaagccagtagtgaagaagatgaccacaatcgggttttaagcaaaggcatgcgtgttaaagaagagactcacataaccacaaccaccagaatggtttatcattctccaccaggcggtgaaggtgcatctgaaagaattgaagaaaccatgtcagtccatgacatcatgaaggcctttcagtccgggcgggatccttccaaagaactggcaggtctgtttgaacataagtcggcagtgtctccagatgttcacaagtctgctgctgaaacctcagcccagcatgcagagaaggacaaccaaatgaaacccaaactggagcgtataatagaagtccacatcgaaaaaggtaaccaagctgagcccactgaagtcattattagagaaaccaaaaagcatccagaaaaagaaatgtttctggttagctttatggtggacgcgagagggggctccatgagaggaagccgtcatcacgggatgagaatcatcattcctccacgcaagtgtacggcccccactcgaatcacctgccgtttggtaaagagacataaactggccaacccaccccccatggtggaaggagagggattagccagtaggctggtagaaatgggtcctgcaggggcacaatttttagggatctttgtaaaccagattgttgatcttatcacgtttgtgtttaaaaccttcagtggcttctcagtgcaaacaggataa

SEQ ID NO: 136116 - DNA, 1852 bp, Homo sapiens
atggactccaacacaagagaaaacaaagggaattttcatggttatgatgaaggaagacccaagagcacatctgtgtgcagtggacctacaaggaatatgacaagttatccttcccttcaagtggaactggaaacccccacagggttgcactacacaccacctacccctttccagcaagatgattattttagtgatatctctagcatagaatctccccttagaacccctagtagactgagtgatgggctagtgccttcccaggggaacatagagcattccgcagatggacctccagtcgtaactgcagaagacgcttccttagaagacagcaaactggaagactcagtgcctttaacagaaatgcctgaagccagggatgtagatgagagccagttggagaatgtatgtctgaagcctagaaaactaggagtaagctctgagcagcaggagaaaggaaaatctggtcctgatgaggagatgatggaagagaaactcaaatctctatttgaggacattcaacttgaagaaggagtagagtctgaggagatgacagaagaaaaagtacaggctattcttaagcgtgttcagcaagcagaactggaaatgtcttcaattacaggttggcagaatgagacatcaagtggaaacctagagtcctgcgctcaagctcgaagagtaactggtgggttactagatcgactggatgacagccatttcagcactagagagtgccctaagccccggaatgctgcaactcttacagactccttgatacacagctttggtagattttgggaaaataagggagaattccctgggttaccagaacttgatagcccagaagagttagggaaaaagcgtatctgcaggattatcacgaaagatttcccccagtattttgcagtggtttcccggattaagcaggaaagcaaccagattggtcctgaaggtggaattctgagcagcaccacagtgccccttgttcaagcatctttcccagagggtgccctaactaaaagaattcgagtgggcctccaggcccagcctgttccagatgaaattgtgaaaaagatccttggaaacaaagcaacttttagcccaattgtcactgtggaaccaagaagacggaaattccataaaccaatcacaatgaccattccggtgcccccgccctcaggagaagactgccatcaagttttagaaactgtggggttagccacgcaactgtacagagaattgatatgtgttccatatatggccaagtttgttgtttttgccaaaatgaatgatcccgtagaatcttccttgcgatgtttctgcatgacagatgacaaagtggacaaaactttagagcaacaagagaattttgaggaagtcgcaagaagcaaagatattgaggttctggaaggaaaacctatttatgttgattgttatggaaatttggccccacttaccaaaggaggacagcaacttgtttttaacttttattctttcaaagaaaatagactgccattttccatcaagattagagacaccagccaagagccctgtggtcgtctgtcttttctgaaagaaccaaagacaacaaaaggactgcctcaaacagcggtttgcaacttaaatatcactctgccagcacataaaaagtcaccaaatggacacattcttttccgtgtggcaagggagggccgtatacctttgtctggggcgtccacatgagccccttggtttacgaggacttctgccacattcactcgatcttcttgagcagccaaatggagtggggtcaggccgctctgcaaaagattcaaagggcacagtcatcgtacaggaaggaatgtcacacacatag

SEQ ID NO: 136117 - DNA, 15187 bp, Homo sapiens
  misc_feature (1)...(15187): n = a,t,c or g
gggacaccatcatttgggtttttaaaagcttcagcttctccagcatctttgcattgtgaatatcttcctgcttctagtcaaagctttctctctagtgattggaatgctgctgtaagcctattagaggtgcctgaggatatcaccttttacaaggaagccgtgtgtgcttgagaggatctttttaaatgcattatggctcatgcagcctcacaattaaagaaaaacagggatttagaaatcaatgctgaagaagagcctgagaaaaaaaggaaacaccgcaaacggtcccgggatcggaagaaaaagtctgatgccaatgcaagttacttaagagcagctcgagctggacaccttgaaaaggccctcgactacataaaaaatggagttgacatcaacatttgcaatcagaatgggttgaacgctctccaccttgcttccaaagaaggccatgtagaggttgtttctgagctgctgcagagagaagccaatgtggatgcagctacaaagaaaggaaacacagcattgcacatcgcatctttggctgggcaagcagaggtggtaaaagtcttggttacaaatggagccaatgtcaatgcacaatctcagaatggtttcacgccattgtatatggcagcccaggaaaatcacctggaagttgtcaagtttcttcttgacaatggtgcaagccagagcctagccacagaggatggcttcacaccattggcagtggctttgcaacaaggtcacgaccaagtcgtttcgctcctgctagagaatgacaccaaaggaaaagtgcgtctcccagctcttcatatcgcggcccgcaaagacgacacaaaagccgccgccctgctgctgcagaatgacaacaatgcagatgtggaatcaaagagtggcttcactccgctccacatagctgctcactatggaaatatcaatgtagccacgttgctgttaaaccgagcggctgctgtggatttcaccgcaaggaatgacatcactcctttacatgttgcatcaaaaagaggaaatgcaaatatggtaaaactattgctcgatcgaggagctaaaatcgatgccaaaaccagggatggtctgacaccactgcactgtggagcaaggagtggccacgagcaggtggtagaaatgttgcttgatcgagctgcccccattctttcaaaaaccaagaatggattatctccattgcacatggccacacaaggggatcatttaaactgcgtccagcttctcctccagcataatgtacccgtggatgatgtcaccaatgactacctgactgccctacacgtggctgcccactgtggccattacaaagttgccaaggttctcttggataagaaagctaaccccaatgccaaagccctgaatggctttacccctcttcatatcgcctgcaagaagaatcgaattaaagtaatggaactccttctgaaacacggtgcatcccatccaagctgtaaaccgaggtcgggggcctttacccccaatcccatgttgctgccttcaatggggtatgtaaatattgtatcacaactaatgcatcatggagcctcaccaaacaccaccaatgtgagaggagaaacagcactgcacatggcagctcgctccggccaagctgaagttgtgcggtatctggtacaagacggagctcaggtagaagctaaagctaaggatgaccaaacaccactccacatttcagcccgactggggaaagcagacatagtacaacagctgttgcagcaaggggcatctccaaatgcagccacaacttctgggtacaccccacttcacctttccgcccgagaggggcatgaggatgtggccgcgttccttttggatcatggagcgtctttatctataacaacaaagaaaggatttactcctcttcatgtggcagcaaaatatggaaagcttgaagtcgccaatctcctgctacagaaaagtgcatctccagatgctgctgggaagagcgggctaacaccactgcatgtagctgcacattacgataatcagaaagtggcccttctgcttttggaccaaggagcctcacctcacgcagccgcaaagaatggttatacgccactgcacatcgctgccaaaaagaaccagatggacatagcgacaactctgctggaatatggtgctgatgccaacgcagttacccggcaaggaattgcttccgtccatctcgcagctcaggaagggcacgtggacatggtgtcgctgctcctcggtagaaatgcgaatgtgaacctgagcaataagagcggcctgaccccactccatttggctgctcaagaagatcgagtgaatgtggcagaagtcctcgtaaaccaaggggctcatgtggacgcccagacaaagatgggatacacaccactgcatgtgggctgccactatggaaatatcaagattgttaatttcctgctccagcattctgcaaaagttaatgccaaaacaaagaatgggtatacgccattacatcaagcagcacagcaggggcatacgcatataataaatgtcttacttcagaacaacgcctcccccaatgaactcactgtgaatgggaatactgcccttggcattgcccggcgcctcggctacatctcagtagtggacaccctgaagatagtgaccgaagaaaccatgaccacaactactgtcacagagaagcacaaaatgaatgttccagaaacgatgaatgaagttcttgatatgtctgatgatgaagttcgtaaagccaatgcccctgaaatgctcagtgatggcgaatatatctcagatgttgaagaaggtgaagatgcaatgaccggggacacagacaaatatcttgggccacaggaccttaaggaattgggtgatgattccctgcctgcagagggttacatgggctttagtctcggagcgcgttctgccagcctccgctccttcagttcggataggtcttacaccttgaacagaagctcctatgcacgggacagcatgatgattgaagaactccttgtgccatccaaagagcagcatctaacattcacaagggaatttgattcagattctcttagacattacagctgggctgcagacaccttagacaatgtcaatcttgtttcaagccccattcattctgggtttctggttagctttatggtggacgcgagagggggctccatgagaggaagccgtcatcacgggatgagaatcatcattcctccacgcaagtgtacggcccccactcgaatcacctgccgtttggtaaagagacataaactggccaacccacccccacatggtgaaaggagagggattagcagtaggctggtagaaatgggtcctgcaggggcacaatttttaggccctgtcatagtggaaatccctcactttgggtccatgagaggaaaagagagagaactcattgttcttcgaagtgaaaatggtgaaacttggaaggagcatcagtttgacagcaaaaatgaagatttaaccgagttacttaatggcatggatgaagaacttgatagcccagaagagttagggaaaaagcgtatctgcaggattatcacgaaagatttcccccagtattttgcagtggtttcccggattaagcaggaaagcaaccagattggtcctgaaggtggaattctgagcagcaccacagtgccccttgttcaagcatctttcccagagggtgccctaactaaaagaattcgagtgggcctccaggcccagcctgttccagatgaaattgtgaaaaagatccttggaaacaaagcaacttttagcccaattgtcactgtggaaccaagaagacggaaattccataaaccaatcacaatgaccattccggtgcccccgccctcaggagaaggtgtatccaatggatacaaaggggacactacacccaatctgcgtcttctctgtagcattacagggggcacttcgcctgctcagtgggaagacatcacaggaacaactcctttggacgtttataaaagattgtggtctcctttacaaccaatgtttcagccagattttggcttggcagactgccatcaagttttagaaactgtggggttagccacgcaactgtacagagaattgatatgtgttccatatatggccaagtttgttgtttttgccaaaatgaatgatcccgtagaatcttccttgcgatgtttctgcatgacagatgacaaagtggacaaaactttagagcaacaagagaattttgaggaagtcgcaagaagcaaagatattgaggttctggaaggaaaacctatttatgttgattgttatggaaatttggccccacttaccaaaggaggacagcaacttgtttttaacttttattctttcaaagaaaatagactgccattttccatcaagattagagacaccagccaagagccctgtggtcgtctgtcttttctgaaagaacgaaagacaacaaaaggactgcctcaaacagcggtttgcaacttaaatatcactctgccagcacataaaaaggagacagagtcagatcaagatgatgagattgagaaaacagatagacgacagagcttcgcatccttagctttacgtaagcgctacagctacttgactgagcctggaatgattgaacggagtacaggagcaacaagatccctccccaccacttactcatacaagccattcttttctacaagaccataccagtcctggacaacagctccgattacagtgcctgggccagccaagtcaggcttcacttccttatcaagttcttcctctaatacgccatcagcttctccgttaaaatcaatatggtctgtttcgacaccttctccaatcaaatccacattaggcgcgtcaactacatcttcagttaaatccattagtgacgtggcatctccaattagatccttacggacaatgtcttcgccgataaaaactgtggtgtcacaatctccatacaatatccaggtttcctctggtaccctggctagagctccagcagtcacggaagctacgcccttaaaagggctggcatccaattctacgttttcctctcgaacctctccagtgactacagcagggtctcttttggagaggtcatcaattactatgacaccccctgcctcccccaaatcaaacattaatatgtattcctcaagtttgccatttaagtcaattattacatcagcagcaccgctaatatcttcacctttaaagtcagtggtgtctccagttaaatcacgagttgatgtcatttcatcagccaaaattacaatggcatcttctctctcatcacctgtgaagcagatgcctggacatgcagaggtagcattagtcaatggatctatttcccctctaaaatatgcatcatcctcaactttaattaatggatgcaaagccactgccacgttacaggaaaaaatttcttctgctacaaactctgtgagctctgtggtcagtgcagccactgacacagttgagaaagtgttttctaccacgactgcaatgccattttccccactcaggtcatatgtttctgcagcaccatcagcttttcagtctctaagaactccttccgcaagtgcactctatacatcccttgggtcgtcaatatctgcaactacctcatctgtaacttcatcaattataacagtgccagtatactctgtagtcaatgttttgccagaaccagcattaaagaaacttccagactctaattcatttacaaaatcagcagcagccttgctgtcacccattaaaacattgactacggagacacatcctcagcctcacttcagtcgaacttcatctccagttaagtcatctttgttccttgcaccctctgcccttaagttgtctacaccatcttctttatcttccagtcaggagatactaaaagatgtagctgaaatgaaagaggacctaatgcggatgaccgcaatactacagacagatgtgcctgaggagaagccattccaacctgaactcccaaaggaagggagaatagatgatgaagaacctttcaaaattgtagagaaagtaaaggaagacttagtgaaagttagtgaaatccttaaaaaggatgtatgtgtagataataaaggatcacccaaatcaccaaagagtgacaaaggacactctcctgaagatgactggatagaatttagttcggaagaaatccgggaagccagacaacaagctgctgcgagccagtctccatctctgccagagagagtgcaagtaaaagcaaaagccgcctccgaaaaggattataacttgaccaaagttattgattacctaacaaatgatattgggagtagttcactgacaaacttaaaatacaagtttgaggatgcaaagaaggatggtgagggaggacagaaaagagttttaaaaccagcaattgctttgcaggaacacaaactcaaaatgcctccagcctccatgaggacttccacctctgagaaagaattgtgtaaaatggctgattccttttttggaacagatactattttagagtctcctgatgacttttctcaacacgaccaagataaaagtcccttgtctgacagtggctttgaaacaagaagtgaaaagacaccttcagccccacaaagcgctgaaacgactggtcctaaaccactttttcatgaagttcccatccctcctgttattacagaaacaagaactgaagtggttcatgttatcaggagctatgatccctcagctggggatgttccccagacccaaccagaggagcctgtgtcacctaaaccttcacctacttttatggaattggaaccaaagcccaccacctctagtattaaagaaaaggttaaagcatttcaaatgaaagccagtagtgaagaagatgaccacaatcgggttttaagcaaaggcatgcgtgttaaagaagagactcacataaccacaaccaccagaatggtttatcattctccaccaggcggtgaaggtgcatctgaaagaattgaagaaaccatgtcagtccatgacatcatgaaggcctttcagtccgggcgggatccttccaaagaactggcaggtctgtttgaacataagtcggcagtgtctccagatgttcacaagtctgctgctgaaacctcagcccagcatgcagagaaggacaaccaaatgaaacccaaactggagcgtataatagaagtccacatcgaaaaaggtaaccaagctgagcccactgaagtcattattagagaaaccaaaaagcatccagaaaaagaaatgtatgtatatcagaaagacttatcccggggagatattaacctaaaagattttctgccagaaaaacacgatgcttttccttgttcagaggaacagggtcagcaagaagaagaagaacttactgctgaagagtcattgccttcttatctggagtcttccagagtaaacactcctgtgtcccaagaagaagatagccgccctagttctgctcaactcatatctgatgactcttataaaacattgaagcttttgagtcaacactcaatagaataccatgacgatgagttgtcagaactaagaggggagtcttacaggtttgctgagaaaatgcttctgtcagaaaagctagatgtgtctcattctgatactgaggaatcggttacagaccatgcaggaccccctagctcagagttacaggggtctgataagcggtccagagaaaaaatagccactgcccccaaaaaagaaattctctccaaaatctataaagatgtttctgaaaatggtgtaggtaaagtgtctaaagatgagcattttgataaagtgacagtgttgcactattctggcaatgttagtagtccaaaacatgccatgtggatgcgctttactgaggacagattagacagaggtagagagaagttgatatatgaagatagggtggacaggactgtgaaggaggctgaagaaaaactgactgaagtgtcacagttttttcgtgacaaaactgaaaagctaaatgatgaactgcagtccccagagaaaaaggcacgccctaaaaatggcaaagaatattcttctcaaagccctaccagtagcagccctgagaaagtgctactgacagaactgctggcatccaatgatgagtgggttaaggcaagacagcatggccctgatggacaaggcttccccaaggccgaggagaaggcacccagtctgcccagcagcccagagaagatggttctctcccaacagactgaggacagcaagtccacagtggaagccaaaggaagtatttcacagagcaaagcaccagatgggccccagtctggattccagctcaaacaatctaaactcagttccattagattaaaatttgaacaaggcacacacgcaaaaagtaaggacatgtctcaagaagacagaaagtcagatggccagtccagaatcccagttaaaaaaatacaggagagcaagctacccgtctaccaagtttttgctagagaaaaacagcagaaggccatagacctcccagatgaaagtgtatctgtgcaaaaagattttatggtattaaaaaccaaagatgagcatgcccaaagcaacgaaattgttgtaaatgattctggctctgataatgtgaaaaaacagagaactgaaatgtcaagtaaagcaatgcctgactctttttctgagcagcaggctaaagacttggcatgtcatataacctcagatttagcaactaggggaccatgggacaaaaaggtctttagaacatgggagagttcgggagccactaacaataagtctcagaaagaaaaactttcgcatgtacttgttcatgatgtaagagagaatcacattggtcaccctgagagtaaaagtgttgatcaaaagaatgaatttatgtctgtgactgagagagaacgcaaattgttaacaaacggctctctctcagaaattaaagaaatgactgtaaaatctccctccaaaaaagtcttatatagggaatatgttgtgaaagaaggggaccatccaggcggattgcttgatcagccttccaggaggagcgagagctcagcagtgtcacacattcccgtcagagttgctgatgagaggagaatgctgtcttctaatattcccgatggtttttgtgaacagtcggcatttccaaaacatgaactatcacaaaaattgtcccagtcaagcatgagtaaagagacagttgagactacagcactttaattctatagaagatgaaaaagttacctattcagaaatcagcaaaggttccaaacaccagagttatgtaggtttatgcccacctctcgaggaaaccgaaacctcccccaccaaatctcctgattctttagagtttatcccaggaaaggaatctccctctagtgatgtattcgaccacagtcccattgatggattggaaaaactcgcaccactagcccagacagagggagggaaagagataaaaactttacccgtttatgtcagttttgtacaagtggggaagcaatatgaaaaggagatacaacaaggaggtgtaaaaaaaatcataagtcaggaatgtaagacagtacaagaaaccagggggaccttttatacaactagacagcaaaagcaacctccttctccccaaggtagtccagaagatgatactctagagcaagtatcctttctagacagctctgggaaaagccctttaaccccagaaacacccagttcagaggaagtgagttatgaatttacatctaagacacctgactcgctcatagcttatataccaggcaaacccagcccaattcccgaggtttctgaggagtcagaggaggaggaacaggccaagtcaacctcccttaagcagactacagtggaggaaacagcagttgagcgtgaaatgcctaatgacgtgagcaaagactctaaccaaagacccaaaaataacagagttgcctatattgaatttccccctcctccaccactggatgcggaccagattgagtcagataagaagcatcattatctcccagaaaaagaggttgacatgattgaagtcaatctgcaagatgagcatgacaagtaccagctggctgaacctgtcattagagtgcagccaccttcaccagttcctcccggggcagacgtcagtgattcaagcgatgacgaatctatttatcagccagtcccagttaaaaaatataccttcaaattaaaggaagtggacgatgaacaaaaagaaaaacccaaagcttctgctgaaaaggcttccaaccagaaagaactggaaagtaatggatctggataagataactgaatttggccttggccttgattcacctcagaatgaaattgcccagaatgggaacaacgaccagtccatcacagagtgctccattgccaccacagcagagttttctcatgacacggatgccacagagatcgactctctggatggctatgacctgcaagatgaagatgatggcttgacagagagtgattctaaactcccaattcaagccatggaaattaagaaagatatctggaacacagagggcattctgaagccagctgaccgctcttttagccaaagtaaacttgaagttatcgaggaggagggaaaggtgggaccagatgaggacaagccaccttctaaaagttcttcatctgaaaagactcctgataagactgatcagaagtcaggggcccagttcttcacactggaaggcagacatcctgacagatcagtgtttcctgatacttacttcagttacaaagtagatgaagaatttgccactccttttaaaacagtagctaccaaaggtctagattttgacccttggtctaataaccgaggggatgatgaagtttttgacagtaaatcacgggaagatgaaactaagccatttgggctggcggtagaagaccgctctccagcaacaacccctgatacaacgccagccagaacgccaactgatgaaagtaccccaactagtgagcctaaccccttcccatttcatgaaggaaaaatgtttgagatgactcgcagtggtgcaattgacatgagcaagagggattttgttgaagagaggctccaatttttccagattggtgagcatacttctgaagggaagtcaggggaccagggggaaggggataaaagtatggtcactgccacaccacagccacagtcaggggacaccactgtagaaaccaatctagagagaaatgtagagacacctacagtggaacctaaccccagcatcccgaccagcggagagtgtcaggaaggcacatccagtagtggctccctggagaaatcagcagcagccactaacacctctaaagttgaccccaagttgcgcacgcctataaaaatgggaatttctgcatccaccatgaccatgaagaaagaaggccctggagaaataacagataagatagaagcggtgatgaccagttgtcagggattagaaaatgaaactataacaatgatttcaaatacagccaatagccagatgggcgttaggccccatgaaaaacatgattttcaaaaagataactttaataacaacaacaatttggattcttccactatacagacagataacattatgagtaatatagttctgacagaacattctgcacccacttgtaccacagagaaagataacccagtgaaagtctcatcaggaaaaaagacaggggtactacaaggacactgtgtaagagataagcagaaagttcttggagaacagcaaaaaacaaaggaattgatagggattaggcaaaaatccaaacttcccataaaggccacttcaccaaaagataccttcccaccgaaccatatgtcaaacactaaagcaagtaaaatgaagcaggttagtcaatccgagaaaaccaaagcccttactacttcttcatgtgtagatgtaaagtccagaattccagtgaaaaacacacacagggataacataattgcagttagaaaagcatgtgccacacaaaagcaagggcagccagagaaaggcaaggccaaacagcttccatccaagttgccagtaaaggtaagatccacctgtgtcactaccaccaccaccactgccaccaccaccaccactaccaccactaccaccaccaccagctgcacagttaaagttaggaaaagtcagctcaaggaagtatgtaaacattccattgaatattttaagggaattagtggtgagaccttaaagcttgtggaccgcctctctgaagaagaaaaaaagatgcagtccgagttgtccgatgaggaagaaagtacctcaagaaacacgtcgttgtccgagacttcccggggtggccagccttcggttacaacgaagtctgctagagataagaaaacagaggcagcacctttaaaatcaaagagtgaaaaggccggcagtgagaaaaggagcagtagaaggactggtccacagagtccatgtgaacggacagatatcaggatggcaatagtagccgatcacctgggacttagttggacagaactggcaagggaactgaatttttcagtggatgaaatcaatcaaatacgtgtggaaaatccaaattctttaatttctcagagcttcatgttattaaaaaaatgggttaccagagacggaaaaaatgccacaactgatgccttaacttcggtcttgacaaaaattaatcgaatagatatagtgacactgctagaaggaccaatatttgattatggaaatatttcaggcaccagaagttttgcagatgagaacaatgttttccatgaccctgttgatggttggcagaatgagacatcaagtggaaacctagagtcctgcgctcaagctcgaagagtaactggtgggttactagatcgactggatgacagccctgaccagtgtagagattccattacctcatatctcaaaggagaagctggcaaatttgaagcaaatggaagccatacagaaatcactccagaagcaatgtacaaaatctactttcccagaatccccaaagtgatgtagggaaaacagagtacccaagggaaacttctgaaaccaaaaatacatggatctggtcatgttgaagaaccagcatcaccactagcagccatatccagaaatcctcctagaagaaaacccagcaagccttataatagaagagacctaaacccctgtgtgcccctgtcaagtatgaaaaaagatgaagtaggaccttcctcccagccagaatggcaagccaaggcttaggcttccatggaaggaaggaggggtcccagtgggttttgaggcaaaaggcaggggaggaaggtttttaagggtgaaaacgaagaaagaaatccggcatgtggaaaagaagagccactcgtaacagcgaacggtcagtcaaggatcataagtttttactgccagtattgagaaattcgtggaagaaatgtcagcaggaagtaaaaattcaccgagaagtgtgtgtgtgttcgctgcttccacaacattaatggccatgattttttttatgcaaaaagaaaagaaaagaaaaccacccaacattttaatttagcatgagcccaatttacagagcatggaaatcactttcatttccggattggcgcgtgtgcaattagcaatgcagtgtatatacaagaagccatgctgttaacagtttatctcaagtaatttggtgtcatttacaaaaggaagaaattcctgccatcagaagggacagaaggagatggaatgatcaaatcacagaggaaacactaaaattacttaaatctacaacagctcgccttatttttcttgggacccaaactgttcagggtataaacactatttgtttcttttttaaaacatcgatagttttgctgtaaataataacactgtataaattctaacagaaaaatagaatattctgtttgtgttctaagaggcagtgcctcttagaacacaaacagaatattgcaaatgcatttaacaaataggggtctcaagtgacttcaccctagaagaggagggagggattctgggtgggggtgactcttcactgattcttgtgatattgaggcaattatgaatgtttggtatatgcaaaactgctagcttggatttaaaaaaaaaacaaatctttaaaatctgctgcaaatttaaataattcccaaaatgaggaattctgtagttctgtgaaaaatttttttcttcagaatactaatattttgatgcatgtgtatcaccttattttgattaaatcttttccaattttgcaaacactacagtatactgcaacacaaaagattttatctgtaaacacaaagcccttcatctaatatttgttggctattgccaatttttcaatggaaatggaccctaaaaacaaccaaaaaaaaataaccttatacggtagttgcctttagggggggtggggggggatggccatcctggttaggtgccttaaaagggggggtaaaaagccttgccccctttagagggtggggtggtgccccataaaaggccccccantcgggggtatttaaaaagggaccgaaccagaaaccccttagcctagtagaagggccagcacgcctgtaaaattattacctgtattgtgtaccgggcctataagatgtagacacctttccagtaagccaaatcatttgtaacccattcctagcagtgtcatattaggttagttaaggctgcctgtgttttaaagggcatttttatttgggttttggtgaaattctttaatttgttgattatattcacataaaatcacgcattcattgacacatagcttctaatgacatatgtatgaaaaacccatacactggatgaccctagtcgacttatttaaggcataaaataaattgtgttaaacttcttcacctatctgtgctctacagtctccttgtgttttctggcaaaaggtagttgtctaatcccttgtcatatgagtcctggccaatccaccccattggtcctctttgtgcctctgtggtcactgaagagataatctctaacattcatatgtgccctgcaagctcccagcttataaattctgtgcatttcatgggggagccaagaattaaagattaattgacaagtaagctttgcccacatctgttcaggccttcttgaaaagtgaagaattggagatactatagccagcatgtcaaaaagttgac

SEQ ID NO: 136118 - DNA, 360 bp, Homo sapiens
atggtactgaaagttcagcagtacacagtcatcgttcaggccacagatatggaaggaaatctcaactatggcctctcaaacacagccacagccatcatcacggtgacagatgtgaatgacaacccgccagaatttaccgccagcacgtctctatttgctctcttccggccagtgagcaatggtcaggaaaagctcagggccaggctgccggggagtctggacataggggaagcagctgctaaccccagggccctgaagaataataacgtccaggcccaagagcgcagcagggctgcacccacacagctggccggacagccccagctgtccttcctccctgactccgagaaagaaaaggaa

SEQ ID NO: 136119 - DNA, 2580 bp, Homo sapiens
atgcctcttgggttccaacgtctggtgccctctcaggagttccaccggcaacgacccgacgtgcagggactgtggcagagcctggcacatcggcagccctcccgcgagtcagcctgggtgactgcgactgccctgggctctaaaccccggggtacgggccaggcagtcgactacgagctcaacagagctttcatgctgacagtgatggtgtccaaccaggcgcccctggccagcggaatccagatgtccttccagtccacggcaggggtgaccatctccatcatggacatcaacgaggctccctacttcccctcaaaccacaagctgatccgcctggaggagggcgtgccccccggcaccgtgctgaccacgttttcagctgtggaccctgaccggttcatgcagcaggctgtgagatactcaaagctgtcagacccagcgagctggctgcacatcaatgccaccaacggccagatcaccacggcggcagtgctggaccgtgagtccctctacaccaaaaacaacgtctacgaggccaccttcctggcagctgacaatggtgtgggtgtggccgtgtgctctgccgtgtctgttgaggtgccgtgcgcagtggctgtgtgcgtgtgtgcagctgcgggtgtgggtgtggccgtgtgctttgccgtgtctgttgaggtgccgtacgcagtggtgtggctgcccatggcgtgtggcagggtgtcggtcaggagccatggctggactgtggggatacccccggccagcggcaccgggaccctccagatctatctcattgacatcaacgacaacgcccctgagctgctgcccaaggaggcgcagatctgcgagaagcccaacctgaacgccatcaacatcacggcggccgacgctgacgtcgaccccaacatcggcccctacgtcttcgagctgccctttgtcccggcggccgtgcggaagaactggaccatcacccgcctgaacggtgactatgcccaactcagcttgcgcatcctgtacctggaggccgggatgtatgacgtccccatcatcgtcacagactctggaaaccctcccctgtccaacacgtccatcatcaaagtcaaggtgtgcccatgtgatgacaacggggactgcaccaccattggcgcagtggcagcggctggtctgggcaccggtgccatcgtggccatcctcatctgcatcctcatcctgctgagacctgtgacgcctgtgggcagctcccaggtggacttagcagagggaaggagacctgggccactctcgagggcagccgcagtggagggcatccgcagtggggccggggccacggtcaacagcagatccgcctgctgcccggcttctgcccagtcgtgggcacctcagccctggcagggcgatgccgccaatacccacagagctcctcccaagcctccactccgcttcggaatcctcctcacgacatcaggcagccacagccaattaatcgggttggcaaaaaacagccctcctgactgggggatacacgtatgcatgcttacacagacgcatgaagcacctacatccacgactcctgcggatacacgtatgcatgcttacacagacatgcatgaagcacctacatccacgaatgcacacgcacgtgggccgcacatgtgcacagatgtgtccttgcacatccaggcctgcatgtgcagagacatgcgcgtgtgcagtacagccatggtcctgctgtttgtcatgtggatgaagcggcgagagaaggagcgccacacgaagcagctgctcattgaccccgaggacgacgtccgcgacaacatcctcaagtatgacgaggaaggcggtggcgaggaggaccaggactacgacctcagccagctgcagcagccggaagccatggggcacgtgccaagcaaagcccctggcgtgcgtcgcgtggatgagcggccggtgggcgctgagccccagtacccgatcaggcccatggtgccgcacccaggcgacatcggtgacttcatcaatgaggctctgttttgcgccattgcgcctgcacatgccgcagtccctctggagtggccgtcgcgcctgcacgggccgcagtccctctggagtggccacggcgcctgcacgggccgcagtccctctggagtggccacggcgcctgcacatgccgcagtccctctggagtggccacggcgcctgcacatgccgcagtacctctggagtggccaccgcgcctgcacgggccacagtccctctggagtggccatcgcgcctgcacgggccgcagtccctctggagtggccatggcgcctgcacgggccgcagtccctctggagtggccatggcgcctgcacatgccacagtccctctagaggccgtcgcgcctgcatgggccgcagtccctctggagtggccatggcgcctgcacgggccgcagtccctctggagtggccatggcgcctgcacgggccgcagtccctctggagtggccatggcgcctgcacgggccgcagtccctctggagtggccattgcgcctgcacgggccgcagtccctctagagtggccatgggtgccttga

SEQ ID NO: 136120 - DNA, 3156 bp, Homo sapiens
tttcgtccgctccgaggccgcggggcgctgggggacgcgctgggcacacgcttcgggcgggcggaaactttcctgggcgagttgagcctcccaccgggctgcgggtgcgatttggagcttcgtggccgatgaagaaagccgcggtttagagcttttcgcccataatgaggatcttacaactagagagacctgcaaggctgggttctctgaagatgattacacggcattaatctcccaaaatattctagaaggggaaaagctacttcaagtcaagttcagcagctgtgtggggaccaaggggacacaatatgagaccaacagcatggacttcaaagttggggcagatgggacagtcttcgccacccgggagctgcaggtcccctccgagcaggtggcgttcacggtgactgcatgggacagccagacagcagagaaatgggacgccgtggtgcggttgctggtggcccagacctcgtccccgcactctggacacaagccgcagaaaggaaagaaggtcgtggctctggacccctctccgcctccgaaggacaccctgctgccgtggccccagcaccagaacgccaacgggctgaggcggcgcaaacgggactgggtcatcccacccatcaacgtgcccgagaactcgcgcgggcccttcccgcagcagctcgtgaggatccggtccgacaaagacaatgacatccccatccggtacagcatcacgggagtgggtgccgaccagccccccatggaggtcttcagcattaactccatgtccggccggatgtacgtcacaaggcccatggaccgggaggagcacgcctcttaccacctccgagcccacgctgtggacatgaatggcaacaaggtggagaaccccatcgacctgtacatctacgtcatcgacatgaatgacaaccaccctgagttcatcaaccaggtctacaactgctccgtggacgagggctccaagccaggcacctacgtgatgaccatcacggccaacgatgctgacgacagcaccacggccaacgggatggtgcggtaccggatcgtgacccagaccccacagagcccgtcccagaatatgttcaccatcaacagcgagactggagatatcgtcacagtggcggctggctgggaccgagagaaagttcagcagtacacagtcatcgttcaggccacagatatggaaggaaatctcaactatggcctctcaaacacaagccacagccatcatcacggtgacaagattgtgaatggacaaccccgccaagaatttaccgccagcacgtttgcaggggaggttcccgaaaaaccgcgttggagaccgtggtcggcaaaccttcacgggttaattgaccgagattaagccccactctccaaactggaatgccgtttaccgcatcatcagtggggatccatccgggcacttcagcgtccgcacagaccccgtaaccaacgagggcatggtcaccgtggtgaaggcagtcgactacgagctcaacagagctttcatgctgacagtgatggtgtccaaccaggcgcccctggccagcggaatccagatgtccttccagtccacggcaggggtgaccatctccatcatggacatcaacgaggctccctacttcccctcaaaccacaagctgatccgcctggaggagggcgtgccccccggcaccgtgctgaccacgttttcagctgtggaccctgaccggttcatgcagcaggctgtgagatactcaaagctgtcagacccagcgagctggctgcacatcaatgccaccaacggccagatcaccacggcggcagtgctggaccgtgagtccctctacaccaaaaacaacgtctacgaggccaccttcctggcagctgacaatgggatacccccggccagcggcaccgggaccctccagatctatctcattgacatcaacgacaacgcccctgagctgctgcccaaggaggcgcagatctgcgagaagcccaacctgaacgccatctacatcacggcggccgacgctgacgtcgaccgcaacatcggcccctacgtcttcgagctgccctttgtcccggcggccgtgcggaagaactggaccatcacccgcctgaacggtgactatgcccaactcagcttgcgcatcctgtacctggaggccgggatgtatgacgtccccatcatcgtcacagactctggaaaccctcccctgtccaacacgtccatcatcaaagtcaaggtgtgcccatgtgatgacaacggggactgcaccaccattggcgcagtggcagcggctggtctgggcgcccagtgccatcgtggccatcctcatctgcatcctcatcctgctgaccatggtcctgctgtttgtcatgtggatgaagcggcgagagaaggagcgccacacgaagcagctgctcattgaccccgaggacgacgtccgcgacaacatcctcaagtatgacgaggaaggcggtggcgaggaggaccaggactacgacctcagccagctgcagcagccggaagccatggggcacgtgccaagcaaagcccctggcgtgcgtcgcgtggatgagcggccggtgggccctgagccccagtacccgatcaggcccatggtgccgcacccaggcgacatcggtgacttcatccaatgagggactccgcgctgctgacaacgacccccacggcacccccttatgactccctgctggtcttcgactacgaggggagcggctccaccgcagggctccgtcagctccctgaactcatccagttccggggaccaagactacgattacctcaacgtactgggggcccagattcaagaagctggcggaacatgtatggaggtggtgaagaggattgactgacctcgcatcttcggaccgaagtgagagccgtgctcggacgccggaggagcaggactgagcagaggcggccggtcttcccgactccctgcggctgtgtccttagtgctgttaggaggccccccaatccccgacgttgagctgtctagcatgagcacccaccccacacagcgccctgcaccacggccgctgcccagcaccgcgctggctggcactgaaggacagcaagaggcactctgtcttcacttgaatttcctagaacagaagcactgtttttaaaaaaag

SEQ ID NO: 136121 - DNA, 1579 bp, Homo sapiens
  misc_feature (1)...(1579): n = a,t,c or g
gcggccgccacctctccccagcccaggagacggctgcggagccgcagccgcccagaccgcgcagcgcgggaggcaggttccgcacgaaataaatcagaatgagttatgcagaaaaacccgatgaaatcacgaaagatgagtggatggaaaagctcaataacttgcatgtccagagagcagacatgaaccgcctcatcatgaactacctggtcacagagggctttaaggaagcagcggagaagtttcgaatggaatctggaatcgaacctagtgtggatctggaaacacttgatgaacgaatcaagatccgggagattgatacctgaaaaggtcagattcaggaggccattcgcctttgattcaacagcctccacccagagctttttgggacacaaaccggtatctttacttccattttgcaagcaacagcattttgattccgagctgattccgccagcgggaagaccagaggccggcgctggggagttgcacagactcagctggcggacaaggggcgaggagagccgagagtgcctcacagagatggagcgtaccctggcactgctggcctttgacagtcccgaggagtcgcccttcggagacctcctccacaccatgcagaggcagaaggtgtggagtgaagttaaccaagctgtgctagattatgaaaatcgcgagtcaacacccaaactgggcaaaattactgaaactactactttgggctcagaacgagctggaccagaagaaagtaaaatatcccaaaatgacagacctcagcaagggtggtgattgaggagcccaagtagcgcctgcgcttgcgtggtggatccaacaccagccctgcgttcgtggggacttgcctcagatcagcctgcgactgcaagattcttactgcagtagagaactctttttctcccttgtactttttttttgacctgggcatctttttatagggaaaaatggcctttgtaggcagtggaaaacttgtcaaggaaagctgcccgtctcttttggcagtcttgatgcagagcctgcactctgggcacttcgctggaagaatctgggaaggttgcggtttgctccttcccagtgttcgggggcctctggctgctgaaggattcggtctaccacggagggctttgctgtttagggctgcatcccactcaaaatacaggaaaagcaccgaatcatgattctgctttctgttaagccttaggccagacattgggccttcacctacaagtttttccttacccctgtggtttttgtgtttttttttttttttctttttccataaggaaagaatatataaatttgtaaatcctaattcaaagatggccncgtgtgtgagggccattgagttttgatttgttttccctttggtctgggttagctgtggcttttgggggatgcgtgtgagggggctatgtgttttttaattttttaaatatatattttggtgctgtgtgtgggtaaggagacttgttcctagtggatcaatgaaccatctcttctgggcagttttgttgaaaataaaggtttctctttgatttcaagaatgaccaaaaaaaaaaaaaaa

SEQ ID NO: 136122 - DNA, 454 bp, Homo sapiens
gaaatcatagcttgggagttgtttatgcttcagagatttttaaatcaaggctaccttttaatgtaaatgcacttaaattgaccccacttatttaaatgatgtgaaatagctcagcaatgttcccatgacctgtttttataccttttgatattttatgtgacctccaataagctggacagataataacagaacccttggcattgggctaccactgccactgtgatgctgagtctggtgtcagcagtgaagatgagggtgggaagccaccgaggaagctggaggttgacacaagtggcagtaagggcacatcattacctaggaagaaccttcagaaatcctctgcaaaagacggcctgtttccacccttcctattcttgtttcttccttctgccactttttttttttttctttcaactaaggaatagaatggccagaagtagttgacaggccctaa

SEQ ID NO: 136123 - DNA, 840 bp, Homo sapiens
ttagctgctacagccatcggtacagctgccaaatggaactgccaacacctccctctcctttgcggctgtttctgccgtttcaccacctccgtgtagaacttccacagccacaacccttcctcctcccatgccctcattcttttgtgtgtttccttctccttccatgtccccgtccccttccgagttcctgtcctgcatcgcttctgtctccagagtgcactctttgtcctcttcctcctctgggtcctcatccaccgcttcctccctgaacttttctgccattatgggatcttcctcagcaacagcttcctgggtccttagcacgacatccactcctccttgcccttcagctctcccctccagtcctgcgcaggagtcgtgatctttggctgctagctcctctgcctggctctcagagcatccatcattctcatctttcacattgtcatgggcatctggtgccttctgtgatgaggtttcactctctttttcagggtctaaattatcttttttatcatccaaaggtgactgcggtattccattcatttgaacatcagcctgtccttcttcattagatttttcaccttgtttctcctcatctacttcaaagtcttcttcatactctgaaataggaaaatctccacagccaatctgaagagccccaggtctggatgggaccaggcccagggtgccgtagacatggcttggagtcactgggcttcctgcagggatgggcactacaggcacgaggatgcaggagcggtgaccgccccaggggcctctctccttgacacctagacattcgaaggcccttggaactttaattctggccctcttcat

SEQ ID NO: 136124 - DNA, 1497 bp, Homo sapiens
ctagacctgcacgttgttgggggaaacatctgcagtctcgctttctccttgcaccatatgctgttgcttctctcgggtttcagtgaaatcaggcttcactggaagtgttgccatcgcctgtagactctccggactcaattccctctctccctcccgtgataatcctaatcggaatttttcagctgctcctgtctcctgcctcccatcgccactcccagtggctgcctcctggccctctgacccttcctcttgctcctgtcctagccctgaggtcttccgctccagggctcctggagtgcccaccccagcctctgttgtatatgtcactgtcatctcctctgctgctggcacttcctccccactccgtgctaattcctctaccaccaccttccctgcagctgctgtttttcctactaactcatcctgttggtgccaggtttcttcctcagcaacatctgaaaaggaggaggctttatttgctattgttttctcctcggctgtctccgaacctgccaacacctccctctcctctgcggctgtttctgccgtttcaccacctccgtgtagaacttccacagccacaacccttcctcctcccatgccctcattcttttgtgtgtttccttctccttccatgtccccgtccccttccgagttcctgtcctgcatcgcttctgtctccagagtgcactctttgtcctcttcctcctctgggtcctcatccaccgcttcctccctgaacttttctgccattatgggatcttcctcagcaacagcttcctgggtccttagcacgacatccactcctccttgcccttcagctctcccctccagtcctgcgcaggagtcgtgatctttggctgctagctcctctgcctggcctgtggctgggatcagcccctcaggggcctgcacctttcctgctggctcagcttcaggagctgctaaggccccctctccatcttggcggtgcccttccttcagggccctattctccctgctggacagctcttctctgtctttgtgctctgtgtctctggcttcactcagtctttcccctcctccttctttcctcagagctgttatgtttccagcgactttcaaatccaggcgttgcttcaaatatgggaaccactgtctctttagtgatcttctctggttggaggtatgtgcactgtaggagatcaagaacaacagcatgggctgaaaaggaaccttcaagaggtcaaaaacatgcctgttagcatggtgtcctggaagctggaaggttctcacaagctgcagaatggtcaaataagatgagcacagttggcccaaagagtaatcgtggccatagtgttctggttgatgaaggacattccagtccgttagcactctaaccttctcagaagatggggaccatcttcttcctgcttgcttgaatttccttttttcaactctacttttaccaattctctcccttggttgctgtctttgacaggatgttttctctctcat

SEQ ID NO: 136125 - DNA, 1341 bp, Homo sapiens
ctatagttcttttaattgtgatgttagggtgtggattttaaatctctcctgctttctcttgtgggcatttagtgctataaatttccctctacacactgctttaaatgtatcccagagattctggtacgttttgtctttattctcattggtttcaaagaacatctttatttctgccttcattttgttatgtacccagcggtcattcaggagcaggttgttcagtttccatgtagctgtgtggttttgagtgagattcttaatcctgagttctaatttcattgcactgtggtctgagagacagtttgttgtgatttctgttcttttacatttgctgaggagtgctttacttccaactatgtggtcaattttagaataagtgtgatgtggtgctgaaaagaatgtatattctgttgatttggggtggagagttctgtagatggctattaggtccgcttggtgcagagctctgttcaagtcctgtatatccttgttaattttctgtctcgttgatctgtctgatactgacagtggggtgttaaagtctcccactagtattgtgtgggagtctaagtctctttgtaggtctctaagaacttgcttatgaatctgggtgctctctcttcttgcttgtagggtttctgcagagacatctgctgttaatatgatgggcttccctttgtggataacccgacctttctctctggctgcccttaacattttttctttcattccaaccttggtgaatctgacaactatgtgtcttggggttgctcttctcaaggagtatctttgtggtgttctctgtatttcctgaatttgaatgttgtcctgccttgctagattggggaagttctcctggataatgtcctgaagagtgttttctaacttggttctgttctccccattacttctctgaagcttctgccgcggggtccaaaagggatcctgcaaaaatgagccattctcaccccgctgggtaagtgacaactggagcttttccacgctgtggcaggtggcggcttcagccagctgcccctcctcctccctcctgatgagattgctttgcaggacttgaagggccagaggcccctcttcactgtcttgctgaagctcctgggtatttctctctggaagaaatagctcagacttgggaaggccactggatcctctggcaacatcagcccctgtaggtggggagtggatttttcccaaagggtaaatgaccctcaaggccagcaggtgtcgcaatagctccatgttttcagcatgatttttggcttttctgctttgctgtaacatattaattgggtgtttggcagcatggaactttcctgcgatggg

SEQ ID NO: 136126 - DNA, 1551 bp, Homo sapiens
cgtgtttgaagtgatcagcggcttcattacttttttcaatgtgtaatcattatttaactctatgataccgagggcgccgttcgctaactcagcatcgcgttttttagcgctctgctgaagcttctggctttctttacggaagaagttcgtgccgccgccgtagtacgctttgttaaataaagattcttcgccttggtatccgttttctgttcccgtgttggcttcgaatacaaggtatttatggcctttgtcttcaacgtagtgagggtctctcagcgtatggttgtcgccggatgtataattgccttcatcgataaactgctgaacgttctgatatgtttttccgtctccgtcaaaaatcgttttgtgatcttccactccgttgattttgagtgtgtcatcagattttgacacatttacctgcgctgttgtcaggctttgtttgccgtaatgtttaccggaatagtcagtgtagaataaacggatttttccgtcagatgtaaaggttgcagaaccggaccattcttgcgtctgatctttcaggatcggatcgttggcgtcgaacttatcgctgtccaccctccgcacctgccgcggggtccaaaagggatcctgcaaaaatgagccattctcaccccgctgggtaagtgacaactggagcttttccacgctgtggcaggtggcggcttcagccagctgcccctcctcctccctcctgcaaagctcacggactggaatgtccttcatcaaccagaacactatggccacgattactctttgggccaactggtgggtggggagacaggattggcatgttattttcaacagaccttcttgtgtgctctccattaattgcgttgcgctcactgcccgctttccagtcgggaaacctgtcgtgccagctgcattaatgaatcggccaacgcgcggggagaggcggtttgcgtattgggcgccagggtggtttttcttttcaccagtgagacgggcaacagctgattgcccttcaccgcctggccctgagagagttgcagcaagcggtccacgctggtttgccccagcaggcgaaaatcctgtttgatggtggttccgaaatcggcaaaatccctgccgcggggtccaaaagggatcctgcaaaaatgagccattctcaccccgctgggtaagtgacaactggagcttttccacgctgtggcaggtggcggcttcagccagctgcccctcctcctccctcctgccagtctcaggtgtttcttcatagccatatgaaaatgaactaatacggtaaataggtaccattagagtggggtactgctgtaaagaacctgaccatacccgagaggtcttctcaacactatcaccccggagcacttcaagagtaaacttcacatcccgaccacatacaggcaaagtaatggcattaccgcgagccattactcctacgcgcgcaattaacgaatccaccatcggggcagctggtgtcgataacgaagtatcttcaaccggttgagtattgagcgtatgttttggaataacaggcgcacgcttcat

SEQ ID NO: 136127 - DNA, 3423 bp, Homo sapiens
caccaccttccctgcagctgctgtttttcccactaactcatcctgttggtgccaggtttcttcctcagcaacatctgaaaaggaggaggctttatttgctattgttttctcctcggctgtctccgaacctgccaacacctccctctcctctgcggctgtttctgccgtttcaccacctccgtgtagaacttccacagccacaacccttcctcctcccatgccctcattcttttgtgtgtttccttctccttccatgtccccgtccccttccgagttcctgtcctgcatcgcttctgtctccagagtgcactctttgtcctcttcctcctctgggtcctcatccaccgcttcctccctgaacttttctgccattatgggatcttcctcagcaacagcttcctgggtccttagcacgacatccactcctccttgcccttcagctctcccctccagtcctgcgcaggagtcgtgatctttggctgctagctcctctgcctggcctgtggctgggatcagcccctcaggggcctgcacctttcctgctggctcagcttcaggagctgctaaggccccctctccatcttggcggtgcccttccttcagggccctattctccctgctggacagctcttctctgtctttgtgctctgtgtctctggcttcactcagtctttcccctcctccttctttcctcagagctgttatgttttccagcgacttttcaaatccaggcgttgcttcaaatatgggaaccactgtctcttttagtgaatcttctcctagaagccctggattgtcagacaactcagaagcctccacaggtgcttcgttctcagcatcagatcccatttcatttgggggagcttttgtctcttcctcagctcttacttctgtctctgtttccccttcttccgctttaagtttttgctcttctttaaaagcatcttcatccttgagtgcatttgcccttgtcacctcttctctctcagagtcagttttcctcagagatgtttttggcctctcagctttccttcgctctcttgctaaatctaattccttgggtaaaatttctttcctatcatcttccctattagcttctgcctcagtcaccatctcttccccttccacatcttccttgcaaaggaaggcttcctttgcaaggcttccttcctcagggctgccctccgaaacctgcatccggcttgcctctgcctctcctgtgaaggggctcaagcgtgtttctgttctcataacctcttttctctctttggctggttcctctcccccaagaattgcctcttcagaaccgtcctctctctttgatgctgtgtcctccatgggtcctgtgtcctctaggtctatggatgcttcctcttcactttctccgacatcactcacagccaccccaccctcagcctctccctcctccgatgtcgctgcctctctcagggctgctacttcatgaagatgctccaagttcagggctgctgcttcatttgcaagcactgccttctctaaaccctgttccccttcagaagctgctttgtctgtctcaagcactgtgagcatcaaggcttgcttttcaggagcctcatctttactcagacccacagcatcttttgctgctgcttgtcctatggggtctgaccccccttcacccagccttctgaccccttctgcttctgctgctccctctgcccccctttctatgcctggagggatctcccttttttctgtaaactcttctgccaattctggctgctctgctgttggcttccacgccctcaagggagcctcatgaacagctcctgcttctccccacagtgctgcctccccttttccctgtactatgtcagcatctctgtgctggggcgcttcatcttcctccattgcttctttcttctccagtgtatacgttttttgcaccaattgctgggattccttgtttgagttgattgctgctgtttcatccaccatgaaattcattgttggtgcaccaagagccaggacataggctaatggcaatgaatcctttctgccacttgtgtcaacctccagcttcctcggtggcttcccaccctcatcttcactgctgacaccagactcagcatcacagtggcagtggtagcccaatgccaagggttctgttattatctgtccagcaccttcctccaacccagggagacctgcctttttgtccttcacctgagcagtgctttcttcccaaagcttactcttatccttttccttttcttctgcagaaacatgtttcccggacttctcagataaaccctctgcaatctcttgggttcctttctccgttccttctttaagaacattctcaaagctttcgtctattggcatcggcttggtctccacatctgcttttgttatttcttggtcttcaatttcaatttctaaggattcctcaattggaaggtgagactttcttggcttatcattttcactcagttcctgagaagatgaccttctggcactttcatctgtgctgctgtcagtgtgggcttccctgtcccccactgcagattcatcctcactgtcactagaataagggtgacttctggatgaggttgatgaagcagttttcatattcagtaaacagcctatgttacatgataagctgaacaactcgccttgtttatcctcttccagttcactctcagagcatccatcattctcatctttcacattgtcatgggcatctggtgccttctgtgatgaggtttcactctctttttcagggtctaaattatcttttttatcatccaaaggtgactgcggtattccattcatttgaacatcagcctgtccttcttcattagatttttcaccttgtttctcctcatctacttcaaagtcttcttcatactcatattttaaagtattttcctggtcgtcttccaagacttcttgtcctggttttcctttacttgtcatttcctccacagcagttaccacttctttgagccctgtttttatttcttgagctgaaaatttggctgaaacagaggttttgttctccttgatctcatttctttttggtatcacatactctctctctttcctcactttcccctcagccttcttcagttcctctcctttctcagtgctcttttctttcctagatttcggcaaagacggttttttgtcaaggcccattgcaataatgcacctaaccctgtaccatttaaaccagtctgactcaacttttacctgacctttttcaagtagtttgcctttgtagacacaaaggttttccccaccacagtgctgctgataaactttaatttcatcccggaagtcaggattatcagaagataggtgcacatttttccccaaatagatcattgtaatagctgcattactatgtaaggatgttttatgaatccttcttgaatccat

SEQ ID NO: 136128 - DNA, 4374 bp, Homo sapiens
gcgcgactgtcgcagcgccagcgcgcacggggccccacgcacccacccttcgcacctgccgcggggtccaaaagggatcctgcaaaaatgagccattctcaccccgctgggttacttgctgcatataatagccttatggataaacacctggctgggtattttaacaatacaaggataaggcgtcatctcttaagatcaggactgatcacaagaagtggaagaatactttctgaaaaagaatataaactaaatatgatgaagcgggatcatcaaaaatatatccgggaatgcttagcccaggcaatttttcataaagttcttgatatggagcgttaccatcagcttgaaataaaaaagaaattggagaccttagctaggaaggagcgaatccagaggtttaagggagagcacacaagaaggtctgttgaaaataacatgccaatcctgtctccccacccaccagttggcccaaagagtaatcgtggccatagtgttctggttgatgaaggacattccagtccgttagcactgacagcccctcgaccatatactgctccaggaaatatgcagcctccaattcgattacagcctcttcccagtaatcctgcagtagaaactgttccaaaggattcaagaaggattcataaaacatccttacatagtaatgcagctattacaatgatctatttggggaaaaatgtgcacctatcttctgataatcctgacttccgggatgaaattaaagtttatcagcagcactgtggtggggaaaacctttgtgtctacaaaggcaaactacttgaaaaagagtatgaagaagactttgaagtagatgaggagaaacaaggtgaaaaatctaatgaagaaggacaggctgatgttcaaatgaatggaataccgcagtcacctttggatgataaaaaagataatttagaccctgaaaaagagagtgaaacctcatcacagaaggcaccagatgcccatgacaatgtgaaagatgagaatgatggatgctctgagagtgaactggaagaggataaacaaggcgagttgttcagcttatcatgtaacataggctgtttactgaatatgaaaactgcttcatcaacctcatccagaagtcacccttattctagtgacagtgaggatgaatctgcagtgggggacagggaagcccacactgacagcagcacagatgaaagtgccagaaggtcatcttctcaggaactgagtgaaaatgataagccaagaaagtctcaccttccaattgaggaatccttagaaattgaaattgaagaccaagaaataacaaaagcagatgtggagaccaagccgatgccaatagacgaaagctttgagaatgttcttaaagaaggaacggagaaaggaacccaagagattgcagagggtttatctgagaagtccgggaaacatgtttctgcagaagaaaaggaaaaggataagagtaagctttgggaagaaagcactgctcaggtgaaggacaaaaaggcaggtctccctgggttggaggaaggtgctggacagataataacagaacccttggcattgggctaccactgccactgtgatgctgagtctggtgtcagcagtgaagatgagggtgggaagccaccgaggaagctggaggttgacacaagtggcagaaaggattcattgccattagcctatgtcctggctcttggtgcaccaacaatgaatttcatggtggatgaaacagcagcaatcaactcaaacaaggaatcccagcaattggtgcaaaaaacgtatacactggagaagaaagaagcaatggaggaagatgaagcgccccagcacagagatgctgacatagtacagggaaaaggggaggcagcactgtggggagaagcaggagctgttcatgaggctcccttgagggcgtggaagccaacagcagagcagccagaattggcagaagagtttacagaaaaaagggagatccctccaggcatagaaaggggggcagagggagcagcagaagcagaaggggtcagaaggctgggtgaaggggggtcagaccccataggacaagcagcagcaaaagatgctgtgggtctgagtaaagatgaggctcctgaaaagcaagccttgatgctcacagtgcttgagacagacaaagcagcttctgaaggggaacagggtttagagaaggcagtgcttgcaaatgaagcagcagccctgaacttggagcatcttcatgaagtagcagccctgagagaggcagcgacatcggaggagggagaggctgagggtggggtggctgtgagtgatgtcggagaaagtgaagaggaagcatccatagacctagaggacacaggacccatggaggacacagcatcaaagagagaggacggttctgaagaggcaattcttgggggagaggaaccagccaaagagagaaaagaggttatgagaacagaaacacgcttgagccccttcacaggagaggcagaggcaagccggatgcaggtttcggagggcagccctgaggaaggaagccttgcaaaggaagccttcctttgcaaggaagatgtggaaggggaagagatggtgactgaggcagaagctaatagggaagatgataggaaagaaattttacccaaggaattagatttagcaagagagcgaaggaaagctgagaggccaaaaacatctctgaggaaaactgactctgagagagaagaggtgacaagggcaaatgcactcaaggatgaagatgcttttaaagaagagcaaaaacttaaagcggaagaaggggaaacagagacagaagtaagagctgaggaagagacaaaagctcccccaaatgaaatgggatctgatgctgagaacgaagcacctgtggaggcttctgagttgtctgacaatccagggcttctaggagaagattcactaaaagagacagtggttcccatatttgaagcaacgcctggatttgaaaagtcgctggaaaacataacagctctgaggaaagaaggaggaggggaaagactgagtgaagccagagacacagagcacaaagacagagaagagctgtccagcagggagaatagggccctgaaggaagggcaccgccaagatggagagggggccttagcagctcctgaagctgagccagcaggaaaggtgcaggcccctgaggggctgatcccagccacaggccaggcagaggagctagcagccaaagatcacgactcctgcgcaggactggaggggagagctgaagggcaaggaggagtggatgtcgtgctaaggacccaggaagctgttgctgaggaagatcccataatggcagaaaagttcagggaggaagcggtggatgaggacccagaggaggaagaggacaaagagtgcactctggagacagaagcgatgcaggacaggaactcggaaggggacggggacatggaaggagaaggaaacacacaaaagaatgagggcatgggaggaggaagggttgtggctgtggaagttctacacggaggtggtgaaacggcagaaacagccgcagaggagagggaggtgttggcaggttcggagacagccgaggagaaaacaatagcaaataaagcctcctccttttcagatgttgctgaggaagaaacctggcaccaacaggatgagttagtaggaaaaacagcagctgcagggaaggtggtggtagaggaattagcacggagtggggaggaagtgccagcagcagaggagatgacagtgacatatacaacagaggctggggtgggcactccaggagccctggagcggaagacctcagggctaggacaggagcaagaggaagggtcagagggccaggaggcagccactgggagtggcgatgggaggcaggagacaggagcagctgaaaaattccgattaggattatcacgggagggagagagggaattgagtccggagagtctacaggcgatggcaacacttccagtgaagcctgatttcactgaaacccgagagaagcaacagcatatggtgcaaggagaaagcgagactgcagatgtttcccccaacaacgtgcagaaaaacattaatccaaaaaggcaagctctcagcaggagggaggaggaggggcagctggctgaagccgccacctgccacagcgtggaaaagctccagttgtcacttacccagcggggtgagaatggctcatttttgcaggatcccttttggaccccgcggcaggtgcggagggtggcttccctgttgctaagggaggagagaggcaagcgcccagggtctggagaagcggaggcgctactggaaccgagcctgcggaagctggaagtgaagccagcttctacccctttttctgggccctga

SEQ ID NO: 136129 - DNA, 2086 bp, Homo sapiens
  misc_feature (1)...(2086): n = a,t,c or g
ccttctttaggagcaagtaaaaacgatggcgtaacacgaaccacatttacacaactgttgcaacggcggtaagtaaaagaatcattaacacaaaaatcaaaacgttttcaaaataaacttataaatcgccgaggctgggaaaggcctaggtctggggccagctggacccaacgcagggcacttgggggaagggggtgtgtggacaggtggctcgggatcatcggccccacagggtnccaggggcaagactccgcgggttcccggccctcaatccgaccccgcagaccgccccctccccaagcccggacccgaggcctcgtccgccggcccctctgacccagggccccggacagaagcgcaatgcagcctgcgccccacctccttccctcgccccgccacctcgatcccggcccggagccgccgacacctctcacgcagcaggggcagaaagggacgcgggcgccacggccccgctgcccgcggagccagaaataggcgacttcgggccctgcggtccggaggcgagaagcgcgcgggagcgcgtctctcaggacgcgggccccgagtcgcgactccactcacgcaggcatccaaggcaacgtggcgttgcaaccctgatggaggtttgacgtcagggaagacattagaatatgtttatgagtttcccccctttcgttttagttcaacacaagatgagacacatgtgaatactgggtcatcgtctgaagtggtgcatttggatgatgctttttctgaagaagaggaagaggatgaggataaggttgaggatgaggatgctaccgaagagagaccatccgaggtttcagaacctattgaagagttacattccagacctcataaatctcaggaaggcacgcaggaggtttcagttcgaccatcagttattcaaaaactggagaagggacagcagcagcccttggagtttgttcataaaattggggccagtgtgagaaaatgtaacctagtagatattggtcaggctacaaataatagaagcaacttggtacgccccccagtgatttgtaatgctcctgctagttgtttacctgaaagctctaacgatagaccagttacagctaatacaactagtttaccaccagcagctcatttggattcagttagcaaatgtgacccaaacaaagttgagaaatatcttgaacagccagatggggcctctagaaatcctgtgccatcatcccatgtagaaactacttcattttcgtatcagaaacataaagaatcaaataggaaatctttacgcatgaattcagataagttggttttgtggaaagatgtaaaatctcagggtaaaactttatcagctggcttgaaattccatgaacgcatgggtactaagggctccttaagagttaaatctccttccaaattagcagtaaacccgaataaaactgacatgccttctaataaaggaatctttgaagatactattgcaaagaaccatgaggaattcttttctaacatggattgtacccaagaagaaaagcatttggtttttaacaagacagccttttgggaacagaagtgctcagtgagttctgaaatgaagtttgattgtatctctcttcagtcagcatctgatcagccccaagagactgcacaagacttaagtctttggaaggaggagcaaattgaccaagaagataactatgagtctagaggttcagaaatgagttttgattgcagttcctcttttcattcactgactgaccaatctaaagtgagtgccaaagaagtaaacctttccaaggaatccactagtgactacccccaacaatctgtaacagaagtaaaccttcctaaggaagtgcacattggtttggttgataagaactatggttccagtagctctgaatcagtggttgacagacccccagtggctgtcacagaaacaaaacttcggaagaaggctcataccagcttggttgataactatggatcgagttgttctgaaacaagttttgattgtgatgtttctcttgagtcagtagttgatcatccccaactgactgtcaaaggaagaaacctgtatagaaacagaggctag

SEQ ID NO: 136130 - DNA, 421 bp, Homo sapiens
ggaacagtagtaatgggactgcccaaatatttcatttcactgtccaccaagtttccattgtcgttttctctatctgcagatgaactacacattgcatctctctttctatggccacggtccaaaccattcggagtgatacaaagaagctgtgcatcccagctaaatgcacttcctgaagtcctgaagaatccaggtgacccagacaaaatgcttaggtttgcagaatcaccaagaaatttgcccgctggagttctagggacatctggacagacggtaaaggaagtgtctctctccaggagcaggtttaccattttcctttgattagacctacacctgggtcctgagccagagcttccttcctctcttgtggatgagaagagttccgtagacatggtcttacgttttcgtcgacccgggaatt

SEQ ID NO: 136131 - DNA, 2055 bp, Homo sapiens
caggaagactctgagtccgacgttggcctacccagtcggaaggcagagctgcaatctagttaactacctcctttcccctagatttcctttcattctgctcaagtcttcgcctgtgtccgatccctatctactttctctcctcttgtagcaagcctcagactccaggcttgagctaggttttgtttttctcctggtgagaattcgaagaccatgtctacggaactcttctcatccacaagagaggaaggaagctctggctcaggacccagttttaggtctaatcaaaggaaaatgttaaacctgctcctggagagagacacttcctttaccgtctgtccagatgtccctagaactccagtgggcaaatttcttggtgattctgcaaacctaagcattttgtctggaggaaccccaaaatgttgcctcgatctttcgaatcttagcagtggggagataactgccactcagcttaccacttctgcagaccttgatgaaactggtcacctggattcttcaggacttcaggaagtgcatttagctgggatgaatcatgaccagcacctaatgaaatgtagcccagcacagcttctttgtagcactccgaatggtttggaccgtggccatagaaagagagatgcaatgtgtagttcatctgcaaataaagaaaatgacaatggaaacttggtggacagtgaaatgaaatatttgggcagtcccattactactgttccaaaattggataaaaatccaaacctaggagaagaccaggcagaagagatttcagatgaattaatggagttttccctgaaagatcaagaagcaaaggtgagcagaagtggcctatatcgctccccgtcgatgccagagaacttgaacaggccaagactgaagcaggtggaaaaattcaaggacaacacaataccagataaagttaaaaaaaagtatttttctggccaaggaaagctcaggaagggcttatgtttaaagaagacagtctctctgtgtgacattactatcactcagatgctggaggaagattctaaccaggggcacctgattggtgatttttccaaggtatgtgcgctgccaaccgtgtcagggaaacaccaagatctgaagtatgtcaacccagaaacagtggctgccttactgtcggggaagttccagggtctgattgagaagttttatgtcattgattgtcgctatccatatgagtatctgggaggacacatccagggagccttaaacttatatagtcaggaagaactgtttaacttctttctgaagaagcccatcgtccctttggacacccagaagagaataatcatcgtgttccactgtgaattctcctcagagaggggcccccgaatgtgccgctgtctgcgtgaagaggacaggtctctgaaccagtatcctgcattgtactacccagagctatatatccttaaaggcggctacagagacttctttccagaatatatggaactgtgtgaaccacagagctactgccctatgcatcatcaggaccacaagactgagttgctgaggtgtcgaagccagagcaaagtgcaggaaggggagcggcagctgcgggagcagattgcccttctggtgaaggacatgagcccatgataacattccagccactggctgctaacaagtcaccaaaaagacactgcagaaaccctgagcagaaagaggccttctggatggccaaacccaagattattaaaagatgtctctgcaaaccaacaggctaccaacttgtatccaggcctgggaatggattaggtttcagcagagctgaaagctggtggcagagtcctggagctggctctataaggcagccttgagttgcatagagatttgtattggttcagggaactctggcattccttttcccaactcctcatgtcttctcacaagccagccaactctttctctctgggcttcgggctatgcaagagcgttgtctaccttctttctttgtattttccttctttgtttccccctctttcttttttaaaaatggaaaaataaacactacagaatgag

SEQ ID NO: 136132 - DNA, 2145 bp, Homo sapiens
atggtctatgaaaggcaagtcaatgcctggatgaactacacattgcatctctctttctatggccacggtccaaaccattcggagtgctacaaagaagctgtgcctaaaaaagagagtttgctgagaacgtccagcatcctcaagccacaggtgggaagtagagacaaagttattctctattggtggcaaaagcagatagattatggcaagtgcacacctggctaccagtgctttctgcaccaggtcctcaagttcaggccgatccggcagctgcaagaggggctcctgggactccgagcaggccctaatccgcgcttggaccacacttcccagcagccttcacgccgcggacgggtcctttgctgggggaagggggattccttcgaagaggtggtcgtggagggcggggcagcagagcagcctttgcctgatcatgcagacatcctccaactgtgggaactctttccagcttgtgtctgaaggtgcttcctggaggggcctgccccactgttcctgtgctgagttacaggacagcctcaacttcagctaccatccctcaggcctgagcctgtccgtcagaccatccagtccgggaaactcccccaaggagcagcccttctcccaagtcctaagacctgagcccccagatccagagaagcttcctgtgccccctgcccctccatccaagaggcactgccgctcactctcagtgcccgtggacctgtctcgctggcagccggtgtggcggcccgccccctccaagctgtggactcccataaagcaccgtggcagtggtggagggggtgggccgcaggtgcctcaccagagccccccaaagcgggtctccagcctcaggttcctcacaagctcccagtgcctcttctcaatgtgccccagctcacagaccctacagccctcctttcttcagcctggccctggcccaagattcctctcgaccctgcgccgcctcccctcaaagtggctcctgggagagtgatgctgagtccttgtcaccttgcccacctcagcgccgcttctccctgtcacccagtctgggcccgcaggcaagccgcttcttgccctctgcccggagctctcccgcatcctccccagagctgcccctggcgacctgagggtctccgcaaccttccccgaaagccgctcacagccttgtgatctggatgcccgcaaaactggggtcaagcggcgccacgaggaagacccccggcgtctgcggccttcgttggactttgacaagatgaatcagaaaccatactcaggaggtctttgtctccaagaaacagcccgggaaggcagcagcatctctccaccatggttcatggcctgtagccccccacccctctctgcttcctgcagccccactgggggttcctcccaggtgctgagtgaaagcgaaaaggaggaggagggggctgtgcggtggggtcggcaggcgctgagcaagcggaccctgtgccagcgggactttggggacctggacttgaatttgattgaggaaaactaaaactgaaaggctacttcctggggccacacagactgactctctcatggctactaacaagtgttcgagttccccaaggctgggggccgagcctgggaatgggggtgagtggagggctccgactcagggcagctggaaatcttctcgctccagcaagctcgaccatgccaagagactggccgggacaagataaacggagctggtggcgggagggacagccccagagcagacccttcctatggcggccctgagtgtgagtatccctgccaccaagagagcaatgggcagggaaggaaggggtctgccgaccccagctcggggaatttcactagcccctttgcttcaaagggcacttgtgtcttagaatttggccagggtggggggttgagtcagcctcctcagagaaactgcgtgagagtgtgtgcgtgcatgggagtgtacttgtggaaaggtgtggttgcgtagccttagggaaggaaggcaattgctccttaacaacagagtatcatgatacccccaggatcttgagttttttacaggatgttgggtttgctcaaggagtcaagaggagggcaccaagttttccttttttataaatagctctggaaccaggcttgtgtatt

SEQ ID NO: 136133 - DNA, 315 bp, Homo sapiens
gtgattatcactggaccaccagaggctcagttcaaggctcaggaaattctgactcaggtaaagcagcaccaacaacagaaggctctgcaaagtggaccacctcagtcaagacggaagtaaaggctcaggaaacagcccaccacagaggcagatgccaaaccaaagacagattgcttaaccaacagatgggcgctgacccctatccagatcacatgcacagtttttacctagccagttgtttctgaggccaggcaacttttgactcctgtctctgtgagaatgtatactttatgctctctgaaatgtatgacaccc

SEQ ID NO: 136134 - DNA, 1998 bp, Homo sapiens
aggacgccaagatccccgtgtcgggacccttcctggtgaagattggctacgcgttcgtggactgcccagacgagatctgggccctcaaggccattgaggcgctttcaggtaaaatagaactgcacgggaaacccatagaagttgagcactcggtcccaaaaaggcaaaggattcgagaaaatgcaggggctgctgagaagtcgattactatcctctctactcctgaaggcacctctgcggcttgtaagtctattctggagattatgcgtaaggaaactcaagatgtaaaattcacagaagagatccccttgtttatcccggctctatcagtcagagccctcatcagcaagcagggccagcacatcaagcagctttctcgctttgctggagcttcaagtaagattgctccagtggaagcaccagatgctaaggtgaggatggtgatgatcgctggatcaccagattgtgaccagacacctgatgagaatgaccaagtggttgtcaaaataactggtcacttctatgcttgccaggttgcccagagaaaaattcaggaaattctgactcaggtaaagcagcagcaacaacagaaggctctgcaaagtggaccacctcagtcaagacggaagtaaggctaagacaatgtttccgtggaagaggggggagtgcagggagggaaaatgtttggggatgaagctgttccacctcagatcatcagccattggattctcataaggagtgtgcaacctggattcccgcatgcgcagttcacagtagggttccagctcctatgagaatctagtgctcctgtgagaatctagtgctcctatgagaatttagccgtgaatggagagatgggtgaacagaaagagactacagagtcttctaaacaatatgggatgttcccagcaagttcacctaaaggaggagaagtgccagccaggccgtccaactcccgctcctctgtggcccaggtgagtgcttcaacaggaaataaagcagccggttcctgtgttggtcaagtgatctgccaagtgaaatggacgcctggagttccgacgcgtgtcttcgagctcatagagggagttcttctccctttgaagaatcccgagaactgtgtaaagctgtttggcaccttgagacataattctagccacgcaggtggctcagactgtctgatcttgtgatagacacttgatgggaatcctgttgcctttctgtgctgacatgtggacatgaaggtgtggaaagagggctcccaggctgcccccatgcggggtttctgttgtttggctaaccttaggcacggcagtgatgtagataccatggagatagaggcacagacccagcttagccggggagcaaggcagcaaggaggtggtaggagatgtggtgggagaaagggcaccaagtacctggctgtgtgaacccagcttgaacctcagtccaccagcaagatttactacaaagagcaaaaaaacaaaccttccacaacgtggaaggggaccagagcaggtaggtctcctggctggggcggcctgcttttattcccttatctggccccacccacatcctgctgattactgccgagggactttgcggcacctagtccaggtactcctgcagcccagagggagctcgtcccccatcaagcccagcaggcgctggccaaccgcgctgagtgcggggcttgccgagccgcgctcacctggaacccgcgccagccagtgagcaccactcgcaaccccagctcccgcccgcgccgctccctccacacctccccaccagcagagagagccggctccggcctcggccagccccagagatgggcccccacagcacagcagcgggctgaagggctcctcgagcgcggccagatcgaggagcgccgccaggttgaggaggtgccgagagcgagccagggctgctagcacgttgttacctctcactttcacgttcaagctctttttggctatgtcctacacattatccttcatc

SEQ ID NO: 136135 - DNA, 456 bp, Homo sapiens
atgcaatcagaaacggagactgttcatctgtttatcccagctctatcagtcggtgccatcatcggcaagcagggccagcacatcaagcagctttctcgctttgctggagcttcaattaagattgctccagcggaagcaccagatgctaaagtgaggatggtgattatcactggaccaccagaggctcagttcaaggctcagggaagaatttatggaaaaattaaagaagaaaactttgttagtcctaaagaagaggtgaaacttgaagctcatatcagagtgccatcctttgctgctggcagagttattggaaaaggaggcaaaacggcaagtacttcagcaaaacctgtgcagtggtatgaaagggaaagcgttgaaagcaaagcccagtacgtacaattgtgttgggtgtgggtggtctccaaggccacgctgctctctgaattgattttttga

SEQ ID NO: 136136 - DNA, 4264 bp, Homo sapiens
ggcacgaggaaataaaaagagctttttttttccctcctcctccttcttttttttggggaggccgcctcctcctaagacttaggaagactggtggatgcgtttgggttgtagctaggctttttcttttctttctcttttaaaacatatctaggacaaggaaaaaacaagcctcggatctgatttttcactcctcgttcttgtgcttggttcttactgtgtttgtgtattttaaaggcgagaagacgaggggaacaaaaccagctggatccatccatcaccgtgggtggttttaatttttcgttttttctcgttatttttttttaaacaaccactcttcacaatgaacaaactgtatatcggaaacctcagcgagaacgccgccccctcgggacctataaaagtatcttcaaggacgccaagatcccggtgtcgggacccttcctggtgaagactggctacgcgttcgtggactgcccgggacgagagctgggccttcaagggccatcaaggcgttttcaggtaaaatagaactgcacgggaaacccatagaagttgagcactcggtcccaaaaaggcaaaggattcggaaacttcagatacgaaatatcccgcctcatttacagtgggaggtgctggatagtttactagtccagtatggagtggtggagagctgtgagcaagtgaacactgactcggaaactgcagttgtaaatgtaacctattccagtaaggaccaagctagacaagcgctagacaagcactagacaaactgaatggatttcagttagagaatttcaccttgaaagtagcctatatccctgatgaaatggccacccagcaaaacccctttctgcagccccgaggtcgccgggggcttgggcagaggggctcgctcaaggcaggggtctccaggatccgtatccaagcagaaaccatgtgattcgcctctgcgcctgctggttcccacccaatttgttggagccatcataggaaaagaaggtgccaccattcggaacatcaccaaacagacccagtctaaaatcgatgtccaccgtaaagaaaatgcgggggctgctgagaagtcgattactatcccctctactcctgaaggcacctctgcggcttgtaagtctattctggagattatgcataaggaagctcaagatataaaattcacagaagagatccccttgaagattttagctcataataactttgttggacgtcttattggcaaagaaggaagaaatcttaaaaaaattgagcaagacacagacactaaaatcacgatatctccattgcaggaattgacgctgtataatccagaacgcactattacagttaaaggcaatgttgagacatgtgccaaagctgaggaggagatcatgaagaaaatcagggagtcttatgaaaatgatattgcttctatgaatcttcaagcacatttaattcctggattaaatctgaacgccttgggtctgttcccacccacttcagggatgccacctcccacctcagggcccccttcagccatgactcctccctccccgcagtctgagcaatcagaatccgagactgttcatctgtttatcccggctctatcagtcagagccctcatcagcaagcagggccagcacatcaagcagctttctcgctttgctggagcttcaagtaagattgctccagtggaagcaccagatgctaaggtgaggatggtgatgatcgctggatcaccagaggctcggttcaaggctcagggaagaatttatggaaaaattaaagaagaaaactttgttagtcctaaagaagaggtgaaacttgaagctcatatcagagtgccatcctttgctgctggcagagttattggaaaaggaggcaaaacggtggaatgaacttcagaatttgtcaagtgcagaagttgttgtccctcgtgaccagacacctgatgagaatgaccaagtggttgtcaaaataactggtcacttctatgcttgccagggttgcccagagaaaaatttaggaatttttgactcaggtaaggcagcaccaacaacagaaggctctgcaaagtggaccacctcagtcaagacggaagtaaaggctcaggaaacagcccaccacagaggcagatgccaaaccaaagacagattgcttaaccaacagatgggcgctgaccccctatccagaatcacatgcacaagtttttacctagccagttgtttctgaggaccaggcaacttttgaactccctgtctctgtgagaaatgtatactttatgctctctgaaatgtatgacacccagctttaaaacaaacaaacaaacaaacaaaaaaagggtgggggagggagggaaagagaagagctctgcacttccctttgttgtagtctcacagtataacagatattctaattcttcttaatattcccccataatgccagaaattggcttaatgatgctttcactaaattcatcaaatagattgctcctaaatccaattgttaaaattggatcagaataattatcacaggaacttaaatgttaagccattagcatagaaaaactgttctcagttttatttttacctaacactaacatgagtaacctaagggaagtgctgaatggtgttggcaggggtattaaacgtgcatttttactcaactacctcaggtattcagtaatacaatgaaaagcaaaattgttccttttttttgaaaattttatatactttataatgatagaagtccaaccgttttttaaaaaataaatttaaaatttaacagcaatcagctaacaggcaaattaagatttttacttctggctggtgacagtaaagctggaaaattaatttcagggttttttgaggcttttgacacagttattagttaaatcaaatgttcaaaaatacggagcagtgcctagtatctggagagcagcactaccatttattctttcatttatagttgggaaagtttttgacggtactaacaaagtggtcgcaggagattttggaacggctggtttaaatggcttcaggagacttcagttttttgtttagctacatgattgaatgcataataaatgctttgtgcttctgactatcaatacctaaagaaagtgcatcagtgaagagatgcaagactttcaactgactggcacaaaagcaagctttagcttgtcttataggatgcttagtttgccactacacttcagaccaatgggacagtcatagatgggtgtgacagtgtttaaacgcaacaaaaggctacatttccatggggccagcactgtcatgagcctcactaagctattttgaagatttttaagcactgataaattaaaaaaaaaaaaaaaaaattagactccaccttaagtagtaaagtataacaggatttctgtatactgtgcaatcagttctttgaaaaaaaagtcaaaagatagagaatacaagaaaagtttttgggatataatttgaatgactgtgaaaacatatgacctttgataacgaactcatttgctcactccttgacagcaaagcccagtacgtacaattgtgttgggtgtgggtggtctccaaggccacgctgctctctgaattgattttttgagttttgtttgtaagatgatcacagtcatgttacactgatctaaaggacatatatataaccctttaaaaaaaaaatcccctgcctcattcttatttcgagatgaatttcgatacagactagatgtctttctgaagatcaattagacattttgaaaatgatttaaagtgttttccttaatgttctctgaaaacaagtttcttttgtagttttaaccaaaaaagtgccctttttgtcactgggattctcctagcattcatgatttttttttcacacaatgaattaaaattgctaaaatcatggactggctttctgggttggatttcaggtaagatgtgtttaaggccagagcttttctcagtatttgatttttttccccaatatttgattttttaaaaatatacacataggtgctgcatttaaaacctgctggtttaaattctgtcatatttcacttctagccttttagtatggcaaatcatattttacttttacttaagcatttgtaatttggagtatctggtactagctaagaaataattctataattgagttttgtactcaccatatatggatcattcctcatgtataatgtgccccaaatgcagcttcattttccagataccttgacgcagaataaattttttcatcatttaggtgc

SEQ ID NO: 136137 - DNA, 1794 bp, Homo sapiens
cgcgtgaactgcttcctgcaggctggccatggcgcttcacgttcccaaggctccgggctttgcccagatgctcaaggagggagcgaaacacttttcaggattagaagaggctgtgtatagaaacatacaagcttgcaaggagcttgcccaaaccactcgtacagcatatggaccaaaaggaatgaacaaaatggttatcaaccacttggagaagttgtttgtgacaaacgatgcagcaactattttaagagaactagaagtacagcatcctgctgcaaaaatgattgtaatggcttctcatatgcaagagcaagaagttggagatggcacaaactttgttctggtatttgctggagctctcctggaattagctgaagaacttctgaggattggcctgtcagtttcagaggtcatagaaggttatgaaatagcctgcagaaaagctcatgagattcttcctaatttggtatgttgttctgcaaaaaaccttcgagatattgatgaagtctcatctctacttcgtacctccataatgagtaaacaatatggtaatgaagtatttctggccaagcttattgctcaggcatgcgtatctatttttcctgattccggccatttcaatgttgataacatcagagtttgtaaaattctgggctctggtatcagttcctcttcagtattgcatggcatggtttttaagaaggaaaccgaaggtgatgtaacatctgtcaaagatgcaaaaatagcagtgtactcttgtccttttgatggcatgataacagaaactaagggaacagtgttgataaagactgctgaagaattgatgaattttagtaagggagaagaaaacctcatggatgcacaagtcaaagctattgctgatactggtgcaaatgtcgtagtaacaggtggcaaagtggcagacatggctcttcattatgcaaataaatataatatcatgttagtgaggctaaactcaaaatgggatctccgaagactttgtaaaactgttggtgctacagctcttcctagattgacacctcctgtccttgaagaaatgggacactgtgacagtgtttacctctcagaagttggagatactcaggtggtggtttttaagcatgaaaaggaagatggcgccatttctaccatagtacttcgaggctctacagacaatctgatggatgacatagaaagggcagtagacgatggtgttaatactttcaaagttcttacaagggataaacgtcttgtacccggaggtggagcaacagaaattgaattagccaaacagatcacatcatatggagagacatgtcctggacttgaacagtatgctattaagaagtttgctgaggcatttgaagctattccccgcgcactggcagaaaactctggagttaaggccaatgaagtaatctctaaactttatgcagtacatcaagaaggaaataaaaacgttggattagatattgaggctgaagtccctgctgtaaaggacatgctggaagctggtattctagatacttacctgggaaaatattgggctatcaaactcgctactaatgctgcagtcactgtacttagagtggatcagatcatcatggcaaaaccagctggtgggcccaagcctccaagtgggaagtgaaattggcttaatttttactgtaggtgaaggctgtatttgtagtagtactcaagaatcacctgatgttttcttattctccttaaattaagagttattttgtgtttgtattcttggctggatgttataataaacatattgttactgtc

SEQ ID NO: 136138 - DNA, 791 bp, Homo sapiens
tcagcttggttctggccacagaggttgctcttctcgcgatgcttcagacctggcggcagggaaagggtgggctaattggagagccaggaagagcgtgaggcggccccacgctgctttcccagaaggctgtgcgtgctcctcgcttcctccgcggtcttccgagcggtcgcgtgaactgcttcctgcaggctggccatggcgcttcacgttcccaaggctccgggctttgcccagatgctcaaggagggagcgaaagtaagggctgaaggaaaggaatgaggtgggagcgtcagcatagggctgcggcggccgcggcgaagtaggagggcctactaacgggctgagcgtgctgccctggctcagcggccgggggaagagaagattccagaaagggaggtgattttggaagggctcggccaccggagcctgcgggcacttctcttcttccgcgaccgggagaaggccgagggatcggcggcacgatcgacattgtacaccttgaaggtggacggatgtgaagccgcgcgtgcgttttgcctccatccataaatggggctaaggcccgtcacccttataggaggatgtgagggagacatcgaccacccgccatgatattgccttgagaactgggacttcgaatatcccctcgcctcgcgagttgtagcatgggggagaacgagaactagccgatccagagaagagagtgggaaaaagggccgggtcttggttgcttgcttcccagtgagaaacataccgctgtcagcttagatgacagaagccatgcgttgacg

SEQ ID NO: 136139 - DNA, 2122 bp, Homo sapiens
  misc_feature (1)...(2122): n = a,t,c or g
ccttgcttcaccggccgggggaagagaaaattccaaaaagggaggtgattttggaagggctcggccaccggagcctgcgggcacttctcttcttccgcgaccgggagaaggccgagggatcggcggcacgatcgacattgtacaccttgaaggtggacggatgtgaagccgcgcgtgcgttttgcctccatccataaatggggctaaggcccgtcacccttaaaggagcacttttcaggattagaagagactgcgtatatgatacatactaacttgcatggagcttgcccaaaccactcgtacagcatatggaccaaatggaatgaacaaaatggttatcaaccacttggagaagttgcttgtgacaaacgatgcagccactattttaagagaactagaagtacagcatcctgctgcaaaaatgattgtaatggcttctcatatgcaagagcaagaagtttggagatggcaccaacttttgtcctggtatttgctggcagctttcccgtcaattacctgaaaaacctttcggaggattggcctgtcagtttcagaggtcatagaaggttatgaaatagcctgcagaaaagctcatgagattcttcctaatttggtatgtttgttctgcaaaaaaccttcgagatattgatgaagtctcatctctacttcgtacctcccataatgagtaaacaatatgggttaatgaaagtattttctggccaaaccttatttgcttcaggcatgccgtatctatttttcctggattccggccatttcaatgttgataacatcagagtttgtaaaattctgggctctggtatcaggtcctctttaagtattggctggcatggtttttaagaaggaaacccgaaggtgatgtaacatctgtcaaagatgccaaaaatagcagtgtactcttggtccttttgatgggcatggataacaggaaacttaaggggaacagtgtttggataaaaggactgccttgaaggatttggatggaatttttaggtaaggggagnaggaaaacctccatggggtgccaccagtccaaaggctattgctgatactggtgcaaatgtcgtagtaacaggtggcaaagtggcagacatggctcttcattatgcaaataaatataatatcatgttagtgaggctaaactcaaaaatggggatctccgaagactttgtaaaacttgttggtgctacagctcttcctaggattgacaccttccttgtccttgaaggaaatgggacactgtgacaagtgtttacctctcagaagttggagatactcagggtggtggtttttaagcatgaaaaggaagatggcgccatttctaccatagtacttccgaggctctacagacaatcctgattggatgacatagaaaggggcagtagacgatggttgttaatactttccaaggttccttacaaagggataaacgtcttgtaccccggaggtgggagcaacaggaatttgaattagcccaaacagatcacatcaatatggagagacattgtcctggacttgaacagtatgcctattaaagaagtttgcctgaggccatttgaaagctattccccccgcgcactggcagaaatactctggagaaaactctggagttaaggcccaatggaagtaatctcctaaactttatgcagtacatcaagaaggataacaaaaacgttaggattagatattgaggctgaagtcccctgcttgtaaaggacatgctggaagctggtattcctagataccttaccctgggaaaatattgggctatcccactcgctactaatgctgcagtcactgtacttagagtggatcagcatactcttgtgtgattcttttttatgcagatcatcatggcaaaaccagctggtggggcccaaagcctcccaagtggggaagaaagacctggggtgatgaccaaaatggtttgaaaattggctttaatttttactgtaggtgaaggctgtatttgtaagtagtactccagaatcccctgatgtttttttattctccctaaattaagagttattttgtgtttgtattcttggctggatgttataataaacatatgtgttactgtcaaaaaaaaaaaaaaaaagtcgac

SEQ ID NO: 136140 - DNA, 346 bp, Homo sapiens
ccattctgatgtacaccaagttgtttgtgggctttctgaaccgcgcgctccgcacagacctggtcagccccaagcacgcgctcatggtgttccgagtggccaaagtctttgcccagcccaacctggctgagatgattcagaaaggtgagcagctattcctggagccagagctggtcatcccccaccgccagcaccgactcttcacggcccccacattcactgggagcttcctgtcaccctggccaccagcggtcactgatgcctccttcaaggtgaagagccacgtctacagcctacgcctcgctcagctcatcacacaggccaaacacacagccaagtccatctc

SEQ ID NO: 136141 - DNA, 484 bp, Homo sapiens
ccaggtcctctcagccaagggtggggctgtgtggcaaatccctccagcctgctctgaaggcagctgccaccttcagggctggtgcagcttcccccgctcggtcagcagtatcatggcagaggcgtagaggacgtagcccagggtgagcagcagcatgcatgggaggggcccgacgcagaacagagaggccacgaagaaggccagcagcagcgagaccagcgtccggtaactgcccaggaagcgcaggctgagcctggggccgcgggtgtggccggccacctgcctccgccccacaggactcagcaggtgcctgctggccagcccaggttctgtgaggtggtagcgacagaagctgccgaggaagtcatcccgggaacacagagccgccatctgtcctgcgaactggtaccgccccaggggcgtaaggatgagtccgttctcacccacgacgcagtcggggagctgctgttttccattctcatcc

SEQ ID NO: 136142 - DNA, 412 bp, Homo sapiens
  misc_feature (1)...(412): n = a,t,c or g
ccatccgccctccccatgtcagccacctactgtgtgggagatgttgccaggcagggcctcaggaggacacccctgggtcagggctccccagacacctcagagacaccccagaatcctaagggcagcagtcgggtactctgccccggggaagtgggtgccagttcgtctcctgccttctaggtgagcagctattcctggagccagagctggtcatcccccaccgccagcaccgactcttcacggcccccacattcactgggagcttcctgtcaccctggccaccagcggtcactgatgcctccttcaaggtcaagagccacgtctacagcctggaggaaaaggaaagcaagtacaccccagtatgtattgcggccgctctggaggttgcnccntaacctcgatgtcaatcctt

SEQ ID NO: 136143 - DNA, 3011 bp, Homo sapiens
  misc_feature (1)...(3011): n = a,t,c or g
ctgggccaagcacttccataccacaagctggtcacagttcagaccaagcagtgcaaggcacatctgggtgccaggcacagtggtgccccatggggtggccccactcctggcctggctcatgcctcccgtgggggcagcagagcaactggctcagggcgggatgtggtcagacctggaggcggagtgctatgggtgccacgctccttcccaggccctcacccctccttctccacccaggagtcgttcacgcctactgaggagcatgtgttggtggtgcgcctgctgatgaagcacctgcacgcctttgccaacagcctcaagccagagcaggcctcaccctccgcccactcccacgccaccagccccctggaggagttcaaacgggcaggttcctacccttacctgaccagggagtactctgccccctgggctgggaaaagcccaccctggcttctggagggccagcaagagccaaacctcacagggctgtgcatgtctctcctgcgccctctggaggaagtcctggagatgtggctgagctacctgcagccgtggcggtacgcgcctgacaagcaggctccgggcagcgactcccagccccggtgtgtgtcggagaaatgggcaccctttgtccaggagaacctgctgatgtacaccaagttgtttgtgggctttctgaaccgcgcgctccgcacagacctggtcagccccaagcacgcgctcatggtgttccgagtggccaaagtctttgcccagcccaacctggctgagatgattcagaaaggtgagcagctattcctggagccagagctggtcatcccccaccgccagcaccgactcttcacggcccccacattcactgggagcttcctgtcaccctggccaccagcggtcactgatgcctccttcaaggtgaagagccacgtctacagcctggagggccaggactgcaagtacaccccgatgtttgggcccgaggcccgcaccctggtcctgcgcctcgctcagctcatcacacaggccaaacacacagccaagtccatctccgaccagtgtgcggagagcccggctggccactccttcctctcatggctgggctttagctccatggacaccaatggctcctacacagccaacgacctggacgagatggggcaagacagtgtccggaagacagatgaatacctggagaaggccctggagtacctgcgccagatattccggctcagcgaagcgcagctcaggcagttcacactcgccttgggcaccacccaggatgagaatggaaaaaagcaactccccgactgcatcgtgggtgaggacggactcatccttacgcccctggggcggtaccagatcatcaatgggctgcgaaggtttgaaattgagtaccagggggacccggagctgcagcccatccggagctatgagatcgccagcttggtccgcacactctttaggctgtcgtctgccatcaaccacagatttgcaggacagatggcggctctgtgttcccgggatgacttcctcggcagcttctgtcgctaccacctcacagaacctgggctggccagcaggcacctgctgagccctgtggggcggaggcaggtggccggccacacccgcggccccaggctcagcctgcgcttcctgggcagttaccgacacgctggtctcgctgctgctggccttcttcgtggcctctctgttctgcgtcgggcccctcccatgcacgctgctgctcaccctgggctatgtcctctacgcctctgccatgacactgctgaccgagcgggggaagctgcaccagccctgaaggtgtcagctgccttcagagcaggctggagggatttgccacacagccccacccttgggctgagaggacctgggaagcccctccaggagggaacacggtcatcctcgggcttctggagcggggttcctgcagccgcagaggcatctggaggaaacgcaaccaagaaaggaaggcaggacgggccccagcaaaggagtagctgccagggcttcaacagctacggttctgtgacagcgcagagcttcagcgcccggcctttccctccctctgccaaggactcatggccaagccagctcttcggggccttttttccagtgcccatttggctactctgctgcaccaagcttgggagccagcctgccaacagccacctggggcctgggcttccccacttggctggcctttgaggttggcagagtgggttgtggcgcttcctctctctgtgtgggaccaggacagtggcttaagtctccactccaggaaagaatcaaagtttctagagttgtgagaaaaccagagagtggctgtcctgattcttcactgtgaggggcgttcttcatgttctcccagctgttccaagactgggccgtaggaatttccatgttttcagggagcctaaggaccctcccaggaggcccaggggctttcaccgcaggaccccaaggccattgaggcacatcacccaaaggcagtgggccaacatcgcggacccctgtgccttgtcacagaatgggtgctggtcctcaggcattggggacactgctgggtcgatggggtcggaattctgccagtttctgctctgcaacccaaagatggtcagaagcattgtcacttcagtaacatcaagttgctcaaagacatgggcaacccgttcagtaggttacttaacgtattcaaaaatatacaaactacaagattctcttgacaagaaaaccaagcacggggtctttcaccttcattcaccccacaggcggacatgcgagggagaacagcatncttcagtggtgatttccaaaccaagcctttgttttcggtgttggggttttgggggttttgctttaatgtttttgaaattgtaaatgttgggctttgtattttgatgtaaactgagaataatggcattttagggcctctcaccaacaatgcaagcttgtacatcaccacggatctgaataaacatgtccttgattctgag

SEQ ID NO: 136144 - DNA, 563 bp, Homo sapiens
taagccccacccagccccccagtgcccgtcttcctgtcccatctgctcagagagaggtggggccgagacttgctggagagcttccctcctttcccatctggggagtccgcgggccacagtgggcaggtggcaccgggggtcagcatgcaggggcgccagaggcccaggctgctggccggacagtcaccctctgttctcgctacatcccttgccccctgtccatttatttaagcccccataggtgcccttcacccccaaaaccagctgtacagaatctttgatacagacctatttgctaggggtgctgccggggatttggggtcagcatctggccccctatctcctgaccagctgagtcatgaggccggtttctctctctctcccacttttgtcccccagccccgacctctcaggttagaccctgggccctggagcttagggattctccccaccccagccccacacctgctccttccctaatgctttgaggttttcttggttggaagctgcagctggcccaagaaagaaaataaaaaacaacacttttgcatgagaaaaaaaaa

SEQ ID NO: 136145 - DNA, 466 bp, Homo sapiens
ccgggggtcagcatgcaggggcgccagaggcccaggctgctggccggaaaagtcacccctctgttctcgctaaatcccttgccccctgtccatttatttaagcccccataggtgcccttcacccccaaaaccagctgtacagaatctttgatacagacctatttgctaggggtgctgcccggggatttggggtcagcatctggccccctatctcctgaccagctgagtcatgaggccggtttctctctctctcccacttttgtcccccagccaagctctaaagcacatgtagcccgctgagaccagcttcctgcagccccgacctctcaggttagaccctgggccctggagcttaggggattctccccaccccagccccacacctgctccttccctaatgctttgaggttttcttggttggaagctgcagctggcccaagaaagaaaataaaaaacaacacttttg

SEQ ID NO: 136146 - DNA, 1134 bp, Homo sapiens
ctaatatgcgtcttccgtgcctgacaggacggcgcaggcgaaccacccgttgtcagtcatcactttcagaccgccaatagaagcaccgttgcccggagcagcagtcaggcgcgcggtgatcgggtcacctgccagggtgctggcgctcaccatttccggagacagcttagacagcgccgctttttgtgcggaagtcgcagctgcctgcaaacggttgtagctcggcgcaccaaagcgttttgccagttcgttgtagtgttcctgcgggttcttaccggtgacagcggtgatttccgccgccagcagacacatgatgatgccgtctttgtcggtggaccacggcgtgccgtcgaaacgcaggaaggaagcccctgcactctcttcgccgccaaagccgaagctgccgtcgaacagaccatcgacaaaccatttgaaacctaccgggacttctacacagcggcccaagtcgttgaccacactggcaattttcacagaaacagctcgaagataagaatagaatatcatcagtggatcttttgtcacattgtggctggtccggccctcacgagtgggtgcggggaccgggtctgccttcccctttcctcctggattgcggaacacgggaggcccccttgtggttcggaaggctccagacgtggatcggtgcgcccctcgtctttggacgacgcaccttgtggtgtcacctgcccggaggcacatcccctcgttgcaggtgcgtgagggacccctcgcggcgatatgcggggacgactgtactgtagcctcccagggcagtgtctctgtggcttcataaagtgtggagccccactgaggccaggactgcccttctcttctgttccagctgctggaaacgcgttctgccaggctgcacagctgcacctgcagctccagagcaagcacgacgcagccacctgctttgtggacgctggcaacgcattcaagaaagccgacccccaaggtgagggcctctgaatttgttatgtaggggcctggataggaggcactctccatattaccctcctcaaaggtctgcagtggctggctgtactccagtggactggtgaacttgtcctgccagtccttatatgagtttcccctacacatccttttcat

SEQ ID NO: 136147 - DNA, 894 bp, Homo sapiens
ctgttcccagctttctctgattcccgggaatgcaagttgatgaaaaaattgctagaggccccacgaggagcaaaatgtggaccagctacaccgaagccggtgaaggaatacgactccatcttcccgggctggacccagtggctcaccacattggttgctgcgcatcaagaagaccatccagggccgatgagaaggacctgcgctaagccccaccagccccccccagtgcccgtcttcctgtcccatctgctcagagagaggtggggccgagactttgctggagagcttccctcctttcccatctggggagtcccgcgggccacagtgggcagggtggcaccggggggtcagcatgcaggggcgccagaggcccaggctggctggccggacagtcaccctctggtctcgctacattcccttgccccctgtcccatttattttaagccccccataggtgccccttcacccccaaaaaccagctgtaacagaatcttttgataacagaccttatttgcctaggggtgctgcccggggaatttggggtcaagcatctggcccccctatctccctgaccagctgaagtcatgaggccggtttctctctctctccccacttttgtcccccagccaagcttataaagcacatgtagccgctgagacctgctgtttctgtctgggggcaggctcctcttcccccagcccccgggagcctcccccagcttcctgcagccccgacctctcaggttagaccctgggccctggagcttaggggattctccccaccccagccccacacctgctccttccctaatgctttgaggttttcttggttggaagctgcagctgtgcccaagaaagaaaataaaaaacaacacttttgcatgaaaaaaaaaaa

SEQ ID NO: 136148 - DNA, 1405 bp, Homo sapiens
ctgggcgtggacttcgcgacgcgcgccggtgcgacgtcaacgcagccgggcgagttttaccgatctgtgttccgcggcccggccgcggctgagtcttcccaggggtcagggtcaggcgctgtgctagaaaccctttgaggccgccatgtacaattccgggaaggaagcggaggcgatggcgctgttggccgaggcggagcgcacaagtgaatgaactcgcagtccttcttctctggcctctttggaggctcatccaaaatagaggaagcatgcgagaatctacgccagagcagcaaacatgttcaaaatggccaaaaactggagtgctgctggaaacgcgttctgccaggctgcacagctgcacctgcagctccagagcaagcacgacgcagccacctgctttgtgggacgctggcaacgcatttcaagaaagccgacccccaaggagggccatttaactgttttgattgcgtagcattcgagatctacaacagacatgggccgaattcacgattgcggccaagcaccacatctccatttgctgagatctattgagacagaagttggtggacatcgagaaggccattgccccattaccgagcattggcagattactaccaaggcgaggagtccaacagcctcagccaacaagtgtctgctgaaggtggctggttacgcctgcgctgctggagcagtatcagaagggccattgacatctacgaacaaggttggggaccaaatgcccattggacaagcccccctccgtcaaagtacaagcgccaaagactacttctttcaaggccgccctttgccacttttgcatggacatgcttcaagcccaagctggcttttccaaaagtatgaggagctgttcccagttttctctgattcccgggaatgcaaattgatgaaaaaaattgctaaaggccccacggggagcagaatgtggaccagctacaccgagttcggtgaaagggattacggattccatttcccggctggaaccagtggctcaaccacccattgcttgcgcattcaagaagaccatccggggcgattgaggaaggaacctgcgctaagccccacccagccccccagtgcccgtcttcgctgtcccatctgctcagagagagccaagctctaaagcacatgtagtccgctgagacctgctgtttctgctgggggcaggctcctcttcccccagccccgggagcctcccccagcttcctgcagccccgacctctcaggttagaccctgggccctggagcttaggggattctccccaccccagccccacacctgctccttccctaatgctttgaggttttcttggttggaagctgcagctggcccaagaaagaaaataaaaaacaacacttttgcaaaaaaaaaaaaaaaaaaccc

SEQ ID NO: 136149 - DNA, 1041 bp, Homo sapiens
atgcaagtggggaagcctctgctacccacttctttatcagttgaagatgctgccatattgcttcagcaggtgatgagggcattcagcaaacaggcctcaactgtagtctttagcgacactgttgtagtcagtgaaaaatttataaatgactgtacagaactgttccgtgagctgatgcaccagaaagctgaaaaggaaatgaaaaataatcctgtgcatttaatcactgaagaagatctgaaacaaatctccactttagaaagcgttagtacaagtaaaaaggataaaaaagatgagcgaagaaggaaagcaacagagggcagtggaagcatgagaggaggaggtgggggcaatgccagagagtacaaaattaaaaaagtcaagaagaaaggaagaaaagatgatgatagtgatgatgaatctcaatcatcccacactggtagacctcttaataaaacttatctcgaggtggtacgttcagtattcatgtcttcaacaacttctgcttctgggacgggcagaaaacgcacaatcaaggacttgcaagaagaagtttcaaacctgtacaataacattaggttatttgaaaaagggatgaagttttttgcagatgacacacaggctgctcttaccaaacacttgctgaagtcagtgtgtactgatatcactaacctcattttcaacttcttagcttcggatttaatgatggcagtagacgatcctgcagccattacaagtgaaataagaaagaaaattttaagtaaattatcagaagaaaccaaagtagctcttacaaaactccataactctctgaatgaaaaggatcagcatgctcttttggtaaagtatcaaggtttggttgtaaagcagctagtcagtcaaagtaagaagactgggcagggagattatcccttgaataatgaattagacaaagaacaagaagatgttgccagtactactcgtaaagagcttcaagaactttcttcatccattaaagaccttgttctcaaatctaggaaatcatctgtgacggaagagtaa

SEQ ID NO: 136150 - DNA, 4404 bp, Homo sapiens
  misc_feature (1)...(4404): n = a,t,c or g
tttcgtgcctgtcggctgacgtgtctgcagttcctccgcgtctactgcgagtcaggccgtgatggcggacgcctgggaagagattaggcggttggcggccgacttccagcgggcgcagttcgccgaggccacgcagaggttgtccgagcggaactgcattgagattgttaatagattgattgctcagaaacagctagaagtagttcatacactcgatggaaaggaatatattactccagcccaaattagtaaagaaatgagagatgagctacatgtccgaggtggtcgagtaaacattgttgatctacaacaggtaattaatgtggacctgattcatattgaaaatagaattggtgacattattaaatcagaaaagcatgttcagttagtgttgggacaacttgatagatgagaattatttgggatcgcgtgggccaagaggtcaatgataaattgcaagaaagtggtcaggtcaccatatcagaactgtgtaaaacttatgatcttcctgggaactttctgacacaggcactaactcagcgacttgctataattatcattggacatattgatcttgataatagaggagtaatttttacggaagcttttgtagctcgacatagagcacgtatccgtggactattcagtgctattacccggcctacagctgtgaattctttgatttcaaaatatggatttcaggagcagcttctttactctgtgcttgacgaacttgttaatagcggacgcttacgaggcactgtggttggtgggagacaggataaagctgtgtttgtccctgacatctactccaggacacagagtacttgggtggattcctttttcaggcagaatggctatctagaatttgatgctttgtccagacttggaatcccagatgctgtaagctacataaagaaaagatataagactacacaactcttgtttttgaaagcagcttgtgttggtcaaggacttgtggatcaagtggaagcatcagtagaagaagccatcagctctggaacatgggttgatattgcacctctgctacccacttctttatcagttgaagatgctgccatattgcttcagcaggtgatgagggcattcagcaaacaggcctcaactgtagtctttagcgacactgttgtagtcagtgaaaaattttataaatgactgtacagaactgttccgtgagctgatgcaccagaaagctgaaaaggaaatgaaaaataatcctgtgcatttaatcactgaagaagatctgaaacaaatctccactttagaaagcgttagtacaagtaaaaaggataaaaaagatgagcgaagaaggaaagcaacagagggcagtggaagcatgagaggaggaggtgggggcaatgccagagagtacaaaattaaaaaagtcaagaagaaaggaagaaaagatgatgatagtgatgatgaatctcaatcatcccacactggaaagaagaagccagagatcagttttatgttccaggatgagattgaagattttttaagaaaacacatacaagatgcccctgaggagtttatttcggaacttgctgagtacttaataaaacctcttaataaaacttatctcgaggtggtacgttcagtattcatgtcttcaacaacttctgcttctgggacgggcagaaaacgcacaatcaaggacttgcaagaaggaagtttcaaacctgtacaataacattaggttatttggaaaaaggggatggaagttttttggcagatgacacacagggctggctcttacccaaacacttgctggaagttcagtgtgtactgatatcacttaacctcattttgcaacttctttaggcttcgggattttaatggatgggcagtaggacgatcctggcaggccatttacaagtggaattaaggaaagaaatttttaagtaaattatcagaagaaaccaaagtagctcttacaaaactccataactctctgaatgaaaagagcatagaagactttattttctgttctggattctgcagcagaagcttgtgatattatggtgaaaaggggagacaaaaaaagggaaagacagatactgttccaacatcgacaagcactggctgaacagctaaaggtcacagaagaccctgctcttattctgcacctcacatcagtcctgttgtttcagttttcaacccacagcatgctccatgcaccgtggaagatgtgtcccacagatcattgcttttcttaatagtaaaattcccagaggatcagcatgctcttttggtaaagtatcaaggtttggttgtaaagcagctagtcagtccaagtaagaagactgggcagggagattatcccgttgaataatgaattagacaaagaacaagaagatgttgccagtactacttcgtaaagagcttcaaggaactttcttcatccattaaaagaccttgttcctcaaatctagggaaatcatctgtgacggaagagtaatgatcttaatttacatttgtcatatagtaagcattttcccccaagggttgaaggtgagtggtcacaaaaaagtagtcactatacaactcccctctccctgcaaaaaccacctcatacacacacaattcagttaaaacagtagtattgtattaaatgtaaatcttaaaaagatgtgaatttttgtaaattgggttcttcatggaagttttttttccacctgatgttcacacaaatactatatgaaatttttcacattattttcacataattttaaaaattaccatatttccaggtttgttctctttcccaaatgttgaatgaaaaacaaattttcccaatccatttatccctggggganggattcatttgttgcgagtgcccagtatacttaaatgtatactttatatacatttaagcagaaatttaaaatgtggtctttttttttttaaaagaaacacttctgtgtcagaaatgaaaataaatcatgttttttatttttaaatagaaagcacttcaaaactaaaatacagaaatttacaaaaaagaaaaattattactaagcccttgctcttatttttggcagaataaacattgattttggttggggctgcaaggatgcctttacaggtgcacaagaacgctagagtggcccatgcattgctgtgttctcttctaaaacaagctactaacaagagagagaacacatgcaatttattaccagtaagcataagtcatatttaacattggaataactaagcattttatacaaagatttttctttgacccagtttgcatttgtacattttatttttttagttcaacagctgctctgtcacataatactttgtaaatactagtgtgaaaaacaggatagggatgcccttttcccagtggtagggagcatctgtaagtgcatttaaatcattagaagcttttttcccaaaacctagaaacccttattaaaaaatagacatttttttctaaagattattagttaaaaataactaaaagagttccttagagtaatcatttcaaccaaattaatttcaagcaacaacttacttactatttatcaaaaagggatttaattattttgaatataattataaattaaatttcaaatatttaaaaatactattttatataattccttatgacattttaaactttatattttaaaatatttgaatacgaaaagatcagtctacctctactccattctagacaaagtattaatccttagtggaaagtaattaattaaattgccaacttggcattattattaaacttgataggaacgcaacattaaatttaaaaatgttttcccgtgggtaattttctattatatatattttcatatgggcaaagggaaaaaatgataaatcctctgtaatcacaaaccccaatttcgttttgtttattcagcttctaaaatattgaacacccagacttttaattcaaccctttaaggacccttatcatttatgtttcagtaggatatcaaagtaatccatgtttgtgtcaaatgatccatagaaaataaataggaggaggacagtgaagcaagttaaaaggtaaagccttgttttaatttgtttgcattaatttyyyytcatttgtcaaaatgcttctyttgttgccacgagtaaagaacagtttttattgttttgtaagtaaaattacgtagctgattttgtatgtaaagattaatttccataataaaaattattgtatgtttactgtgatcttaatgggcagggttaagaaagttatttaaaataaagttacctattctactaaattttatagtactttgaagcttctattaattaacacaaagattaattggtgcatatattttatatatatacattttgaattctcattttgaacattattaaaggattttatttttcttacac

SEQ ID NO: 136151 - DNA, 711 bp, Homo sapiens
gtcctgtcattgtttgatggcatcgcgacaggctacctagtcctcaaagagttgggcataaaggtaggaaagtacgtcgcttctgaagtgtgtgaggagtccattgctgttggaaccgtgaagcacgaggggaatatcaaatacgtgaacgacgtgaggaacatcacaaagaaaaatattgaagaatggggcccatttgacttggtgattggcggaagcccatgcaacgatctctcaaatgtgaatccagccaggaaaggcctgtatgagggtacaggccggctcttcttcgaattttaccacctgctgaattactcacgccccaaggagggtgatgaccggccgttcttctggatgtttgagaatgttgtagccatgaaggttggcgacaagagggacatctcacggttcctggagtgtaatccagtgatgattgatgccatcaaagtttctgctgctcacagggcccgatacttctggggcaacctacccgggatgaacaggcccgtgatagcatcaaagaatgataaactcgagctgcaggactgcttggaatacaataggatagccaaggatctttggctttcctgtgcactacacagacgtgtccaacatgggccgtggtgcccgccagaagctgctgggaaggtcctggagcgtgcctgtcatccgacacctcttcgcccctctgaaggactactttgcatgtga

SEQ ID NO: 136152 - DNA, 2951 bp, Homo sapiens
atggacaggggagacttcaggtggagtcatcgggaaaagcctctccataaagtgaccttctgggagaaaaccgagggcagctgctcccggctccgcggccgcagcccgcgtggacgctccgagcgccccccgacggacgggaccggctccctggcggtcgggcgagcgggcggcaacgctgcccggccggcagcgctggggttaagtggcccaagtaaacctagctcggcgatcggcgccggagattcgcgagcccagcgccctgcacggccgccagccggcctcccgccagccagccccgacccgcggctccgccgcccagccgcgccccagccagccctgcggcaggtgagcgccccggggccccggggaggctcggccgccagctgcttcgagggctgctaggggagggggatcctcgtcaacggggcctgcagcgaccagtcctccgactcgcccccaatcctggaggctatccgcaccccggagatcagaggtggctgggcagtggggactggggtggtgtcaggcgctgacatagtgagcggtcactgcagacaatggtctctgctctccctttttcagggctcagggactttgtctttggctttcatcacgtgggccttccgggaaaccaggactcgttcagaaagcccagctgtaagtagccacacctcgagccaaagcacttgtggccaacactctacatagcatacatagcatgcccgaggccggcagggccgcaaccatgtggacgagtcccccgtggagttcccggctaccagggttggttccccagatgcccagacccctgcccgcagtctctaactgggagatatgcctcactcacttaccatcgacctcacagacgacacagaggacacacatgggacgccccagagcagcagtaccccctacgcccgcctagcccaggacagccagcaggggggcatggagtccccgcaggtggaggcagacagtggagatggagacagttcagagtatcaggtatggccgagaggggctcctgcccagggtgactgaggaccctgaacacggggaaaaaccagttacgccatggtggtgtcttggaaggccacctccaagcgacaggctatgtctggcatgcggtgggtccagtggtttggcgatggcaagttctccgaggtgagtccggggaagggcaaggggttctgcaggcctgaggctgtgcctgcctgcctccctttgaataagctcgtctcctatcgaaaagccatgtaccatgctctggaggtaacatgggatgagggaatgagggctaagccctgagagcagggatgaagcaagagacccacagaattggaggaccagctgaagcccatgttggagtgggcccacgggggcttcaagcccactgggatcgagggcctcaaacccaacaacacgcaaccaggtgggaatgagtccccatggcagcacccgctgcctctgctggtgggaccacttcttgggagagtccgcctcaagacaaattgctataacaacggcaaagaccgaggggatgaagatcagagccgaggtgattgttgggtacctgggatcatgggacagatgggaggaggacgctgcagatcaggaattgatgtcatccccctcacaccctggctagggctctaggcctgccttgtctgtcagacatgccgggtaagtcctcctactactgccctggaccttcctccccttgcctcctctaactcccctctccttccctgcgagggccgagagctgctgctttgcagcaacacgagctgctgccggtgagcactgggccctgtggggtggatgtgggtgggcccccaaggctcctacgttcctgcagtctaggagccctggagctgttacatgtgtctcccgcagcgctgtcatggcgtcctgcggcgccggaaggactggaacgtgcgcctgcaggccttcttcaccagtgacacggggcttgaatatgtaagccacaggctcccgcctctaccaccacagatcccaggggcacagggtgttggaaagctctggtttgatggcatcgcgacaggtgagttcggggaacacctggagacactgctatcgtgtcacaacagggtagccagggagtcagaagagtccattgctgttggaaccgtgaagcacgaggggaatatcaaatacgtgaacgacgtgaggaacatcacaaagaaaaatgtgagggcagtctgtaccttgcgggcctcatctcttcctgtctttttccccagtcctccacacccgaatccagccaggaaaggcctgtatggtgagcatccttctctctggcagtccctggagagcctatgtcacctgaccactggcccaggtgcagggaataaggtgggttgggctggaggtttcaaatgaaccctgcgctgtcatcttttctgagcacagagggtacagagggacatctcacggttcctggaggtgagggaatctggggacctgattgtcacagacagccagggcagggaaagcgctgctggcagtgacaacctacccgggatgaacaggtaacaaagggctcttagtgggtcaggtaacagccaagttaaatatgtgataacaagctctgacaccaaggtaagacgagctgtggccctctggaaaaatgcacttggtgacctccaagtggggacttgggagatccctgttgtcatgaatggcaaagaagatgttttgtggtgcactgagctcgaaaggtgagcaaggctgcacttggagagggaaactgtgtagatcaaaacacaaatgggcagacatgggctgctgggaaggtcctggagcgtgcctgtcatccgacacctcttcgcccctctgaaggactactttgcatgtgaatagttccagccaggccccaagcccactggggtgtgtggcagagccaggacccaggaggtgtgattcct

SEQ ID NO: 136153 - DNA, 1233 bp, Homo sapiens
tcaaccacaaaactctggtgttaaattgcaataagtgccagcaccttgtgatgtcagctccatgccacccactgaattgtagctatcatcatccatgatcttcgaaagaccaagctctgtaatttttctctctccacacactgtaccatttactaaaagaatattccctggtttgaggtcatagtgtatgatgggaggttttattttatttaagtactttaaagcatttacagtctgcatgataatggaccaggcctctttctctgacattaatttgtgctgtttcagatagaagtttagatcatttccctcacagtattctaacactgtacaaaatgagtcagtatccagtgaaaagtaatcatacagcttaattattctgggatgatccagttctttatgaatccagtattccctacatgcatgcttgtggtaattctcctttttctcatctctccagtttttatttaactggtgaattttcacagctacgtatctttgctctattagttcaaatgccttgtaaactttactgaaacctcctctatccaaaagatgtaacaacaaatatctgtcatttagcattggatgatctttaaattgtgagttatcttcattatgtatcctttttagttccccgatacgtagatttctaaccctttctagcctttccagctctgcctggatctctgcttcctcctttttaagatgacctaaccggagtttgaagatttcttcttgttcatggtattctgctaatgttaacgttttattttcagctccattggtcctgcttttccactgtttctgctcactggttgcaggagggtcctgacccatggcaggaggtttccgctttgctaacattttccgttgtctatctcttccctctgtgaatttatccttttctgatgcttgataagattctgggctctccagcagatgtatctggttggtttctccaaagagagacaccagcaatttggcaccacagttctggtagtaatgatgtctcttacaaggtggcccctccttcatgacagcagttcttactgggctctggtaacactgtttccctccttgcccttcaaggctcagaatggcaatggcttcctgctgatacaagtctctgggtgtttcactgtcccttgtttcacctaagtcatctgggagaaggatgcacaaaaatataaaatttagctcagcaaggatgaagtagggaatggccatcat

SEQ ID NO: 136154 - DNA, 4829 bp, Homo sapiens
  misc_feature (1)...(4829): n = a,t,c or g
atggcttataagcaagggtttttaaaggtgatggtacatttcaggaaagcagaagttacaggcaaaaatcatacatcagtacatgaaggttatacattgatttcgccagctgcccaagttctgaccatttcatgtaaaaagagtatactattacaggaacaagtgtcattcaaggatgtatgtgtggacttcactcaggaagagtggtatctgctggaccctgctcagaagattctatacagagatgtgatcctggaaaattatagcaatcttgtctcagtagggtattgcattactaaacccagaagtgatctttaagatcggagcaagggagaagagccctgggatattagaaaaagggattccccaagcccagtgcccancccagaaaaggaaatggaaagttggatgaacgtggttagagagcagcccaggaaaatgaagatgaccatttttggggagcctcctattcccacaaccaacaaaacagtaagtgtagaaaatggagatagaggaagcaaaactttcaatttgggcacagaccctgtttctttaattaaattatccctataaaatatgtgactcatgtgagatgaatttgaaaaatatttcgggcttaattattactaaaaagaactgttccagaaagaagcctgatgagtttaatgtatgtgagaaattgctccttgatattaggcatgagaaaatccctattggagagaagtcttataaatatgatcaaaaaaggaatgccattaattatcaccaggatctcagtcagccaagttttggccaatcctttgagtatagtaaaaatggacaaggcttccatgatgaggcagcattttttacaaataagagatctcagataggagagacagtctgtaaatataacgaatgtggaagaaccttcattgaaagtttaaagctgaatatatctcaaagacctcatttggaaatggagccgtatggatgcagtatttgcgggaagtccttctgcatgaatttaaggtttggacatcagagagctcttacaaaggacaatccttatgaatataatgaatatggggaaatcttctgtgacaattcagctttcattatccatcagggagcttacacaagaaagattctccgtgaatataaagtgagtgacaaaacctgggaaaagtcagctctcttaaaacatcaaatagtacacatggggggaaagtcttatgattacaatgaaaatgggagtaatttcagcaagaagtcacatcttacccagcttcggagagctcacacaggagaaaaaacctttgaatgtggtgaatgtgggaaaaccttctgggagaagtcaaacctcactcaacatcagagaacacacacaggagagaagcctattatagtgtactgaatgtgtggaaagccttttgccagaaaccacacctgaccaaccatcagcgaacacatacaggagaaaaaccctatgaatgtaagcaatgtggaaaaacattctgtgtgaagtcaaacctcactgaacatcagagaacacacacaggggagaagccctatgaatgtaatgcatgtgggaaatccttctgccacagatcagccctcactgtgcatcagagaacacacacaggggagaaaccgtttatatgtaatgaatgtggaaaatccttctgtgtgaagtcaaacctcattgtacatcaaagaactcacactggggagaaaccatataagtgtaatgaatgtgggaaaaccttctgtgaaaaatcagctctcactaaacatcagaggactcacacaggggagaagccgtatgagtgtaatgcatgtgggaagacctttagtcagaggtcagtgctcaccaaatatcagtttaattcacacaagggtgaaagctctttgaacatcctgaatgttagaagccttcatacacttgtgaaattggttatacagtttcaaaaaaggagatcagagaaagccaaagaatgtcagaaatttgtagaaaatgacttcttgtttgaatatgtaaaagctttcaagaaaaattaaaacttttcattagaaaatttgtactgaggggaattctattcatctaagtaatatggagaaaatatttatctggaatttatgttgtttagtgttatattccagacgtgataccaaaattttgttgcaaatataatggacaatatttatttatacccatattcacagtggaatctgaagcttataaaagttgaatgacagcagcattaaacatatatgtgaagagtccccgatgtttgtagaccttatgtgagtatgcaaatatataaatttgagtatgcttgatttgtatattggaactcaacatgatcataaggagaagatacgtacccttaattgagtaactactatggtatttgttaatattttctacactaaataccattggtgtctttataggttgacataattatatatgtgtatgtacatatgtttgtgtgtatatgtaaatatatttctacacacatacttaaatatagtgatgtgctagtataacctcatactgacttaaaagttctgattgttaaattttaaggaattttgtgagccagttattaaaagcagtcattatttaaaatatgtaaacttacagttaaaaacaaaggtaataaatactcagcactcatcacttcctaattattttgctacatttcactattacctttgctgttttacttatttaatctgtatgatgaaaatactgtataatagtgtgcactgcacatctgtctcttcccagctccacattcagtgctgtcttggtagcttggacttagtggggagtgtttacaccatggaaattgacaaactataaatcagggttttaattttctcagagaacctgctgtcaaatatttacagcacatcactgtgtatatatgaaaacgtatttggcaatacaaaccacataccccttctatttcctgacataaataaatggctatggccatttacagctgaaccacgtcttcaagaaagaagccaaaaatatttccgtgaggtttttaactacctctgaatctgtcctactctaaatactaccggagtctctttgtaggttggccagtatatgtttttagtgaaatattatttcacaaagaactatatcacgtacctttcctctgactgtttcctggcatatatgcatgaatatggccattattgaactatcacttcagtaaagaagttaaacagtacttttctgaggtttttcagctacctctgggtcattctgtaatgtaaatgttgttaataggaatgggtttttacataaattatggcaagggttaacaggcaggtaacactgccactcctcaaaaagtggcggtatgtaatgaaaggcccttttgatatccttgatttttcattgtgtatctgtttgggcacggtctatgtaacactagttctgcgtattagtattttagagtatctctgcctcccttgtcctgttgtttcttttgcccccttggaacacattggtcagcagttctaagagacactgcctacatgatggccattccctacgttcatccttgctgagctaaattttatattttttttgcatccttctcccagatgacttaggtggtaagtccagagttagtcaaagctaatcatggaagttccattttaatgattctgttggggtgaacttgggagcaatgagatgtttgggaagtattgtgtagtacttctgggaaagatctccttgatacaacattgtcatgacatgagaagagactctgtctgggctttttcatgtctgtaacataggtattggcttatcgtttttatctctgaagggcagtagcctgaagataacagtgcacaaggtgggaaaagccagctcagaggtgacgttgccgagctactctgctctctatacctgttctctactgggactttttataaccctcaataactgttttttatttggtcttagggctgtctgatacttagagctgaaggcattccagctgacacagaggaatatttttctaagtgttaatgttctatatggttaattacgggggaagaattatttctttttcacaagttaatataggggattgcctgtttgtatcagcccatggttcttttctgggtggaaaaaccggaaattctcccancttaaaaaatattttaatggccagactgattacaagtggtgtgggcccagaaaccaagggaccagtgaaaacacccccagagaccttgtaatccagccagggaaagcccattgccccactcctgaagcccttgaagggccaaggagggaaacagtgttacccagagccccagtaagaactgcctgtcatgaaggaggggcccaccttgtaaagagacatcattactacccagaactgtggtgcccaaattgctggtgtctctctttggagaaaccaaccagatacatctgctggagacgacaggtgggcacagagaagggtggagagagaatctgggaagagaaatggagaataagcagcacagtgttattcatttctgtaaattcctatgtagaaggctcagtgttagaaataaagttattctactagttgcaagttaagtgtttctgtttgttctgctttcctgttagcataagtaaactccctttggaactacacaggtatgtctctccttcaacatgtgtgaagcagacattatattaaattacattattcatacctccctgtggtgtttcttattgtatgtggtgtaaggtaagcagctctgtattcttccaaataaatagccagttgtccctgaaaaaaaaaaaaaaaaaaaaaaaa

SEQ ID NO: 136155 - DNA, 2820 bp, Homo sapiens
atgccatccaagactgtggttccttttagttttgctctgtgtatggattttcagccaaatgttactattcagacccggtccgactactcgtccagtgcagctgcatgcttcaggcagactctagaggacccagccaaccccaggcttttcgagcccctagcgccccagcagagtggctggggtggggaggactcggattccagagctcgcaaagcggagaaggccctgcaattcctggtctcgccagcactgcacttccgagtgggcggaaaacccgcggcacccgcctggcgctccgggggtgaaggaggggtgaaagggaatgtgagcccaaattttccgattttcctagagaagctgaaaatacagatttttatggactattttccattattgaatgctggcaatgaattcaacctttttgtagacaagtactacggcttacggcctaccacttcgctgctgacttctgcttctgacaactgctgcggcttaatggctctagctcgcttcgacgtcgctgtaggtcgacttgttccttgcccacccaagtggcaactaatagacaaagagattggtggcattttggcccaccctagagatttgtggaacttcaaatttgagggggaagatttagggtacctggcagaagaaatgtttaagcagcaaaccattcaagaggtgacttgggtgctgttaaaagcattcagttttaaaagggaaacacatcataaaagttcagaaattttgcaacctgatgtgatagaaaggaaaaacccattttcagaggagacattcaagctggctgcagaaatttgcataagtaacaaggcactaaatgttaatcaccaagataatggggaaaatgtctctagggcttgccagagaccttttccacagctgctccaaccgtggctaaatggggccaaggtacagcttgggctgtggcttcagagggtgcaagccctaagccatggcaacttccacatggttgggcctgtgggtgcagagaagtcaagaattgaggtttggaaacctctgcccggatttcagaggatgtatggaaaggcctggatgtcaaggcagaagtttgctgcaggggcagtacagaagggaaatgtggggttggagtcctcacacagagttcctactggggcaccacctagtggagctgtgagaagagggccactgtcctccagaccccagaatggtagatccaccgacagcttgcaccgtgcacctggaaaagccacagacactgaatgccagcccatgaaatcagccgagagtgagactgtaccctgcaaagccacaagggtggagctacccaagaccatgggagcccacctcttatatcggcatgacctgattatgcataattatgataagttgaagtctcgaatcagtgaaattattgacagtagaagaagattggaagaagacttgaagaagcaggcagctgagtatcgagaaattgacaaacgtatgaacagcattaaaccagaccttatccagctgagaaagacgagagaccaatacttgatgtggttgactcaaaaaggtgttcggcaaaagaagttgaacgagtggttgggcaatgaaaacactgaagaccaatattcactggtggaagatgatgaagatttgccccatcatgatgagaagacatggaatgttggaagcagcaaccgaaacaaagctgaaaacctgttgcgagggaagcgagatggcacttttcttgtccgggagagcagtaaacagggctgctatgcctgctctgtagtagagggaggaattacaatatccgcaaaaactatacaaacgatacttagacccaaatttgatgaaaacgggattccaacaacccatgaagaaacaaagaaacaggaacagaaaaaaaagctgtcggagacggcaagcacggatcgggcacggccggcgggtcgcagccgggctggaggccggtcggaaccgagcgggcaggaggccaccgctgcagcgcgggccccgcagaggaaggaagccggcgggcggggtagagccccgccggggggaagcgggctggccaccggccctccccgcctccggcatctcctggccgccgggcagcactacccccgcgcgcggccggcgtcctgtgagatcccggccatcctgactcccgtttcccccgtcctcctgcgagctggtcctgcacgccgccggtcgcatttgcccccggagttgccaacgagctcgggcttcctcccaccctccgtcaccgcacacttccgagggtccccgctgtcgccttgctgcagttttccggggcccctcaccggaggagagcgccctggccgctgccttcgtgttgcgggaaggagcgctcccttcccccgtggccctccagctgcagccagggtcgctgcccgggcccttcccggggcgggcgaggcggcggtggtccccggagctcgtcccctaacccccgccttccgaagtttgccgccctcctcttccggggtgggggaagtgcgcctcggggcggttggtcgctggggccctaactcagcgtttattgccagccaagcttgggcaggtcctcttcattgtgatgatgcagagaaccggaatgcagaggacaaaggaccactctccaaaggtttaagaggagaggtgactggccatacggctgtccatctgtcctccatcaatggtgtgaccgaagacagggctccacttcctctgcgtgccacagtcctctcactggcttccttttcagcaacttgtcaacactttgaatccaggctgactctcacagcgaggcccaatcctttctga

SEQ ID NO: 136156 - DNA, 5083 bp, Homo sapiens
cggcaggctagctgtcggagacggcaagcacggatcgggcacggccggcgggtcgcagccgggctggaggccggtcggaaccgagcgggcaggaggccaccgctgcagcgcgggccccgcagaggaaggaagccggcgggcggggtgaagctcgtgtgtggagtgccacggtacaatcagacgacagatggacagtgtgacaaaagtgtcagaaaggattgggcctcgctgtgagagtcagcctggattcaaagtgttgacaagttgctgaaaaggaagccagtgagaggactgtggcacgcagaggaagtggagccctgtcttcggtcacaccattgatggaggacagatggacagccgtatggccagtcacctctcctcttaaacctttggagagtggtcctttgtcctctgctggacacataataggaattctaacacattctctgaattcacttttcataaaaacgtaaaatcagactgctctgtacaaccaggctcaactgttgcatggtagcagatttgcaaacatgagtgctgaggggtaccagtacagagcgctgtatgattataaaaaggaaagagaagaagatattgacttgcacttgggtgacatattgactgtgaataaagggtccttagtagctcttggattcagtgatggacaggaagccaggcctgaagaaattggctggttaaatggctataatgaaaccacaggggaaaggggggactttccgggaacttacgtagaatatattggaaggaaaaaaatctcgcctcccacaccaaagccccggccacctcggcctcttcctgttgcaccaggttcttcgaaaactgaagcagatgttgaacaacaagctttgactctcccggatcttgcagagcagtttgcccctcctgacattgccccgcctcttcttatcaagctcgtggaagccattgaaaagaaaggtctggaatgttcaactctatacagaacacagagctccagcaacctggcagaattacgacagcttcttgattgtgatacaccctccgtggacttggaaatgatcgatgtgcacgttttggctgacgctttcaaacgctatctcctggacttaccaaatcctgtcattccagcagccgtttacagtgaaatgatttctttagctccagaagtacaaagctccgaagaatatattcagctattgaagaagcttattaggtcgcctagcatacctcatcagtattggcttacgcttcagtatttgttaaaacatttcttcaagctctctcaaacctccagcaaaaatctgttgaatgcaagagtactctctgaaattttcagccctatgcttttcagattctcagcagccagctctgataatactgaaaacctcataaaagttatagaaattttaatctcaactgaatggaatgaacgacagcctgcaccagcactgcctcctaaaccaccaaaacctactactgtagccaacaacggtatgaataacaatatgtccttacaaaatgctgaatggtactggggagatatctcgagggaagaagtgaatgaaaaacttcgagattccagcagacgggaccctttttggtacgagatgcgtctactaaaatgcatggtgattatactcttacactaaggaaagggggaaataacaaattaatcgaaaatatttcatcgagatgggaaatatggcttctctgacccattaaccttcagttctgtggttgaattaataaaccactaccggaatgaatctctagctcagtataatcccaaattggatgtgaaattactttatccagtatccaaataccaacaggatcaagttgtcaaagaagataatattgaagctgtagggaaaaaattacatgaatataacactcagtttcaagaaaaaagttcgagaatatgatagattatattgaagaatatacccgcacatcccaggaaatccaaatgaaaaggccagctattgaagcatttaatgaaaccataaaaatatttgaaggaacagtgccagacccaagagcggtacagcaaaggaaattaccatttagaaaagtttaaaccgtgaagggcaatggagaaagaaatacaaaggattatgcataattatgataagttgaagtctcgaatcagtgaaattattgacagtagaagaagattggaaggaggacttgaagaagcaaggcagctgagtatcgagaaattgacaaacgtatgaacagcattaaaccagaccttatccagctgagaaagacgagagaccaatacttgatgtggttgactcaaaaaggtgttcggcaaaagaagttgaacgagtggttgtggcaatgaaaacactgaagaccattattcactggtgggaagatgatgaagatttgccccatcatgatgaggaagacatgggaatgtttgggaagcagccaacccgaaaccaaagcttgaaaaacctgtttgcgaggggaagccgagatggcacttttcttgtccgggagagcagtaaacagggctgctatgcctgctctgtagtggtggacggcgaagtaaagcattgtgtcattaaacaaaacagcaactggctatggctttgccgagccctataactttgttacagctctctggaaagaactgggtgctacattacctacacacctcccttgtgcagcacaacgactccctcaatgttcacacttaggcctacccagtatatggcacagcaggagggcgatggaagcgctttactctttgatccttctcctgaagttcagccaccctgaggcctctggaaagcaaagggctcctctccagtctgatctgtgaattgagctgcagaaacgaagccatctttctttggatgggactagagctttctttcacaaaaaaagaagtaggggaagacatgcaggctaaggctgtatgatgaccacacgttcctaagctggagtgcttatcccttctttttctttttttctttggtttaatttaaagccacaaccacatacaacacaaagagaaaaagaaatgcaaaaatctcggcggtgcagggacaaagaggcctttaaccatggttgcttgtttatgctttctgaagctgttatcagctgaaagttgggattctggagagccggaggagagagaggccgaataacctctggcctgagaaggtttgcgtccagcctgggtttagcctgggatgttgctgtgcacgggtgggacccagacacatcgcactgtgggattatttcattttgtaacaaatgaacgatatgtaggcaggaaagggcacgtcccactcacaaggggacgctttggggagaatgttcagttcatgttatgtttcaggaaggaaatttcttgttcataggaaagtgcccaggaaagtgtttttaactttgttccaaaaaaccaaaaaccccagccaccaggaaaattggatttttgggaaaacaggacttaaaatggacattccagtatataaaatatgtagcgtggtattggatgacctaacctatccaaatcggatggatttgtatcaatacccaaatagccttcctgttttgttttgcctgaaggcctaaattccaccagcccctatgcaatcccctaattttccattaagttgttatttcagttttaaatgtacccttcagaataagccttccccccaccccagtttttgttgccttgaaaatattgttgtccccggatttttgttaatattcatttttgttatccttttttaaaagtaaatgtacaggatgcccagtaaaaaaaaaaaaaatgggcttcagaattaaaactatgaaatattttacagtttttcttgtacagagtaacttggctgttagcccaaggttaaaaagttcataacagatttttttttggactgttttgttgggcagtgcctgataagcttcaaaagctgctttattcaataaaaaaaagaaatgaaaaagatatatgaatatgacaaagtattgctgagtccaacaatgttgttttaagactcttaaaatacgggtacctgggcaatggttaattttccataaaagaattgtgaacttcttgaaatctaggggagggggaatgtagtgaagggatgtatcggtggggtggtccgggagggggaggccaaggttatatgcactttctcatgatttaccagagaagtgaataactgcaaagtgaagttgcttcttctacttcagtcttctctcactttgatttgctagttgttatcaattaatgacaattacaaacctactgtatctctaatacagtgtgactggtcaggtatttcagttcttaggaaggaagtgccaagtttgtttttgggttcctggaacagcgctcacctttgtttagaacactggtttaaagggataatcatctctgtcacattagactatccatcatgaccagcaaatactcattttaggaaaaaaaaaagcatgatctgaaaaatacttttggtggtatgttggttaccctcctagctttccatttggtttaggaacataaagcaaataggacacagtccatactgtcactgctctggcactgtgtgggagcttcgcttaaagtcatgggtccattgcaggaatccaagtggcagtccttctcattcattctaatcattgtatgtgcttcactacgggggggagaaggaaacgttagcatcatgtttcccatttagggcaggagtgagaggtctctcttcctgatttaagatatgcaaaagctggtatgttcagtaggaactgtacatgtgttgggaggcataaagactaattagcaaccataatatggtcactacccctaataagactaaatgaaatccttgcaatttcaaaattactcctttccccaatattaagatttaccccacaagctaatatttcccgtttaaagtactaagggtgagggttttctgttactttgttttttaatgttgttccttttgaaagaatcagtcttgcagctgagtgaaaaatctgtggaatgtattatttgtcctctttacatgaaactactcatacttaagcaaaagtcagtcttatagcaaga

SEQ ID NO: 136157 - DNA, 408 bp, Homo sapiens
tggtttccaacagctgcaaggagatgtcttgttactcagactttccattcccagaagattatccaaactatgtgccaaattctcaattcctggaatatctcaaaatgtatgcaaaccactttgaccttctgaaacacattcaattcaagaccaaagtctgcagtgtaacaaaatgctcagattctgctgtctctggccaatgggaggtggtcactatgcatgaagagaaagctgttcttgacagcactctgagccatcatacctctttcccatataaactattttcacagatctcaactaaaaccccttacttcacaaatgattgtgttgtgctgaaatggtgctcttatagtactggcttattaaaagtaaaaaataaacctaaaaattgattgttttaaaaaaaaa

SEQ ID NO: 136158 - DNA, 404 bp, Homo sapiens
tgtctgcagcacgggtgggagggtgcagtgtgggtattgaaggctggcagggcctgggaatcactggggcagattgcacagtgaggcgaacactggaggtgaggggccaggtcccaccaataccattcagaaggggcagggactcatactccctgtatatatgctaatgttactcagactttccattcccagaagattatccaaactatgtgccaaattctcaattcctggaatatctcaaaatgtatgcaaaccactttgaccttctgaaacacattcaattcaaggtaagacacaaaacatcagttagtagtcagaaagtatttcctacctattttctcttatctctccagcctcttgagaatagaaaaatctttgaatattgttattctacaatgccccct

SEQ ID NO: 136159 - DNA, 2652 bp, Homo sapiens
  misc_feature (1)...(2652): n = a,t,c or g
ctcccaagccagcactggctcatactgattcattttgatctctgctaataccagagtcctgcgtggcagagccattggcaccagaaattacaagtacgtaaagagaacatggccaagcgagttgccattgtgggagctggggtcagcggcctggcctccatcaagtgctgtctggaagaaggactggagcccacctgctttgagaggagcgatgaccttggggggctgtggagattcaccgaacatgttgaagaaggcagagccagtctctacaagtctgtggtttccaacagctgcaaggagatgtcttgttactcagactttccattcccagaagattatccaaactatgtgccaaattctcaattcctggaatatctcaaaatgtatgcaaaccactttgaccttctgaaacacattcaattcaagaccaaagtctgcagtgtaacaaaatgctcagattctgctgtctctggccaatgggaggtggtcactatgcatgaagagaagcaagagtcagccatctttgatgctgtcatggtctgcactggctttcttactaatccttatttgccactggattcctttccaggtattaatgcctttaaaggccagtactttcatagccggcaatataagcatccagatatatttaaggacaagagagtccttgtgattggaatgggaaattctggcacagacattgctgtggaggccagccacctggcggaaaaggtgttcctcagcaccaccggagggggatgggtgatcagccgaatctttgactcgggctacccatgggacatggtgttcatgacacgctttcagaacatgttgagaaattccctcccaaccccaattgtgacttggttgatggagcgaaagataaacaactggctcaatcatgcaaattacggcttaataccagaagacaggactcagctgaaagagtttgtgctaaatgatgagctcccaggacgcatcatcactgggaaagtgttcatcaggccaagcataaaagaggtaaaggaaaactctgtcatatttaacaatacttcaaaggaagagcctattgacatcattgtctttgccactggatacacatttgctttccccttccttgatgagtctgtagtgaaagttgaagatggccaggccttcactgtacaagtatatcttccctggcacatctgcaaaagccaaccctgggccattattggccttcattcaaacccttggggcttccatgattacctacaggagaaacacaagttcggtgggctgtttcgggttcctgaaaggtgttaantaggttaccaccaccaagtgtcatgatagaggaaattaatgcaaggaaagaaaacaagcccagttggtttggcttgtgctactgcaaggctttacaatcagattatatcacatacatagatgaactcctgacctatatcaatacaaaacccaacctgtttctctatggctcctaacggatcccacatctgggctctggaccgtcttctttgggcccatgcttcaccataccagttccgcttgactgggcccagggaaaatggggaagggagcccaggaaattgcccttcatggaccccagtggggacccgaacatttcaagggttcattcaaaggttcggagttgttacaaggagttttccattttcccttttggaaagtttttcttaaaagtctttagctttccgggctttggcttgtggctatttttcctgattttcccctataagtaaaaagatctccctaaatgggaagatgccacagagtagaatttacaaaggctcccaattccctctcttacagcaaatattgcccttcacagttataaaactgtattcaaatagtaaaggcccacccctcctcgcctttccccggctgggcccccgggcctacccactgggtattcctggagccctctccccagctcccacttctaatgcctagagaatgataacttaaggatttctgtggcattttgaaggttgttggaaagttacaggttcattttagaaagaaagctgttcttgacagcactcctgagccgatcatacctctttcccatataaactattttcacagatctcaactaaaaccccttnactttcacaaaatggattgtggttggtgctggaaatggtgctcttatagtactggcttattaaaagtaaaaaataaacctaaaaattgattgttttaagtgatcttttgttctcttattaaagattgggaaaagggagaaaaagatgaggattctatgaataaagctcataaaaggatagggggttcaatgagttactttgagagtttcccaaaggactgtacctgcctgggactgttcattcctccagaacactctttataacaaagctgttactccagctggcctcccaaagacccaaatcagattccacagaaaaccaccacctccacgggctcttagaaccagcctccagcagccaaaggaaaaagcctacctgcttagatcctccttcacaaccctgctgtaagaggcaaatggagctgcctccttttaaagagtcaatgagaaccaaccaaattcaattggaattcattagataaagagcacagccaagaagcttttaatggagagaaagcagggagagg

SEQ ID NO: 136160 - DNA, 1101 bp, Homo sapiens
cggcaagcgccatatgagcctggcggcgccagatgcgaatcctgttgtgggctttttggcctattcccgcccctcagtcttgccgggatggcaccgcccgcataggacttccagggttgggctgagtgggagttcgactgctgggcctcgtaattctcgctttggggctgctccttccaggctgggacacactggggcccgctgtcggtctcccgtcctccgacatcttgtctggaacttccgcctggcagtctccagtaggagtggagctctgtgcggcgtagtttggtggaaaaacgggccttgcgtcggcctcacccccagtgtttgtgtttcagaatgaagactattctcaagcaatcagactgtcgacattccagaaaaatgtcgacattactctgaagggacgcacaggtattcgtgaagggcccccagaaggaaccctgcggaagggacttcaatccacatcaatggtagaactcagccttctttggaaagaaaaaaaaagaggctcccgggttgacaaaatggtggggtaaccagaaaaggaactggcctacccgttcggactaatttgtaagtcatgtacagaaccatgatcaaagggtggttacactggggcttccggttacaaggatgaggtcctgtgtatgctcacttcccccatcaaccgttgttatccaggaagaatggggtctcttggttgaaaatccggaaatttctttggggtgaaaaatacatcccgcagggtttccggatgaagaccaggttgtttgcttgtttcagtatctcaaggccccagaaaagatgaaattaatcccttgaagggaaaatgacattgagcttgtttccaaatttcagccggcttttgattccagcaagccacaacaagttaaaaaacaaggaatatcaggaaatttttgggatggtatcttttgtctcttggaaaagggactgttccgccaggcttgattgaataagatctaagagtttacctggctacagaaagaagatgccagatgacacttaggagctaccttgtgatatattaaaagatgcaaaaaaaaacacatattagatttggaaaaaaaaaaaaaaaaa

SEQ ID NO: 136161 - DNA, 482 bp, Homo sapiens
gatttaatgaacttaagtgtgtgaataagcctttgtgttacgactggtattcggtcacagcatatttagagaaaagacttggagcttaaataaaaactaaggcaaaatagacgcttagctgctgatctacagagaacttcttgtaattaaaagatttcaattcatagcaaactggtgttttaaactattgcagtagctggaactttttagtgtaaccagcatttattggagaagtgaatcacaaggaaccaatcagctggttatgggaattcagaagcagattgacaacatgaaaggcaagctccaagagacccaggacagggcaaaacgacaagaggatctcatcatgaaagtggaaaatctggctctcaagaacagatttcaggctgtactggatgagctcaaacaaaaggaagaccgagaaaaggagcactcagctctttgcaagaggagctagaatcactcctagagaagtaaaaaga

SEQ ID NO: 136162 - DNA, 441 bp, Homo sapiens
aaggaggcagaaaatcagtgcctggatatctcttctccaggaatgtctggtcacaggcagggccatgactcattagaacatgatgagcttcgggagatattcaatgacctcagcagcagcagtgaggatgaagatgagacccagcatcaagatgaaaaatgattgtaggaaagttgcaggattagcggaatgtatggttcaaccttaattatagcttcattgcaggactttactgtttctccattttctagaagctgctgttgctgctttgtgatgacgtgagatcaataagaagaacctagtctagagacaatgatgctagtttgcatatgttttcctatgcaatagttgttttcccagttattcaaagcagctttctatatgtagagatgcaaattattaagttgtttccaatacaataaataaaagcatctgtttttc

SEQ ID NO: 136163 - DNA, 447 bp, Homo sapiens
  misc_feature (1)...(447): n = a,t,c or g
cggggtctggtgattgngagctgcgcctctcggcaagatttcgcgctgcccatcccgggccctttcatcagtaatcggtagtggatcactctgccaagcggcagganagatataaacatcattgacacggaggaagatctggagagacagctacaggacaagctaaatgaatcagatgaacagcaccagggaaaatgaaggaaccaatcagctggttatgggaattcagaagcagattgacaacatgaaaggcaagctccaagagacccagggacagggcaaaacgacaagaggatcttcatcatggaaagtgggaaaatcttgggctcttcaaggaacagattttccaggctgttacttggattgagcttccaaaccaaaagggaaggacccgaggaaaaagggaggcaanttcagntcttttttnccaggagggagcttnggatt

SEQ ID NO: 136164 - DNA, 2445 bp, Homo sapiens
tttcgtgggtaggcgacccggacggagggccggcgaggtgcggggtctggtgatgcgagctgcgcctctcggcaagatttcgcgctgcccatcccgggcgcctttcatcagtaagcggtagtggatcactctgccaagcggcaggaagaattaaggaaacgacaaggagacgctcggctctctcccgcttggctccttgcggcctcctcttcccttcgctccggcccggtgaaactgaacttataatcgtcactggattgtaagtacccgaggcgaagagagctcgcttgagccctgatttttttgagtgtctttgttccggggagagttttgtgagttgaaaagtatctcttgctggggcttttcttggggccgaaaaccgtttccggggggagccgccattttgttttcctgtttccctagctagctagctagctctctccgcgttgacccgcaacggcacctagaggttgggacttggcattgcatcggatttagtgaacttaagcctgggaataagcctttgtgttaacgactggtatccggtcacagcatatttacagaaaggacttggagcttaaataagcactaaggcaaaatagacgcttatctgctgatctacagagaacttcttgtaattaacagatttcaactcattagcaaactggtgttttaaactattgcagtagctggaacatttttagtgtaaccagcattttattggagaagtgaatcacaaggaaataaagatgagtaaaaggaaaagatgatgctcctcacgaactgggagagcccagtttatcttacgtctgcctcccagaatatgcctctactgtgagaagggcagtacagtctggtcatgtcaacctcaaggacagactgaccaattgagttacatcctgatgggcgtcatggaatccgtcagagtggaccgtgttccattggcctcaaaattagtagaccctgcctctgtgttatggaagagcctgaaaacccattattaaagaaacctttttccaagacagctattatcggtcagatgctggtatccacagttgatggtgatctctttcctcctgtggaggagcccagttgcttagcacttgatcctaaagcaagcaatgaaaaaggataaggacaaagagaaaaaagtttatctgggaaccacggaattactctgcctctaaagaatgtcaggaagagaaggttccggaagacagcaaagaaggaaatatatttgaatctcccagatgtttgaaaaaaggagttgaaacggtttgcttgaggtaccagatgctggaagctgttagtactcggtggggaattatttgcccgaaggtggaaacaaaggggggcagaaaatcaaggtcctggatatctcttctccaggaatgtctggttcacaggtcagggccatgtactcattagaacatgatgagcttcgggagatattcaatgacctcagcagcagcagtgaggatgaagatgagacccagcatcaagatgaagaagatataaacatcattgacacggaggaagatctggagagacagctacaggacaagctaaatgaatcagatgaacagcaccaggaaaatgaaggaaccaatcagctggttatgggaattcagaagcagattgacaacatgaaaggcaagctcccaagagacccaggacagggcaaaaccgacaagaggatctcatcatggaaagttggaaatcttggctctccaagaacagatttccaggctgtacttgggatgagcttcaaccaaagggaagaccgagaaaaggagcaacttcagctctttgcaagaggagctagaatcactccttagagaagttaaaaagaacttgatgtttaattttcagtctttcagactggttcagcatttaggaaaattctttgggcttttattgttactggggtatttaagaccttgctcttcctagtcccttttaatgcctgtgtgttcctgttaagttcctttccatttggtttggtaattttggtttttccagccaaatttatattggttttggccagggtgttccacccctataagaaggcaggattgtatagggcaggaaaaatgattgtagggaaagttgcagggattaggcgggaatgtatgggttcaacctttaattatagccttcattgccaggactttacctgtttcctcccattttcctagaagctgctgttgcctgcctttgtgatgaccgtgagatcaataaaaaaaacctatgtttaaagacaatgatgctagtttgcaaatgttttcctatgcaaaagttgttttcccagttattcaaaacagctttttttaaagtgaaaaacagatgcttttatttattgtattggaaacaacttaataatttgcatctctacatatagaaagctgctttgaataactgggaaaacaactattgcataggtcg

SEQ ID NO: 136165 - DNA, 413 bp, Homo sapiens
  misc_feature (1)...(413): n = a,t,c or g
cgctttgcctccgtccttccccctactcccgccttacctgacttccttttcggaggaagatccttgagcagccgacgttgggacaaaggatttggagaaacccagggctaaagtcacgtttttcctcctttaagacttacctcaacacttcactccatggcagttcccgagacccgccctaaccacactatttatatcaacaacctcaatgagaagatcaagaaggatgcgtatccagtatgccaagaccgactcagatatcattgccaagatgaaaggcaccttcgtggagcgggaccgcaagcgggagaagaggaagcccaagagccaggagaccccggccaccaagaaggctgtgcaaggcggnggagccacccccgtggtggnggctgtccaggggcctgtcccgggcn

SEQ ID NO: 136166 - DNA, 519 bp, Homo sapiens
  misc_feature (1)...(519): n = a,t,c or g
cttgatntaggttgcagttgcatgggtgtttgtgtttaaatttttcattaaatgctatgtttacattagagtttttcaacttagtactatctgcattttgggctggataattctgagtaatggggccctgccctgtgcattggaggctatttggcatcatttctggcctctgtccacttgatgccgttacgttagggggaaatgctgagtccctgaggtctgtcgttctctttcaggttccctggcttcaaggaggtccgtctggtacccgggcggcatgacatcgccttcgtggaatttgacaatgaggtacaggcaggggcagctcgcgatgccctgcagggctttaagatcacgctcagccccctgaaggtaagtccccccttgggggccttcttggagccgtgtgtgagtgagtggtcgccacacagcattgtacccagagtctgtccccagacattgcacctggcgctgttaggccggaattaaagtggctttttgaggtttggtttttcacaa

SEQ ID NO: 136167 - DNA, 427 bp, Homo sapiens
tttttttttttttttttgtgaaaaaccaaacctcaaaaagccactttaattccggcctaacagcgccaggtgcaatgtctggggacagactctgggtacaatgctgggtggcgaccactcactcacacacggctccaagaaggcccccaaggggggacttaccttcagggggtggctcccccgccttgcacagccttcttggtggccggggtctcctggctcttgggcttcctcttctcccgcttgcggtcccgctccacgaaggtgcctttcatcttggcaatgatatctgagtcggtcttggcatactggatacgcataggtttgtcatataaagggaaaccctgcatggagcgcagggcgttggtggcgctgctgacctccttgaagatgacaaagggcctggcccctcatcttcaaggctccg

SEQ ID NO: 136168 - DNA, 392 bp, Homo sapiens; identical to SEQ ID NO: 109478
  misc_feature (1)...(392): n = a,t,c or g

SEQ ID NO: 136169 - DNA, 1772 bp, Homo sapiens
  misc_feature (1)...(1772): n = a,t,c or g
tttcgtggcggggccaggagagaaagctttgtggtttggtctcagggaagtagcaggcgccggttgagagaactacggccctgtcggaaggtagacctccggtgcaaacgaccatcggcggcaggcgagcggtacgcttggcgtccgggccttcctgggcccgtctgaggaaacttgctgctcgaggccaggctgcctaggacctgtccctttttttctatactggctcccacatccgggttttttctccgggacgtcccttcggatgcttgggccaatgggaatcgccatttagggtgctccgcccaccgggttcgcgtagagcatcctgggaagtcgtagtaaatctctcgagagttctctccgcacgcgggcctggagaagcggggtcctacggcacgctttgtttgtcgcgctttgccttccgtncctttccccctacttcccgccttaacctgaattcctttttggaaggaagatccttgagcagccgacgttgggacaaaggatttggagaaacccagggctaaagtcacgtgttttcctcctttaagacggagcctgaacacttcactccatggcagttcccgagacccgccctaaccacactatttatatcaaccaacctcaatgagaagatcaagaaggatgagctaaaaaagtccctgttacggccatctttcttcccagtttgggccagatcctgggatattcctggggtattcacgggaggccttgaaggatggagggggccaggcctttttcaatcttcaaggaggtcagcagcggcaccaacgccctgcgcttccatgcagggtttccctttctattgacaaacctatgcgtattccagtattgccaaggacccgacttcaggatattcatttgccaaggattgaaagggcacctttcgtnggaagccgggaccccaaagcgggagaaagagggaggcccaagagccagggagaccccgggccacccaaggaagggctgtgcaagggcggggggagccacccccgtgggggggggctgtccaggggacctggtcccgggcattgcccgccgatgacttaaggcgccccgcatttatgcaccacatgccgggcccagccgcccctaactgccgcccccctggatatgatccccccgccagggccttgcacctggccagatcccaccagggggccatgccccccgcagcagcttatgccaggacagatgcccccctgcccaagcctctttggagaaatccaccgaaatcacatcttgtttcctcaccaaccttcccagaggagacccaacgagctcatgctgtcccatgctttttcaaatcaagttccccctggcttcaaagaaggtcccgtctgggtaccccgggcgggcaatgaacatcgcccttccgtggaagtttgaacaaatgaggtaacaggcagggggcaagcttcgcggattccctgcaagggcttttaaagatcaccgcaagaacaacgcccatgaaagatctccctttgccaagaagtagcacccttttcccacccaagcccggcccctatcccctgttcgtggggccaccccttttccccctgtggctcagtccccctgaaggttaaagtccccccttgggggccttcttggagccgtgtgtgagtgagtggtcgccacacagcaattgtacccagagtctgtccccagacattgcacctggcgctgttaggccggaattaaagtggctttttgaggtttggtttttcacaaaaaaaaaaaaaaaaaaa

SEQ ID NO: 136170 - DNA, 1632 bp, Homo sapiens
tttcggcgagctgagcaccttcgacgcggtccggggaccccctcgtcgctgtcctcccgacgcggacccgcgtgccccaggcctcgcgctgcccggccggctcctcgtgtccaactcccggcgcacgcattcccgcgagtcccgggcccctcccgcgccccatcttctcggcgcgcgcgcaggcatggcgcccccgcaggtcctcgcagttcgggcttctgcttgccgcggcgacggcgacttttgccgcagctcaggaagaatgtgtctgtgaaaactacaaagctggccgtaaactgcttttgtgaataaataaatcgtcaatgccaagtgtacttcagttggtgcacaaaatactgtcatttgctcaaagctgggttgccaaatgttttggtgaatgaaggcagaaatgaatggctcaaaactcgggagaagagcaaaacctgaagggggcctccaagaacaatgatgggctttatgatcctgactgcgatgagagcgggctctttaaggccaagcagtgcaacggtcacctccacgtgctaggtgtgtgaacacatgctggggtcagaagaacacacaaggacactgaagtaacctgctctgagcgagtgagaacctactggatcatcattgaactaaaacacaaagcaagagaaaaaccttattgatagtaaaagttttgcggacttgacttcagaaggagatcacaacgcgttatacactgggatccaaatttttatcacgagtattttggtatgagaataatgttatcactattgaatctgtttcaaaatttcttctcaaaaaaactcagaaatgatgtggacatagctgatgtggcttattatttttgaaaaagatgttaaaaggtgaatccctgtttcatttctaagaaaatggacctgacagtaaatggggaacaactggatctggatctgctgatccctggtcaaactttaagtttataatgttgatgaaaaagcaccctgaatttctcaatgcagggtctaaaaagctggtgttattgctgttattgtggttgtggtaataaccagttgttgctggaaattgttggtgctggttatttcccagaaaggaagagaatggcaaaagtatgagaaggctgagattaaaggagatgggtgcagatgccatagggaactccaaaatgcataacctaatataatttgaagcattatagaaggaagggaaatagccaaatgggcaccaaattccaatggtggtgtgcgtgggaccgaagacatctttgaaggttcatgagtttgttagtttaaccatcatatatttgtaatagtgaaaccctgtactcaaaatataagccagcttgaaactgggctttaccaattcttgaaatttgaccaccaagtgttcttatatatgcagatctaaatgtaaaatccagaacttggactccatccgttaaaattatttaatgtggtaacattcaaatggtgtgccttaaaaatggcttccacagtaaaatctgaaaaactgatttgtgattgaaagctgcctttctatttacttgagttcttgtacatacatactttttttatgagctatgaaataaaaccattttaaactgaatttcttaaaaaaaaaaaaaaa

SEQ ID NO: 136171 - DNA, 339 bp, Homo sapiens
atgctaaagctttacagtggcctctcggaaggggaggcggtgggactccccgcgggtccagaccccctggaccccactgatctgaacggggcgcagttcaacccagaagtttacctagacaagctgcctagagagtgccctctggcccagctgatggacagtgagacggacatggtgcagcagatccgggctctagacagcgatgcaaaccctggagtgaagctgcagaccttcacagtgagtgttacagctcttaaggctgcacgtctggagttgttcatttctcctgatgggttcatggtctcactggcttcaggagtgaagctgcagaccttctca

SEQ ID NO: 136172 - DNA, 1830 bp, Homo sapiens
ttaatccttccaagagagcttccctgtctcatttagcctttgcatatcctctctttcatgtgggtccaaatgggggtctgttcctggcaactgggtccttccatgctcttgggggttttgataatcagctggtgcatgttcctctagccacttagttgctgcttggaggactctccgcctttcttcgctgttaaagaggaacacgagcaactggtgccaatcagccaaggtggggctgtgggtctggataacagcttggagaaaatcaattagggcttgtggcttttcggtatagggcggtgtattgtttttccagttgagaaggtcgacacaggtgaagggctggtagccaaaagcacgcctctccaccacgtgaccatcctcatctatcccagtataccgctgctctctcaggggcatttgtgtccccgttttgcgtctcaaacgagctgtgatattgctcctaatgtccagggagagagagagcatgatattacgttcaatatcgcagtacgtgtacacccaccggtgatattgatccaaatataatctgtgatatttttcccagtatgcaaggggagaggatgatactactctcaatatcgcagggctgttcacatccccagggacattttttcctaatatctggagaaagtccttttcttctttagaagaagtaggtccaagatcaggtgcttgagggagcactgatgccccgaagggggcagatgctgcttttcgagcctctgagtcagcgcgggaattccccaagcccaccaaggtggaagcttgctggtgtccccgagaatcagtgtaaatgttgacagtctcaccctcactgagttctaaggcccgaatgaaagcaatgagttcagctttctgggctgacgtggcctggggcaatgatctgtcttcatcaacagtgtccagggttatcactgcataccctgcacctctctctccttgggggttgaagaagctactcccatccacgtatagttcccagtctactgattcctgggtccttccatactcttgggggttttgataatcagctggtgcatgttcttctagccacttagttactgcttggaggactctccgcctttcttcgctgttaaagaggaacatgagcaactggtgccaatcagccaaggtggggttgtgggtctggataacagcttggagaaaatcaattagggcttgtggcttttcggtatagttctgtgtattgtttttccagttgagaaggttgacgcaggtgatgggctggtagccaaaagcacgcctctccaccaagtgaccatccttatctatcccagtataccgctgctctctcaggggcatttgtgtccccgttttgggtcgtaaacgagctgtgttattgcttctaatgtccagggagggagagagcatgatattacgttcaatatcgcagtaggtgtacacccagccggtgatattgatcagaatataattgctgtgagattggatgtccacaaccatcttggggaccgtgggggaggggaaaccgatgtcaggcaaggacaggttggagaggaagaagtacatggaagtgtggaggtgggagtcagggctgacggccaggatgatgagcaggttccccagcaccgtgaccaggcacatggacaggaacagcccagcaaggaccggctgcagttctggatcctctgagagtttgaggaggaggaatcgagagacatccgttacattctgtgggtctgtagagtttggacaccttttgcctggtgtgacatagggtccaccttcattcttctgcatgtggaaatcaagtttctccaacaccat

SEQ ID NO: 136173 - DNA, 1461 bp, Homo sapiens; identical to SEQ ID NO: 120582

SEQ ID NO: 136174 - DNA, 1928 bp, Homo sapiens
cctgctgtgctccctatttcaaccctaacagctctcacagtgggcagcacatagtaggtgctcaggaaacactggtgggagagcactcgggtctgctcagcaccttcctctctcctccagctctcccctgtcacgaaataatttcctttgccgtcgccacctgtctgggtgccggtctccaccctgcccggccgcggcgcgtcctccccgtcctcgccgtcctggggctgtgcgcttcccccctccagcaacagccgcagcctcttctcctcgggagggacgtcgtcctcctccctcctgggccggccatccctgcctcggggcttgccagtggcttcggagctgccggaagggctggccatggctccgggggttctgcctgcactgtttgggtccacactgcctttatgagctgtaacactcaccaggaaggtctgcagcttcactcctgaagccagcaagaccacgaacccacggatttgaaattgctgagatgtttcttgggctggtcggtctgaggacgtgaggtcgtaggtggatctttccgagccagcagtggcaaactgcttgggtccccttccacactgtggaagctttgttctttcactcttcacgatacaatcttgctgctgctcactctttgcatctgcactacctttaaaagctgtaacactcactgcgaaggtctgtagcttcagtctgtgaaggtctgcggcttcactcctgaagtcagcaagaccaagaacccactggaaggaaccaattccagacacagtatgatagctttgggagacaaaagtaacacgagtgagaacatgtggtgtttggttttttatccttgcgatagtttgctgagaatgatggtttccagcttcatccatgtccctttctacaatgatgattttgagggcttcaatatttaaaggggaaagggttaataggcaatattctttcagaagtttcatggactcttctttgacttttttcataaaatcttgaatcaaacctgtctccatgcaatgattctccccagcatgagtaactttaggtcctttcccttggggctgcccgactccatacaaataatgggccttatgatgattaaggaattcttccaagtgacagttaaagaggctgcctgcctcctccccacacttcaaagcagtggctgtcttcaatattggcagcagaacaatgctcaaacgtttgttgcacttggtacactcacttctctgctttctgagacttgagtccatagatgaaaagaagcattggttttccttgggcttgaatggtatccatcctgagagtagatgtttagaattaggagtcgtatggtgcctgcactgactgccagacctccaaccaaatacactgaggacttcagattgtcggcatccctgtgagcgagcacaggagtagctcttgtaagaccatccaatatccacatgagtgaactcagattgatttctcccagtcaagccttgagatgactgcacctggtctacaccttgattgcagctttgtgggagatccctcatgccctctttcacattgtccaggcccacatggttgccatccaaccattcagccttggcatggcagattaaaaattggaaaccatttttattgggtccagcatttgccatggacaagatgccaggacctctatgcttctggatgaaattttcataaccaaatttctcctcgcatatggatttgccatcagtgccattatggcatgaagttaccacccttggaataattttgtgaaagcagaatctcgtataaccaaattctttctctacagttcccaaagcacaaaagttttctgctgtctttggaactttgcctacaaacagtttgaagaagacgtggcccaagggctcaccctctgcagctatgccaaacagagtggggttggccat

SEQ ID NO: 136175 - DNA, 2287 bp, Homo sapiens
  misc_feature (1)...(2287): n = a,t,c or g
tctgttgttgtttgtttgtttttgagcccaggaataacttcccacacatatgtcccaatgatttttaaaataggtgccaagaaagttcattggtggaaaagcatacttttcaacaaatcgtgttggagaaacttgatttccacatgcataagaatgaaggtggaccctatgtcacaccaggttgcagtaaaaacagggataccataagcaaccacctctttcctcaacgatgtgatgaaagcaaaagccaagtagctccatatatccaacttaaaaatataaaaagttacgcccgtgggctgcagttggagctatggcggcagcagctgtcactgggcctagcctggggtgtggacctggggactccccagaaggccccgatgtggaggctcacggagcgtcggcggaaggcgcacaggatgctaaagctttacaacggcctctcagaaggggaagcggtgggactccctgcagggcccgaccccctggaccccactgatctgaacggggcacactttgacccggaagtttacctagacaagctgcctagagagtcccctctggcccagctgatggacagtgagacggacatggtgcagcagatccgggctctagacagcgacatgcaaaccctggtctatgagaactacgataagttcatcccagccacagaaattgacaaacagtgtaaaactacctcccagtgccaagtgtataagtgtgtccagaattggtgggttcttggtctcactgacttcaagaatgaagctgcggaccctcctgatatgttcgaagcttcttccttctggtggggttcgtggtctcgctggctcaggagtgaagctgcagaccttcacggtgagtgttacagctcttaaggctgcatgtctggagttgttcacttctcccggtgggtttatggtcttgctggcttcagaagtgaagctgcagaccttctcggcaggggacagcgactgcttgggccagggcaggcgagctcagcgcaggccagggcccggcgtgtccgcggtgggcgcgagcggccagcagagggcgccagagagcaacgagcggcccgcggaggagcccacgcccgccccgatgcctagctccgcgccgcgcggacccaccgagcccgcgctcagacgccccagctccgccgacaggccgctcgcgccgggtgcaggcagagcccccggagccatggccagcccttccggcagctccaaagccactggcaagccccgaggcagggatggccggcccaggagagaggaggacgacgtcactcccgaagagaagaggctgcggctgttgctggaggagggaagcgcacagcccgatgacggggaggacgcaccgcggccaggcaggaaggagaccggcacccagacaggtggcgacggcagaggagcagcacgggcagccctcctcgccgtgggcggcatcagagcccccctgcccagtcttggggttgctcctggatgccgtctgggaggcttgctcatggtgacatcctcatctccccatgcactttacctgcattcagagcttgggtcacctggacactgaactcaggtgaattttctctgagatcccgggagaaggaggacagttctctggaaggttttccacggccgatcacggaaagggtgagaaaggagaggtcctggtcggcgacacaattacggtggcagtgtaacgccaggaaactttattgcgtgaagtccctctcactccctctacctccctcttttacggtggactctgccaaagaccaggattcccagaatgccagtggagtgaccaagtgtagtgggaccttgggaacacgagtctggagccaggcggctggggtttgcatccctggttcttgcccctccttagctggctgaacatggcacaagcccacttaccctctctgagcccttacctgtccttcggtggcaaaatggatctgtccaaanaggcccccattccccggggttgttactgctgagattaagggaagctcatcccatagaagcacttagcccttgtgcctggcacatagtgtatggtggataaatgggacttaggactaaaactcatgccttggtgtgtttttgcagtgatgttttgttctggggtgcatcaaaagagacaaggttcttggttgggcatggtggctcaagccaataatcccagcactttgagaggccgaaaggggaggatcgcttgagcccaggagtttaagaccagcctgggcacggtggtgaagcctcatatctacctaaaaaaaaaaaaa

SEQ ID NO: 136176 - DNA, 3266 bp, Homo sapiens
  misc_feature (1)...(3266): n = a,t,c or g
acgcgtccgggggaaatctccttcagtggaagctgctgagtgtcgttggcggaaagtatcctggagcccagcaaaagcctccaaagcactagagcttccctaaagaaaagcagaataaaagaaagacaagaagggaagcccgttcctctaaagcccgggtttccaatagtcccggatcctcctggagttgggcgaaggcgcagttggcagcagccgctgctggcacccggacttggaaaggcggtgttcccccttttcgggaggagggaggcagggacttgcaggcaagagttgcacctggtctaggaacctgcagagaaaagaactctggggagaagaactgccccggagcgcagcagccaccctccgaccatgccccggtgaggggggcggacttcgagggcaacttgccgcggactgcctgggcttagccagcgagctacgcgctcccgggagcccggaattgcacggcgcagcccggcggggggctatcgtctatgtcttcttggggcgccagacgaatcggggtctcgtttttgctggaagagcccagtgttggtggcttcaggtggctgctgccgccgccgccgccgccgccgctgctagtgcggtttccgccgctggtgcgaagagaagagacacgcgagcggggagacctccaaggcagcgaggcatcggacatgtgtcagcacatctggggcgcacatccgtcgagcccgaggggagatttgccggaacaattcaaactgcgatattgatcttgggggtgactgtccctggccggctgtcgggtgggagtgcgagtgtgcactcgctcggaagtgtgtgcgagtgtgtatgtgtgtgtgccgtgtcgggctccccccttccccccgttttcccgtcgagtgatgcacttggaatgagaatcagaggatggaaatagtctgggaggtgctttttcttcttcaagccaatttcatcgtctgcatatcagctcaacagaattcaccaaaaatccatgaaggctggtgggcatacaaggaggtggtccaggggaagctttgttccagttccttctttctggggattggtgaactcagcttggaatctttgctctgtggggaaacggcagtcgccagtcaacatagagaccagtcacatgatcttcgacccctttctgacacctcttcgcatcaacacggggggcaggaaggtcagtgggaccatgtacaacactggaagacacgtatcccttcgcctggacaaggagcacttggtcaacatatctggagggcccatgacatacagccaccggctggaggagatccgactacactttgggagtgaggacagccaagggtcggagcacctcctcaatggacaggccttctctggggaggtgcagctcatccactataaccatgagctatatacgaatgtcacagaagctgcaaagagtccaaatggattggtggtagtttctatatttataaaagtttctgattcatcaaacccatttcttaatcgaatgcttcaacagagatacttttcacaaggaattaacattttaaaaatgatggcatattttactacagggggctttaatataggggggaacttttattccaggggacctctagtttcatcacttacgatggggtcgatggactattccccacccctggctattgaggacagcaagttggatcataatgaacaaacctgtctaatataacccaggatgcaagatgcattccttgcgcctgctcaagccaggaaccagccatctcaagatcctttctgagcatgagtgacaatttcaggcctgtccagccactcaacaaccgctgcatccgcaccaatatcaacttcagtttacaggggaaggactgtccaaacaaccgagcccagaagcttcagtatagagtaaatgaatggctcctcaagtagggaacaaagccaagaagaatcccacctcagtgaaatgcttacaactgtgaattggacgtaacctagaatggcccccttcttgcttctctctccttctttcccccaagcctcattcattcttggggattgggcccttttctttcatggaaaagtgttctggcaaaaccatgggcaggagggaattacattttttcacacatacttcaccaaacacacacacaaggcatttggcacatacataccaaacacatggcaaaacatccccctacacacacacactcctccttacaacctcccatccatggggaagtccaagtttccagaaaacaaaagtcctcattccataagaggtccttagaagaaaataacccagttaaccctgatttccaattttgatacccgttttccctgaacctaataaatctaccccaatgagacttttcagccctttgtacatacaaaattccttcccaaaagagagaggagaaaatacagctctgatggcatcaaacggactttgcatcaagtaatttcagatagtgtccctaggatcctttgagggtgctggtagcaggtgagcaggacaaagttgaccaaggacacttatttctagattatgattcttctgttttactcaacaatttacaaagaaaaaaaggacagacattgaagagctacacattgtatatatatcaccacagactataaggaaatggaattatttccctctttgtcacatatctgtagtaggattttccaagatcagaaatgatccatttgctgtttcttgttttccaaaggtcatacattgtgtttggttattgttaccagctcaataaatgtgtttaacgagttaatttcatttttctggctttggtctgttctccttccttacaggctaagccctggctccatgcaactgccattctttgatttccacttgttcccttccacctacatgttttgttccatttgcagcccagtttttactgaagtttgtggcaatcaggaatgcatttgctaagcaagtatgactttaattcccactccatggctcaatcattcacatgaggtgagcttcagcctgagatagccangcgacagacttcttgccgtttcaaaactgccatgcccccctgtgatgctcccgtgaaggaatgcactttgccttgtaagttcctgggaaaggggtatgttttctctccaggtgcagccagatctcacaaagtacaaaacgaatgcctttcttttcttgtttataatggtcactcactgtgtttggttactgtcaagaaatcaataaatgtgtttaacaagttaaaaaaaaaaaaaaa

SEQ ID NO: 136177 - DNA, 417 bp, Homo sapiens
tttcgtttctaactgaagaggagagaaccctatccaggggggccttgagagacatgctggatcaagtctatcagcccttagcagtccgggaactgcttatcctccagggaggaccaccccagatcatactggggcaggaaagaaatacaaaagaaatccggccgggcgcggtggcgcactttgggaggctgagtcctgcacagatgtgaagacacagatgaggtgtcgggccccagcttggcttcggcgtctatgtggacagctgctctctgaaaggttaatgagacctaatggtgttcaggcagtagtccggggcattttggaaggagcaggtgcgggagcagctggtggaagtgatgctgaggtgacggctgctgactggaagaagtgtgacctgatcgcaaagattttggcctt

SEQ ID NO: 136178 - DNA, 897 bp, Homo sapiens
ctacggcaggaccatgatcttcttctccagcttctgtggagggaacaggaagtttttcatgatgtcatccagctcttctagggccaactgggcatggagcttggccacgtcatcgggctccagacacactacgtgcttcagcaggtggtagagatccttgaggacggcgctcagcacctgcatgagagagacagccatgaccgcctgtctactgtgccggcatttctcagtacgactgaactgccctctcctcctgcctgaggagatctgtgaggacatccacagacttccgtagcctgctagataaatccaattattcagttttcctttgttttctccaactggctggaagaaggtattttgcaatgtggactcgccctgaattctttcttgcgcgagatccaagatccctttcttggggtctggaatggagacccctttccttgtaacagttgtatttagaaattcaatatttgccagcaagttgcaaagctgggatttcagcttggacatccagctccagagtccatacttgaagccaaagccactggactgtttcttcatacctcccacataggccagtttttccacctttggaacagaagttttctgccgatcaaaatttctttcaaactggattttgtctggggtaatttgaaatagtttcacagatccatcttcacaaccaaccaaaagttgagagccactggggctggcagccatgctccaaataggtcctccaaaggcatccatagcatacttgatgtttaacgcctgtaaatcatactccataatctcgccattgagcccagcactaaagagtcgctgtccttctgcccagcacaaagcttctgtagcccgagactcatgacctgggaaaaactgcagaaacaccat

SEQ ID NO: 136179 - DNA, 1131 bp, Homo sapiens
atggtaacagcttgcctgattgctgtggccaaaacagatggtgaagttcaagtacgcagagctgccatacatgtggttgtgctgctgcttcggggactcagccagaaagctactgagaaggcgctgctgtggataggagagaggatcagcaagtcctacgaaggggggactcagggggttgccctgctgtcagacgtctatcctgagaaaatcttgccggacttgttggctcaatatgacagcagcaaagacaagcacacaccagagaccagaatgaaagtcggggaagtccttatgcgaatcgtcagggcattaggggtccatgtcagatctgtcgtagattatgactctgtacatgtacctattgatgacagcaataccacattacagaagcaagcttttgtgatgatggacactcatatagccattccttttggatgttatggaaggctggatcaatgttcgggtattggcaaagatgtcctggaggaagaaatccttggaactgaatccagagaacaagtagaaattaagcagacccacactggccaccgcaccagattcaaggcatttgttactgttagggactatgatggccacatcagtttaagtgttaagtgctccaaggaggttactactgccatccaagggaccatcaccctggccaagctttccattgtccctatgcggagaggttactgggggaacaagatcggcaagtcctacaccaccccctgtatggttacaggctgctgtagctctgggctagtacaccttatccctgcccccaggaacaatggcatcatctcgactcctgtgcccaagatgctgctgctgatggccggtattgacaactgctacacctcagccaggggctgcactgccaccctggacaacttcaccaaggccaccttcaatgccatctccaggacctatagctgcctgacccccagcctctggaaagagactattcaccaagcctccctgtggaatgcactgaccatcacatcaagacccacaccagagcctccatgcagaggacccaggctccagctgtggttacagcataagctttcatacaagaataatagtgaattacacctgttaaaaataataagcagaagaaaatga

SEQ ID NO: 136180 - DNA, 751 bp, Homo sapiens
  misc_feature (1)...(751): n = a,t,c or g
ctggggggctgtctcatggctctgcctgttgntcaaggtggctatgagctacatcaagtgggtctttccatgaactggtttgttgcctgctcttctattttcccttcccagatcttttctgttccagtgtactttgggcagccatgctgacggcctcagtggcaaaggctccatgggtagagatggtgatgcggagatcaacagcgagttcttggatgaccggatcagggtatgtgttggataccttctccaacagaggcaacaactgcttcagaacagcaaaatcacttgacttcaactgaacagctcctcctagcatgacagccaccagccccatggacatgctcagcgtctgtgattccacggtgctctctgcctgatgggcaaggcttgcacaggctctctgcaatgttgctgctacaaagtccaccacctgagtgacgtttgtgaatatctgctcagacattctctcgcacagaacagccatcagctgcaggacaagcagcttccgctcttggccttccacaagaagagtctgatgttgctctaattccaagaggctcttgctggagaagggctcagtttttaactctgtttcattttccgaggccacatgagtcaactctttcaaacagaagatgaagaagtctcctgccaaaccgcattcctggcagtgggacagcaagtccccgagatgctccacccggccctgctcagaggataccttctggtacagggcttcatcttcatc

SEQ ID NO: 136181 - DNA, 2943 bp, Homo sapiens
aaaagaaataaagtggagcccccagtgctatatctgaaattgtttcaacagccctggcattaggccaccagcatgcattctttccagcctgcattcagtgtgaacccattgtctaggcattcatctttctgaaggagcagaggacagaaggcaggatgtaaactctctggatgctcgtggttcttttctcctgataatcagggcaactctttgcaaacagcagcaggagtgaagaagaatggcctgggaggataaatacagggcttacccttcttctctggaagagtcaaccagcttgattgtcctttctgggcatcagagccttttcaactccacagttttccatctcgacaccagaggaccagatttagccctgttctttccatccaaggataactttattccattttgcattatttgataactatttccttcccctccccaccatccaactgcatctcctactctaaaatgcctcttgagcagccaagggtggccagttctgctcctcaattttccagaagaagaatctcagcctgaaagaatatagagctaggtgacatatgggtggccaaccgcttctcctcaagttccaaagagagtgggcaattagtgaaatttccatcaagtcatgttaaaatatactttcaccagggtaggacatccttctttcaatgctagagggacagtgaaaaatgtaggattaatgagatctgtaactgtcttctcttaactgtacacccctcagggctgaacgcggggagtgctggaacacatggccctcgggaagggtaccctgaaggacccaagtggacccgcaccataaaaccaccccgagggtcagccatgctgccagcactcaagaggcagcagggccacctgctggaagacctgggcacggctctgggtgcctggccctgcctgcctcctccacgtccttggagccaggtctacggcaggaccatgatcttcttctccagcttctgtggagggaacaggaagtttttcatgatgtcatccagctcttatagggccaattggggcatggagcttggccacgtcatcgggctccagacacactacgtgcttcagcaggtggtagagatccttgaggacggcgctcagcacctcagtagctttctggctgagtccccgaagcagcagcacaaccacatgtatggcagctctgcgtacttgaacttcaccatctgttttggccacagcaatcaggcaagctgttacctcatggaccacggagcccagcagaaagtccagcctctggcacagctccccaaggttggccaagctgctggccctgtgagcaccatcaggatctctcactcccctcaggaaggtatggatcaaaggttctcggtactttgagaccatgtctctttgggcagccatgctgacggcctcagtggcaaaggctccatgggtagagatggtgatgcggagatcaacagcgagttcttggatgaccggatcagggtatgtgttggataccttctccaacagaggcaacaactgcttcagaacagcaaaatcacttgacttcaacttaaattttaagacaaatttgttacatgggaccttctgtggggaattgctgtgagctgctaacatctctctccattgtgccagcgggagcagctggtggaagtgatgctgaggtgacggctgctgactggaagaagtgtgacctgatcgcaaagattttggcctcttgtccccagcagtctctttcaccagagaattaccttcaatgtccagtgtatcctcatttatcttgggtgcggtataagagcttgggaactgctgaatgtggtacaagctctgaggactgggatcaggaagtggagtggtccagccatagtactctctagtgtgcacacctcttttataagtcgtgtaagatggtagtatgatatagttcgtatgtgtttccgctccacctgctccttccaaaatgccccggactactgcctgaacaccattaggtctcattaacctttcagagagcagctgtccacatagacgccgaagccaagctggggcccgacacctcatctgtgtcttcacatctgtgcaggactggggtggtcctccctggaggataagcagttcccggactgctaagggctgatagacttgatccagcatgtctctcaaggcccccctggatagggttctctcctcttcagttagaaccagctgaatgagtcttggacaaattgctgaaaatgtttgagctacagtttcttcatctaatgccctgacgattcgcataaggacttccccgactttcattctggtctctggtgtgtgcttgtctttgctgctgtcatattgagccaacaagtccggcaagattttctcaggatagacgtctgacagcagggcaacccctgaagccttggcttttaagtgcatattacaaacaccaaaaacatcaattagtccaaacttgtccatcatcttggggagcaagaggacgatcagctgcctttcccaactaatggcctctttgatggtaatcataatgccaccttgagtggcaactctaaactgacacagagaatggagagagggcacagctttgtccaaccctgcaaatcctttcaggctggcaattgccttcttcctttccagcttccccagaatccataataagatttcttggcaaagtgaccttatgtgagacacactctgcttagtaaaacagtagagaagaaaaagcactcccaggactggaagcagggaatccatcaaaactgttaaaggttcattcccaaccacgtacacctgaacagctcctcctagcatgacagccaccagccccatggacatgctcagcgtctgtgattccacggtgctctctgcctgatgggccaggcttgcacaggctctctgcaatgttgctgctacaaagtccaccaccat

SEQ ID NO: 136182 - DNA, 277 bp, Homo sapiens
atgtcggctgccttagtccgggcaaatgtctgggctgtgagcaagaggaaacttcagcccacctgggccgccctcaccctgacaccttcagcagtaaacaagataaaacaacttcttaaagataagcctgagcatgtaggtgtaaaagttgaatatacaaagacaaaaggagattctggtgaagttattcaagatggagtcagagtattcattgaaaagaaagcaaagctaacacttttaggaacagagatggactatgttgaagaaaaattatcca

SEQ ID NO: 136183 - DNA, 936 bp, Homo sapiens
atgcaggtgtggaccacagccgctctgctggtgggagggcacacgggtacagctacgttggaaaataattggcgtatcaatgtggaccagtcacataccctaaggcccagcagcaccacccctagatatatatctgagagaaactctggcacatgtgtaccagcatgcgtggacaacaatgttcatggcagcattcacagaacaaaactgtggagacaccccaggtaccacacagaagagaatgcggctcattcacaaggcggaattccacacttcagtcagcacaactgcaccaaagggacagacgatgtcatccggtctccggcagccaggtccccaggcctggagacgcccacttgcctcctgtttgtcatcgctgctattgccgctgtttttgtagacagtgctatccccagattgactcagcacagaccacaggacgggagtttcccgtacaccatccttgaccctcccctgtacctgccaggccagtgtgcccctcctcagcctctgcttggcgtgaagattccatcttctcctgtgtcccgatgtctgcacagcccctatctccaatgcgcccgccgtgtccatggagagaggctgaggcggccgacctccggcccgaggcaccggggcatcgggacggcgaagatgtcggcttccttagtccgggcaactgtccaggctgtgagcaagaggaagctgcagcccacccgggcagccctcaccctgacaccttcagcagtaaacaagataaaacaacttcttaaagataagcctgagcatgtaggtgtaaaagttggtgtccgaaccaggggctgtaatggcctttcttatactctagaatatacaaagacaaaaggagattctgaagaagaagttattcaagatggagtcagagtgctcatcgaaaagaaagcacagctaacactttga

SEQ ID NO: 136184 - DNA, 2466 bp, Homo sapiens
gagtccctgggtctctctgactggtaccctggcaacgcagagcaggacggtcctgtctcctgtgcacaagggcagcctcactctggcttggccatttgtgttgtccacatgtgcctggtcttgggggtgtctggttctggtgtcccctccacgctcttcggacccattgccattggcagcgtcatccggtctccggcagccaggtccccaggcctggagacgcccacttgcctcctgtttgtcatcgctgctattgccgctgtttttgtagacagtgctatccccagattgactcagcacagaccacaggacgggagtttcccgtacacaatccttgaccctcccctgtacctgccaggccagtgtgcccctcctcagcccctatctcaatgcgcccgccgtgtccatggagagaggctgaggcggccgacctccggcccgaggcaccggggcatcgggacggcgaagatgtcggcttccttagttccgggcaactgtccgggctgtgtagcaagaggaagctgcagcccacccgggcagccctcaccctgacaccttcagcagtaaacaagataaaacaacttcttaaagaataaccctgagcatgtaggtgtaaaagttggtgtccgaaccaggggctgtaatggcctttcttatactctagaatatacaaagacaaaaggagattctgatgaagaagttattcaagatggagtcagagtattcatcgaaaagtaaagcacagctaacacttttatgaacagaaatggactatgttgaagacaaattatccaagggggttggggtccattaccccaaacatcaaagggacttgtggctgtggagaaagctttaatatttgaaatctcaggactcttctggccgtaggttccaggaaagctcgtggaagcttttggggctcactgcagaaatcatgtgactgtcacgtgctggaaaataaagtgatacatcttgaaaatgaatccagtgtgttggattccagaagaaatgatatttatattctcctataggggacagaaaatgagaagccatcactcttttttggatcatttaggtctcttgtatcctttgttttagaaccaagtttcattaaagttgccttcctggggcacctgttttatccatttcctggaactgtgtgcactccttaggatccgctattggatggcttggatcatcccttcaggcatttctcccaacccagatcggtggactccttaaaatctggaggacagggacatcgtggactgctggtagtaatatggtggtgcattgttttttccacccaaacttaacatagcctttttatacatttttatgaaaaatttcattgtcagctgcctcactggcatactgtttaatagtaccaggcaaagattttcttcaactataggtacagattaggttctgaggtgatgggtattcaaaaggtgaggaaaggacgtcatccggcttttttttaatccatctctttttgcagccctatatgtctgttcagagatgggctctcaagctgactttgattcttttagttgagaagtctcttaaagccatctagcccacctccatcaattccctatgtgaggaaggcaaaaccccggggaaggccaaagggcttcctgttccaccctggacaccacagggccgggggagagtaggggactcttaccccccttttccccttgtagggtgacacatgctctgccctctggagggcagttcaggcggaagggcaaatgggtcttgacttctttattgtgggtcaacatttttggataggaattttctttataaattttggataggaggatttatattaatttttatttttattttgagtggggaggaattttaaaacctttttatgtcaattaccatccttgtttcctttcacctttgaaacaatgatttgtagcagagatgacattgtagcaacccagaattatgcctttggaaatgtggtccctccactgtacaggagaatgtgtaatccttttggttaaaattcccagtgtgcataccatttcctggttcctcggtccagttggctaaagttcttaggtattttaggcctaacgatatttatcacccaacttttcctttaaaaagtggcccttttggtcaccttagttacctgatttcccctgggtttgaccataagtattctatggagatgatatatatgcttttttttgaaaagcttgattcttcattgaattcaaagtagctggagttcctttatgtttcgtttattcactaaagtaggctgacacaaaacacacccaaaacctagagcggtagttttatggtaaatgctcatgagtttgtatcaataatataattgttgatccacttataattcgtgcaacactgtatgtatgtagagattgagttgtcaattaaaaaaaatgtggcctctttgtgatcataaaaaaaaaaaaaaaa

SEQ ID NO: 136185 - DNA, 419 bp, Homo sapiens
ctacctggcggatgacagattcagcacaggccctggccattcggagctataccaatgtgctggggaggaaggtggtatatctgccgagcttcttcacctacgccaagtacatcgtgcaagtggatggtaagatagggctgttccgaggcctgagtcccctgatgatgtccaacgccctctatactgcgactcggtgtttcatgaagaaggatctccctccagatgagattgagcaggtttccaacaaggatgatatgacgacttccctgaacaaagttgcgaacgatacctcctacgagatgatgatgcattgtgtgtcccgcatgttgccccaccccctgcatgtaatctcaatgcgctgcatggaccagattgtgggacgggaggccaagtacagtggtgtgctgagctccattggg

SEQ ID NO: 136186 - DNA, 441 bp, Homo sapiens
tccggagctataccaagttcgtgatggggattgcagtgagcatgctgacctaccccttcctgctagttggcgacctcatggctgtgaacaactgcgggctgcaagctgggctccccccttactccccagtgttcaaatcctggattcactgctggaagtacctgagtgtgcaggtgagcaagcactggacggcggaggcctttcctgttctttgctacatccttcagctgaaatggttttgtggatgcttcattgcatgcaaagggccagctcttccgaggctccagcctgcttttccgccgggtgtcatcaggatcatgctttgccctggagtaacctgaatcatctaaaaaacacggtctcaacctggccaccgtgggtgaggcctgaccaccttgggacacctgcaagacgactccaacccaacaacaaccagatgtg

SEQ ID NO: 136187 - DNA, 1232 bp, Homo sapiens
atggcgggagccggagctggagccggagctcgcggcggagcggcggcgggggtcgaggctcgagctcgcgatccaccgcccgcgcaccgcgcacatcctcgccaccctcggcctgcggctcagccctcggcccgcaggatggatggcgggtcagggggcctggggtctggggacaacgccccgaccactgaggctcttttcgtggcactgggcgcgggcgtgacggcgctcagccatcccctgctctacgtgaagctgctcatccaggtgggtcatgagccgatgccccccacccttgggaccaatgtgctggggaggaaggtcctctatctgccgagcttcttcacctacgccaagtacatcgggcaaagggatggtgagagagggcttggtcccaaggctgagtccccggttgatgtccaacgccctctctactgtgactcggggtagcatgaagaaggttttccctccagatgagattgagcaggtttccaacaaggatgattatgaagactttccctgaagaaagttgttgaaggagacctcctacgagatgatgatgcagtgtgtgtcccgcatgttgggcccaccccctgcatgtcatctcaatgcgctgcatggtccagtttgtgggacgggaggccaagtacagtggtgtgctgagctccattgggaagattttcaaagaggaagggctgctgggattcttcgttggattaatccctcacctcctgggcgatgtggttttcttgtggggctgtaacctgctggcccacttcatcaatgcctacctggtggatgacagcgtgagtgacaccccagggggcatcgggaaacgaccagaatccaggttcccagttcagccaggccctggcactccggagctataccaagttcgtgatggggattgcagtgagcatgctgacctaccccttcctgctagttggcgacctcatggctgtgaacaactgcgggctgcaagctggggttccccccttactccccagtgttcaaatcctggattcactgctggaagtacctgagtgtgcagggccaagctcttccgaggctccagcctgcttttccgccgggtgtcatcaggatcatgctttgccctgggagtaacctgaatcatctaaaaaacacggtcttcaacctggccaccgtgggtgaaggcctgaccaccttgggacaactgcaagacgatttcaacccaacaacaaccagatgtg

SEQ ID NO: 136188 - DNA, 1818 bp, Homo sapiens
atcctcgccaccctcggcctgcggctcagccctcggcccgcaggatggatggcgggtcagggggcctggggtctggggacaacgccccgaccactgaggctcttttcgtggcactgggcgcgggcgtgacggcgctcagccatcccctgctctacgtgaagctgctcatccaggtgggtcatgagccgatgccccccacccttgggaccaatgtgctggggaggaaggtcctctatctgccgagcttcttcacctacgccaagtacatcgtgcaagtggatggtaagatagggctgttccgaggcctgagtccccggctgatgtccaacgccctctctactgtgactcggggtagcatgaagaaggttttccctccagatgagattgagcaggtttccaacaaggatgatatgaagacttccctgaagaaagttgtgaaggagacctcctacgagatgatgatgcagtgtgtgtcccgcatgttggcccaccccctgcatgtcatctcaatgcgctgcatggtccagtttgtgggacgggaggccaagtacagtggtgtgctgagctccattgggaagattttcaaagagggaagggctgctgggattcttcgttggattaaatccctcacctcctggggcgatgtggttttcttgtgggggctgtaaacctgctggcccactttcatcaatgcctacctggtggatgacagtttcagcccaggccctgggccatccggagctataccaagttcgtgatggggattgcagtgagcatgctgacctaccccttcctgctagttggcgacctcatggctgtgaacaactgcggggctgcaagctggggctcccccccttactccccagtgttcaaatcctgggattcactgctggaagtacctgagtgtgcagggccagctcttccgaggctccagcctgcttttccgccgggtgttcatcaggatcatggttttgccctgggagtaaactgaaatcatctaaaaaacacaggtctcaacctggccaccgtgggtgaggcctgaccaccttgggacacctgcaagacgactccaacccaacaacaaccagatgtgctccagcccagccgggctttcagttccatatttgccatgtgtctgttccagatgtggggttgagcgggggtggggctgcacccagtgggattgggtcacccgggcagacctaggggaaggttgagggcgaggtggggagttggcagaatccccataccttgcagattttgttgagtctgtttttgttgcagagggccagagaatggctttatgggggccccaggttggatggggaaaggctaaatggggtcagaccccacccccgtctaccccttccaagtcaagcccagcgcccatcctgccagctccagctgggagcatcattctcctgcctttgtaacatagggtgtggtcccctgggcacgtggccacccatcatgtctaggcctatgcttaggaggcaaaatggccaaggctctcgcctgtggtttttctcaacactacttttctgatatgagggcagccccctgccttctgaatggggaaattcatggcaactacttcaggaatgtgttcttctcatctaatgctcatctggtttaaatgggtgatgccctcgcgtacaaggaatctgggttaacctgtggcagttgttgaatacccagaggttggggcagatcaagtgtctctaagtcctaacccagttttaaaagttcaatggtaagatttgacctcaatctcccgcaaataaatgtaattggtgatttggaaaaaaaaaaaaaaaa

SEQ ID NO: 136189 - DNA, 425 bp, Homo sapiens
  misc_feature (1)...(425): n = a,t,c or g
tggagttagtgaacttgaaaaagaaggtctgcggtgccgctcagactctgaggatgagtgcagcacgcaggaggccgacggccagaagatctcctggcaggcagccatcttcaaactgggagacgactgccggcaggacatgctggccctgcagatcatcgacctcttcaagaacatcttccagctggtcggcctggacctctttgtttttccctaccgcgtggtggccactgcccctgggtgcggggtgatcgagtgcatccccgactgcaccttccgggaccagctgggccgccagacagactttggcatgtacgactacttcacacgccagtacggagatgagtccactctggccttccagcagaacaaggacagacacatcggcaacattatgctggacaagaagggccatatcatccacn

SEQ ID NO: 136190 - DNA, 430 bp, Homo sapiens
tccggaattcccggatcgacgatttcgtattcagaaagacaaatctgggatgatgcagtgtgtgattgcagtcgcggacaaagtattcgatgccttcctgaacatgatggcggataaagccaagaccaaggagaacgaggaggagctggagcggcacgctcagttcctgttggtgaacttcaaccacatccacaagaggataaggagggtggcagataatcaggacacccggagcaacctggacataactgtcggctctcggcaacaagccacccaaggctggatcaacacataccccctgtccagcggcatgtccaccatctccaagaaatcaggcatgtctaagaaaaccaaccggggctcccagctgcacaaatactacatgaagcgcaggacgctgctgctgtccctgctggccactgagatcgag

SEQ ID NO: 136191 - DNA, 406 bp, Homo sapiens
ctcagcatcccacagaggggtcttcccgctcacagccacagagggttatcagggttatagagaagagtcacctacccagtgcctgtcagggcatcagttcatgcgggagatggcaggggcctggcacatgacggtggagcagaaatttggcctgttttctgctgagataaaggaagcagaccccctggctgcctcggaagcaagtcaacccaaaccctgtccccccgaagtgaccccccactacatctggatcgacgtacgtgcctgttcccccacgaaggctgtggggtgctccacctggggggccaggactgttcctggggtgggggtagccgagcccaaggccttcggcaagctcggccagtcagcccagaacccctcctcagctgtctctgccggccccagg

SEQ ID NO: 136192 - DNA, 297 bp, Homo sapiens
attttagaggtgcttttgcaggttttgcatgtcctcttggggatgtgccaggccttggagattcaagacaaaggaatctcgcgagcatttgggcgttacagcaacatggaagagtctctcctctcaaagctctttcccaaaatccctcctcattccctccgtgtcctggaagagcttgaaggtgttcgaaggcgttcctttaatgacttccgctccatcctccccagcaatctgctgactgtctgtcaggagggtaccctgaagaggaaaaccagcagtgtgtccagcatctctcag

SEQ ID NO: 136193 - DNA, 528 bp, Homo sapiens
cccgacatcaagctgacggatgagatggtgatgatcatggggggcaagatggaggccacacccttcaagtggttcatggagatgtgtgtccgaggctacctggctgtgcggtgagcctgggtgagggccagggtggaggcggagggggtgtgtggaacgttctgagatcccctttaggatgaagggaatccggttccagagagtgaggtaggtgctagcagccacctgctgacctacacctgtcctttggtcacctctgtctgcccacctgtgccagtaaattcttgctctggacatctaattccaaccaccttccccacgatcctgcccacgccttcagccatgggctctccctttctgggcatcccatccaccctgtcaccaaagcctgagcacctgccaccccacaggctacgtgccaaagatgggctttgtcccagtttcatatacaggtcacttggccaaggcacagtccaacctgggttcatcccactgccccgagagaaaggcaggtcagcgtgtctgcat

SEQ ID NO: 136194 - DNA, 398 bp, Homo sapiens
atgggctatgtgcgggagtatattctgtgggcagcgtctaaatcccagcttctggcacaccagttcatctggaacatgaagactaacatttatctagatgaagagggccaccagaaagacccacacaggggagcaggacccctccttcatgacacctttgctaacttgctgtccgatgccaccctgcactcccaagtgcgagtgagacccttctgctccagtggctgcttctgcagagtctccatggtcaacacaactgtgactgcatctgacatcggcgacctcctggatcagttggtagaggagatcacaggctccttgtccggcccagcgaaggacttttaccagcgggagtttgatttctttaacaagatcaccaacgtgtcggctatcatcaa

SEQ ID NO: 136195 - DNA, 490 bp, Homo sapiens
ctgcagcgctccatgtccctgaacatcggcagggccaaggggagcatgaaccggcacgtggcggccatcgggtttcgcttctttctgctgaccctggggctgtccctcctgcatgccgatgtggttccaaatgcaaccatccgcaatgtgcttcgcgagaagatctactccactgcctttgactacttcagctgtcccccaaagtttcctactcaaggagagaagcggctgcgtgaagacataagcatcatgattaaattttggaccgccatgttctcagataagaagtacctgaccgccagccagcttgttcccccagctgacatcggcgacctccgggagcagttagtagaggagaacacaggctccttgtcgggcccagcgaaggactttttaccagcgggagtttgatttctttaacaagatcaccaacgtgtcggctgtcatcaagccctaccctaaaggcgacgagagaaagaaggcttgtctg

SEQ ID NO: 136196 - DNA, 1255 bp, Homo sapiens
tagagctgggctggactccttagaagaaagttaagttctgagtgtgggaggaagtgcctgcacccccacatccagacagcccgtcactcctgctgccgaagactgacttgctgattcgggctctgcctccatagtgggggcacagagccagggagagtgcccacaggcccagggatcctgggtgtgggaccagggagaatgcccacaggccccagggcctttttgagcccagggcgctctctgcacaggcctgctacaacttcatccgaagcatggccgcctacagcctcctgctgttcctgctgcagatcaaggacagacacaacggcaacattatgctggacaagaagggccatatcatccacatcggtcagccagccacagcgccacccctcctcttccttcaccccggcaccccaggggtggatagggatccccaccccacagagaggagaatgcccaggaccaccctgccaggagtgtcagggtccagctctgaggtccgaactgtcggccaccaagctgttctgctgtagagggtgcctggccccggccccagggagctggggcgagagccgccattgctctgagtcagaagctggagctgggcggagtggggctggtccaggttcagtgccccagcttggctccttcctccacttcctccattctctttctatgcctgctgccccaccccccaccccatcgctgtctccaagaaaacacaacctgcctgttgggggtggagggggtgctcctgttgcagagtccttttccactcctcaaaacagaccactcgtccttgcccgccctggctcctacccagtcacaggcagctctttggggttttgcagactttggcttcatgtttgaaagctcgccgggcggcaatctcggctgggaacccgacatcaagctgacggatgagatggtgatgatcatggggggcaagatggaggccacacccttcaagtggttcatggagatgtgtgtccgaggctacctggctgtgcggccctacatggatgtggtcgtctccctggtcactatcatgttggacacgggcctgccctgttttcgcggccaatcaagttcttgaagcacaggtttagccccaacatgactgagcgcgaggcttgaaatttcatcatgaaggtcatccagagctgcttcctcagcaacaggagccggacctacaacatgatccagtactatcagaatgacatcccctactgaggaggggaccttcgagggc

SEQ ID NO: 136197 - DNA, 6627 bp, Homo sapiens
  misc_feature (1)...(6627): n = a,t,c or g
gtcggcggggcctgcagggccgctgcaggtccaaaagcttctttgcatgtgtccagtggatttccatgggatcttccagttagatgaaagacggagagatgcagtgattgcattgggcatttttctgattgaatccgatcttcagcacaaagattgtgtgggtccttaccttcttcgacttctcaaaggtcttccaaaagtgtattgggtagaagaaagcacagctcggaaaggcagaggtgccctcccggttgcagagagcttcagcttctgcttggtaactctgctgtctgatgtggcctatagggatccttcacttagggatgagattttagaggtgcttttgcaggttttgcatgtcctcttggggatgtgccaggccttggagattcaagacaaagaatacctttgcaagtatgctatcccatgcctgataggaatctcgcgagcatttgggcgttacagcaacatggaagagtctctcctctcaaagctctttcccaaaatccctcctcattccctccgtgtcctggaagagcttgaaggtgttcgaaggcgttcctttaatgacttccgctccatcctccccagcaatctgctgactgtctgtcaggagggtaccctgaagaggaaaaccagcagtgtgtccagcatctctcaggtcagccctgaacgcggcatgccccctcccagttcccctggaggatctgcctttcactactttgaagcctcctgtttgcccgatgggactgccctagagcctgagtactacttttcaaccatcagctccagcttctcagtctctccccttttcaacggtgtcacatataaggagtttaacattccattggaaatgcttcgggaactcttaaacctggtgaagaagatcgttgaggaggctgttctcaaatctttggatgccattgtagccagtgtgatggaggccaaccccagtgctgatctttactacacttccttcagtgaccctctctacctgaccatgttcaagatgctgcgtgacactctgtactacatgaaggacctcccgacctcttttgtgaaggagatccatgattttgtgctggagcagttcaacacgagccagggggagctccagaagattctacatgacgcagaccggatccacaatgagctgagccccctcaaactgcgctgtcaggcgagtgctgcctgtgtggacctcatggtgtgggctgtgaaggacgagcagggtgcagaaaacctttgcatcaagctatctgagaagctgcagtccaagacgtccagcaaagtcattattgctcacttgcccctgctgatctgctgtctgcagggtttgggccgcctgtgcgagaggttcccggtggtggtgcactctgtgacaccgtccttgcgagacttcctggtcatcccgtccccagttctggtgaagctctacaagtaccacagtcagtaccacacagttgctggcaatgatataaaaatcagtgtgaccaatgagcattccgagtcaaccctgaacgtcatgtcgggtaagaagagccagccctccatgtacgagcagctccgagacatcgctattgacaacatctgcaggtgcctgaaggctggattgacggtggacccagtgattgtggaggcgttcttggccagcctgtccaaccggctctacatctctcaggagagcgacaaggacgctcacttgattcccgaccacacaatccgagccttgggacacattgcggtggccttgagggacaccccgaaggtcatggagcccattctgcagatcctacagcagaaattttgccagccaccctcccccctcgatgtgctgattattgaccagctgggctgcctggttatcaccggaaatcaatacatctatcaggaagtgtggaacctcttccagcagatcagtgtgaaggccagctccgttgtatactcagccaccaaagattacaaggaccacggctataggcattgctccctggcagtgattaatgccctggccaacatcgcggccaacatccaagacgagcacctggtggatgagctgctcatgaacctgttggagttgtttgtgcagctggggctggaggggaagcgagccagcgagagggcaagcgagaagggccctgccctaaaggcttctagcagtgcagggaacttgggagtactcattcctgtaatagctgtgctcacccgacgactgccacccatcaaagaagctaagcctcggttacagaagctcttccgagacttctggctgtattccgttctgatgggattcgctgtggagggctcaggactctggccagaagaatggtacgagggggtctgtgaaatagccactaagtcccccttgctcacctttcccagcaaggagccactgcggtccgtcctccagtataactcagccatgaaggaatgtcacggtcacccccgctgagctgagtgagctccgcagcactatcatcaacctgctggacccccctcccgaggtgtccgcactcatcaacaagctggacttcgccatgtccacctacctcctctctgtgtaccggctggagtacatgagggtactgcgttcaacagatcctgatcgcttccaggtaatgttctgctactttgaggataaagctattcagaaagacaaatctgggatgatgcagtgtgtgattgcagtcgcggacaaagtattcgatgccttcctgaacatgatggcggataaagccaagaccaaggagaacgaggaggagctggagcggcacgctcagttcctgttggtgaacttcaaccacatccacaagaagaataaggaggggggcaaacaagtatctatctggtctgggggaataagttccccacttgctctggagcgggactgtgctgaagaccatgctggacatcctgcagaccctgtcactgtcactgagcgctgatattcacaaggatcagccttactatgacatcccccgacgccccctaccggatcacgggtcctgacacgtacgaagcccgtgagagcattgtgaaggacttcgctgcacgctgtgggatgatcctccaggaggccatgaagtgggcacctaccgtcaccaagtcccacctgcaggaatatctgaacaaacatcagaactgggtatcgggactgtcccagcacacggggctggccatggccactgagagcatccttcactttgctggctacaacaagcagaacacaactcttggggcaactcagctgagcgagcgcccggcctgtgtgaagaaagactactccaacttcatggcatccctgaatctgcgcaaccgctacgcgggcgaggtgtatggaatgattcggttctcaggcaccacaggccagatgtctgacctgaacaaaatgatggtccaggatctacattcagctttagaccgcagtcatcctcagcactacacgcaggccatgttcaagctgaccgcaatgctcattagcagtaaagattgtgacccgcagctccttcatcatctgtgctggggtcccctccggatgttcaatgagcatggcatggagacggccctggcctgctgggagtggcttgttggctggcaaggatggagtggaagtgccgttcatgcgggagatggcaggggcctggcacatgacggtggagcagaaatttggcctgttttctgctgagataaaggaagcagaccccctggctgcctcggaagcaagtcaacccaaaccctgtccccccgaagtgaccccccactacatctggatcgacttcctggtgcagcggtttgagatcgccaagtactgcagctctgaccaagtggagatcttctccagcctgctgcagcgctccatgtccctgaacatcggcggggccaaggggagcatgaaccggcacgtggcggctttcggtccccgcttcaagctgctgaccctggggctgtccctcctgcatgccgatgtggctccaaatgcaaccatccgcaatgtgcttcgcgagaagatctactccactgcctttgactacttcagctgtcccccaaagttccctactcaaggagagaagcggctgcgtgaagacataagcatcatgattaaattttggaccgccatgttctcagataagaagtacctgaccgccagccagcttgttcccccagataatcaggacacccggagcaacctggacataactgttggctctcggcaacaagccacccaaggctggatcaacacataccccctgtccagcggcatgtccaccatctccaagaaatcatggcactgtctaagaaaaccaacctggggctcccagctgcacaaatactacatgaagcgcaggacgctgctgctgtccctgctggccactgagatcgagcgtctcatcacatggtacaacccgctgtcagccccggaactggaactagaccaggccggagagaacagcgtggcccaactggagatttaagtacatcagcctgagtgagaagcagtggaaggacaacgtggaaccttcgcctgggagcatctctccctacctaggccgtgcagctgcctgccaggttttaagaacacagaagccattgggaacgaagtgacccgtctcgttcggttggacccgggagccgttagtgatgtgcctgaagcaatcaagttcctggtcacctggcacaccatcgacgccgatgctccagagctcagccatgtgctgtgctgggcgcccacggacccacccacaggcctctcctacttcttccagcatgtacccgccgcaccctctcacggcgcaataccggggtgaaagtcctgcggtccttccctccggacgccatcctcttctacatcccccagattgtgcaggccctcaggtacgacaagatgggctatgtgcgggagtatattctcgtgggcagcgtctaaatcccagcttctggcacaccagttcatctggaacatgaagactaacatttatctagatgaagagggccaccagaaagaccctgacatcggcgacctcctggatcagttggtagaggagatcacaggctccttgtccggcccagcgaaggacttttaccagcgggagtttgatttctttaacaagatcaccaacgtgtcggctatcatcaagccctaccctaaaggcgacgacgagaaagaaggcttgtctgtcggccctgtctgaagtgaaggtgcagccggcgctgtaacctgcccagcaaccctgaggccattgtgctggacaatcgactacaagtctgggaccccgatgcagagtgctgcaaaagcccccatatctgggccaagtttcaaggtgaagcgatgtggagttagtgaacttgaaaaagaaggtctgcggtgccgctcagactccgaggatgagtgcagcacgcaggaggccgacggccagaagatctcctggcaggcagccatcttcaaggtgggagacgactgccggcaggacatgcttggccttcagatcattcgacctctttcaagaacatcttccagcttgtcggcctggacctctttgtttttccctaccgcgtggtggccactgcccctggggtgtgggggtgatcgagtgcatccccgactgcacctcccgggaccagctggggccnccagacagactttcggcatgtacgactactttcacacggccagtaacggggatgagttccactctgggcctttccagcagggcccgctacaacttcatccgaagcatggccgcctacagcctcctgctgttcctgctgcagatcaaggacagacacaacggcaacattatgctggacaagaagggccatatcatccacatcgactttggcttcatgtttgaaagctcgccgggcggcaatctcggctgggaaccccgacatcaagctgacggatgagatggtgatgatcatggggggcaagatggaggccacacccttcaaaggtggttcatggagatgtgtgtccgaggctacctggctgtgcggcccctacatggacgcggttcgtctccctggtcactctcatggttggaccacgggcctggccctgttttcgcgtccagacaatcaaagtctttaagacacaggtttgaccccaaacagtactgagcccgagccttcaaatttcaatcatgaaaggtcaatccagaagctgctttcctcagcaacaggagccggaccctacggacaatgatcaagtactatcagaatgacatccccttacttgaaggaaggggaacctttcggagggcctcttgcccccaatgtgcccttcaaaagctgttccccacaattcaatggagccctgcgacctcccgtgccctgccgccacatgcagtggaggagaggcctgtggcccaaagaacctggtagcgcctcctggggcagcacgtgggggggcccaaccttggtaaccccatggactgcgagcgacaatcaatggatggtgctgtctatgcacgaggtgtgaagtcttttgtttgcactgaacatattccctacctgtcttatttcataggtacatgaagtattgtgtataaaaaaagagataagatttaaccaacatcgaacaaaataaaaacccaaaataagtgctgtgttggaaaaaaaaaaaaaaaa

SEQ ID NO: 136198 - DNA, 567 bp, Homo sapiens
tcatccacaaggcggcgtcaggcgttcctcagcaaccagatgcgggatgcccagggactggtgaacagcaaggcgggcagcggtgcggccagtgagcggggccccacaggccccgtgctgaagcagggctggaaccaggcaacttgtttctttgtcctgacatccctgcgcagctggtaccgagtggacagccccaacaaactcatgaacccgctggtcgctgggttcttcggagccattgtgggagcggccagtgtcttcggaaatgctcctctgcacgagatcgagccccagatgcgagacctgggttagacctcgcacagggacgctgctgccactgtaataaagcgtgcctacacgcttctgaaactggtgtaggaacaacctcagttctgtgaaaggcggacgcagcaggacagaatctccgtggacatctgtctgaatagtacttccaaaggcaggagccatctggtcatccttagtcatggcaaggcgagagccatctggttgactgattgctcgctgatgacaaggttcctttttcaccttcgttttcagggtgtccat

SEQ ID NO: 136199 - DNA, 498 bp, Homo sapiens
aagcttccagctgaagtgggtctgcaacagtgcccctgtaaaattaacacctttagtttctttatgggagatgtaacctgtgccagaaaatgtgtgtgttggcccttgttttttccccacactcagctgtggtgagtttttccccccatgtcccactggatcaggtttggatgctctttctctgcagattggtccttgtgttctatatgacaggtgggagagctctgtctccagagctgtagcagtagatgggatagtggtctctccttatcagcactgtggggaaaacattctcgggattctaccctttcttctctaacaggccttgtagtgttcctgctagcgagaagatagcttggccgggcggctgatctcaccttgtaattctgacactgtgtctcccgggcttgtcggcttcatgacttgtgcccaaagtttgatttctcgcagaccaggtaaagaccaagaggctctcataggcgccttggcagagttgcc

SEQ ID NO: 136200 - DNA, 1147 bp, Homo sapiens
tttcgtgcatggccggcaggagcgcaccgcgctgtctcccttcagggatccgcaccgccctacaatcctgctttgtgctgagattgtagtcctgcaggcgtacaactaacaagctgggtgcagataagagactacagctccccgcatcccaagcaaaggtccctcctctacggagcccctccacgcgtccactgcggttccgccgtgccaaggggagcttggctgttcacgggcctcacctgctagcgagaagatagcttggccgggcggctgatctcaccttgtaattctgacactgtgtctcccgggcttggcggcttcatgacttgtgcccaaagtttgatttctcgcagaccaggaggacccattggacccccgggctggctgcagggcccacacctgggttagacctcgcacagggacgctgctgccactgtaataaagcgtgcctacacgcttctgaaactggttgtaggaacaacctcagttctgtgaaaggcggacgcagcaggacagaatctccgtggacatctgtctggaggagcaattttactgcgacattttaaagaaacaaatttaattgatttccaagggtgtccatcgcgcttccttcactgccttgatcatgtcggggtcaccacctgcgggggtttgtcctgcagaccctgactcaacgacggatgaataatgtacactgacacagatcttatgcttgtcagtcctgctgagcatccaggccacttacagactccaagaagagtcctgtcagccacggctctgacttgttggccctcccggcatttatttagcacacatttaatgacagaagtctcaggtaaacaccactagaaggctggaaacactctttttgtagaacatacaaatggacatttctaagcacattgaggcctataatgaaaaattgaatatcccacaatgagaactagagggaagctatctgtgataatgctttgtggtgtatggattcatctcactgactgaaacctgagttttgattcaccaggttaaaaacgctctttttgtagaacctacaaaaagacatttctgagcccattgaggcctacagtgaaaaaccaagaatcccataatacaatctagaaaacaagctatctaggaaaatgttttg

SEQ ID NO: 136201 - DNA, 2362 bp, Homo sapiens
  misc_feature (1)...(2362): n = a,t,c or g
acttgtctggctccggagcgcccccgcccggtgtgggagctcaggcggcggcggccgctgaggaggaggagcgagaggtggtgcgggtccgagtcaaggtgaggctggcggtgagtcggcccagccgccgaggcaagttccgctcttttgctgtagatccccagatcacctcgctcgacgtgttgcagcacatcctcatccgagcctttgatttgagtgggtgagtgggaagatgctggggactgctgggccgggaccggctaggacaggaagtttacctctcacttctatctgactgggacctcagcacagcctttgccactgcctccaaaccttacctgcaattgcgtgtagatattcggccctcggaggacagtgagtactcagtgcccccaggagcaatcagccccaaagatgtcattggctccgacgtgttgctggctgagaaacggtcatcactgacgactgccgccctgccctttacacagtccatcctcactcaggtgttttcagggaccctagggacccaacaagtgctgagctggtcgtatggggaagatgtcaagcccttcaagccacccctgagcgatgctgagtttcacacgtacctgaaccacgagggccagctctcccgacccgaggagttgcgcctgcggatctatcatggcggtgtggagccctcgctgcgaaaggtgagcatcctcagtcatctgttggtgtatccagatggactgacaggccgagagcggatggactacatgaaacgcaagagccgcgagtatgagcagctcaagagcgagtgggcccagcgagcgaaccctgaggacctggaattcatccgcagcacggtcctcaaggatgtactgcgcactgaccgggcccacccctactatgcggggcctgaggatggcccacatctacgggcgctgcacgacctgctcaccacctatgccgttacccacccacaggtgtcctactgccagggcatgagtgaccttgcctcacccatcctcgctgtcatggaccatgagggccatgcctttgtttgcttttgtggcatcatgaaacgcctggccgccaacttccaccctgacggccgcgccatggccaccaagtttgcacacttgaagctgttgctgcgacacgcctgaccctgacttttatcaatacctgcaagaggcaggcgctgatgacctcttcttctgttaccgctggctgctgctggaactcaagcgtgagttcgccttcgacgatgccctccgcatgcttgaggtcacttggagttcgctgccccctgatcctcctgaacatgaggtagagctggttggaccccccagccaagtggcagacactggttttggagaccacagaggggtggcccgtgcgacagaggcacatgctgaggcctgctggtggaggaggtagtacctttgaagatgctgttgaccacctggccacagccagtcaggggcctggtggtggggggcgtctcctgagacaggccagcttggatggcctccagcaactcagggataacatgggctccaggagggaccctctggtccagctgccccacccagctgcccttatcagctccaagtggcctctctgagcctttattgaactacccagacccactgctctcctccttttcccaccctgattccccatcttcctcatctccaccatccacccaggaggcctctcccactggtgatatggctgtaggatcccccttgatgcaagaggtaggctccccgaaagaccctggaaagtccctgccacctgtaccaccaatgggcctgcccccaccccaagagtttggccgggggaacccattcatgctgttcctctgcctggccatcctgctggagcaccgcgaccacatcatgcgcaatgggctggattataatgagctggccatgcactttgaccgccttgtgcgaaaacaccacctggggcgcgtcctgcgccgggctagggctctctttgctgattacctgcagtcagaggtgtgggactcagaggagggggctgaggccacagccgcatcttgatcaggctttctcaagccctccatcggccccaccagatctccattctttgccatgagggccaacacatgagaccccacctccctccctgcctgccagccctagacttgttggagcatagagcccttcctccccaggcctaagtatgtggagctctgctttggcactgccccgcagaggccacgcctatttattctgtttctgttgttttgtttttaacaactatactttgcacacctgannnnnnnnnnnnnnnnnnnnnnnnnnnnnngcggccccctaaataaaaagggccccgttaaaccccc

SEQ ID NO: 136202 - DNA, 387 bp, Homo sapiens
gtgcggctgcagagaattgagacttacaagttttgaattcctgtatctgagaacggagtcgttgggggtggtggagggggttggaattggggacctacggaaggctcagctcttgccaggccaaattgagacatgtctgacacaagcgagagtggtgcaggtctaactcgcttccaggctgaagcttcagaaaaggacagtagctcgatgatgcagactctgttgacagtgacccagaatgtggaggtcccagagacaccgaaggcctcaaaggcactggaggtctcagaggatgtgaaggcctcatctactactcagctgactgatacccaggttctggcagctgaaaacaagagtctagcagctgacaccaagaaacagaatgct

SEQ ID NO: 136203 - DNA, 279 bp, Homo sapiens
gcaaatgatttggtgaagtaccttttggctaaagaccagacgaagattcccatcaagcgctcggtgctagcatctctgttgataagcacagaaccgggttatgccacccttggtgtggttggcaaagagtctatagcttgggcatcagggccacctggcatctcttcagtcaggtgctcacaacactctccccttgcagacatgctgaaggacatcatcaaagaatacactgatgtgtaccccgaaatcattgaacgagcaggctattctttggagaag

SEQ ID NO: 136204 - DNA, 499 bp, Homo sapiens
catcattacgccaagcttggcacgaggcgagagggacttagagaaggcagacgcatcccgaactcgctggaggacaaggctcagctcttgccaggccaaattgagacatgtctgacacaagcgagagtggtgcaggtctaactcgcttccaggctgaagcttcagaaaaggacagtagctcgatgatgcagactctgttgacagtgacccagaggctcgggaggcacctgccacccaggcctcatctactactcagctgactgatacccaggttctggcagctgaaaacaagagtctagcagctgacaccaagaaacagaatgctgacccgcaggctgtgacaatgcctgccactgagaccaaaaaggtcagccatgtggctgatacaaaggtcaatacaaaggctcaggagactgaggctgcaccctctcaggccccagcagatgaacctgagcctgagagtgcagctgcccagtctcaggagaatcaggatactcgg

SEQ ID NO: 136205 - DNA, 984 bp, Homo sapiens
tgaaggttgtgggacatgaaataagggactcactttgactgagtgcttgcgttgtaccaggtgggcagccattcttccatcttcttggaaacccagggaagggaaaatatgattttttctattttactgaagagtagactgaggcttgcaagtctaagtgccttgccaagggtggcatagagctggaagcagagactgggtagaattctgtatctgaggaatctgggagaggctagcctagcgagttggctggtgtgtctgttgcagatggctgctgaacataaacctctctgtcctgttatttctctaggactaaggactcacccaagctgggtctgctcatggtgcttcttagcatcatcttcatgaatggaaatcggtccagtgaggctgtcatctgggaggtgctgcgcaagttggggctgcgccctgggtatgattgggctctctcagcgcttgctgtccgtgttgtcctttggcaagagaggacggtcctaggattgcatcagtctggtggtctggtggagcgggtggggtgctggactgggtagagggcccagggttctgacctgggtggatgatgggtgaatggtcctgaactctctgctccctctctcagtgtctcttgggcttctatggagcttccctcttgtgctggaaacctcttttccatcttggaaatgcctctgcccacatctgggaagtgccatagccttgagtgaatttatttgtttatttatttttctttttcttctctcaggatacatcattcactctttggggacgtgaagaagctcatcactgatgagtttgtgaagcagaagtacctggactatgccagagtccccaatagcaatccccctgaatatgagttcttctggggcctgcgctcttactatgagaccagcaagatgaaagtcctcaagtttggctgcaaggtacaaaaagaaggatcccaaggaatgggcagctcagtaccgagag

SEQ ID NO: 136206 - DNA, 578 bp, Homo sapiens
gacgtccttttctttgccatcgtctcaagttttctgcaaacttgttttggtctttccatctttttctactctgccaggcaaatgatttggtgaagtaccttttggctaaagaccagacgaagattcccatcaagcgctcgggtaaagtcctaccaatcctccctctgccctgagctctgccctccattgcccttacaccattgtgctggggatatcccctgctcttatgcttatgtctctgtcctcccaaagttctgatttggcagtgctagcatctctgttgataagcacagaaccggggttatgccacccttggtgtgggttggcaaagagtctatagcttgggcatcagggccacctggcatctcttcagtcaggtgctcacaacactctccccttgcagacatgctgaaggacatcatcaaagaatacactgatgtgtaccccgaaatcattgaacgagcaggctattctttggagaaggtatttgggattcaattgaaggaaattgataagaatgaccacttgtacattcttctcagcaccttagagcccactgatgcaggcatactgggaac

SEQ ID NO: 136207 - DNA, 2544 bp, Homo sapiens
  misc_feature (1)...(2544): n = a,t,c or g
tcccgaccgacgatttcgtgtgcactgggaaaaggggcggtgtcctcatagctgccgcgctggcacatcttcctggagaaggggagggtgcggctgcagagaattgagacttataagctttgaatttttgtttttgagaacggagtcgatgggggtggtggagggggttggaattggggacctacggaaggtgaggatcaacctccaggcacaacaggggagaggacgttcagtgggcttcaacttgacccaggccttctccccttcaggctcagctcttgccaggccaaattgaaacatgtctgacacaagcgagagtggtggcaggtctaactcgcttccaggcttgaagcttcagaaaaggacagtagctcgatgatgcagactctgttgacagtgacccagaatgtggaggtcccagagacaccgaaggcctcaaaggcactggtaggtctcagaggatgtgaaggtctcaaaagcctctggggtctcaaaggccacagaggtctcaaagaccccagaggctcgggaggcacctgccacccaggcctcgtcttacttactcagcttgactgattacccaggttctggcagcttgaaaacaagagtctagcagcttgacaccaaggaaacagaatggttgacccgcaggcttgttgacaattgcctgccacttgagaccaaaaaggtcagccatgttgctgattacggaaggttcaattacaaaggcttcaggagactgaggcttgcaccctcttcaggccccagcagatgaacctgagcctgagagtgcagctgcccagttttcagggagattcagggtattcgggcccaaggtcaaagccaagaaagcccgaaaggtgaagcatctggatggggaaaaggatggcagcagtgatcagagtcaagcttctggaaccacaggtgggccgaagggtctcaaaggccctaatggcctcaatggcccgcagggcttcaaggggtcccatagccttttgggcccgcagggcatcaaggactcggttggctgctttgggcccggagagcctttgctctccccttggagatcaccttaaagccccgtagggcaaaggggcttcgccgttagagttgccaagttccagttcatcccaagagcctgaagcaccaccacctcggggttttggcccttttgcaagggagggcaaatgaatttggtgaagtaccttttggctaaagaccagacgaagattcccatcaagcgctcggacatgctgaaggacatcatcaaagaatacactgatgtgtaccccgaaatcatttgaacgagcaggctattccttggaagaaggtatttgggattcaattgaaggaaattgataagaatgaccacttgtacattcttctcagcaccttagagcccactgatgcaggcatactgggaacgactaaggactcacccaagctgggtctgctcatggtgcttcttagcatcatcttcaatgaatggaaatcggtccaagtgaggctgtcatctgggaaggtactgcgcaagttgtggactgcgccctgaggatacatcattcaactcttgggggacgtgaaggaagctcatcactgatgagttttgttaagcagaagtacctgggactatgccagaaggtccccaatagcaatcccccctgaatatgagtttcttctgggggcctgcgctctttactaatgagaaccagcaaagatgaaaagtcctcaaagttttgcctgcaagggtaccaaaaggaaggatccccaaggaattggggcagctcagtccccccccgggaaagnaaggggcgaatggaagcggattttgaaggctgcaagctgaggctcaccttggaagccaaggctaagggcccgagattagaagctccgaatgggccantgggcctcggctccggagaaatgcttgccgggcccttgcaactgggacgaagcttgatatcgggaacccctgggccaaagcccggatccccaggcgggagcagaaacttaaagccaaagccccaaagagaagtggcagtgccaagcactggtgccaagtaccagtacccaataacagtgccagtggccagtgccatgcaccagtggtggcttcaagtgctgctgccagccttgaccgccactcttcacatttggggctcttccgctggcctttggttggaacttggttgccagcaccagtcggcacgctctggtgcctgttggtgtctcctacaagtgagattttagatatttgttaatccctgcccagtcttttctctttaaggccaggggtgcatccctcagaaaccctactcaaacacagcacttctaggcaggccacctatcaatccaattgaaagttgacaactctgcattaaaatctatttgccatttcnnnnnnnnnnnnngggggggcccgtttaaaagaaccaagtttaagtaccggggcgtggaaaggaaaattttttataaggggccctaaattcaattcctggcccgggtttaacacggcggaagtggaaaacccggcgttcccaacta

SEQ ID NO: 136208 - DNA, 516 bp, Homo sapiens
gaattccgccagccttccttcaggcgctcaatctggccttattccttctgactcaagctttcggacaggaaacccagccaagttcaaccaggtcctggatcagtttggggagaagtttcaagcagatgggacctacaccctaattatccggctgcggcacaacgtgattaagacaggtgtacgcatgatcagcctctcctattcccgaatctccttggctgacatcgcccagaagctgcagttggatagccccgaagatgcagagttcattgttgccaaggccatccgggatggtgtcattgaggccagcatcaaccacgagaagggctatgtccaatccaaggagatgattgacatctattccacccgagagccccagctagccttccaccaggaggggaaggatagttctgtgtactcctttagggagtgggggactagaactgggatgtcttggcttgtatgttttttgaagcttcgattatgatttttaaacaataaaaagttctccacaaa

SEQ ID NO: 136209 - DNA, 476 bp, Homo sapiens
  misc_feature (1)...(476): n = a,t,c or g
gcagttccgccagccctccctcaagcgctcactcatgccctatttccttctgactcaagctgtcaggacaggaaacctagccaagttcaaccaggtcctggatcagtttggggagaagtttcaagcagatgggacctacaccctaattatccggctgcggcacaacgtgattaagacaggtgtacgcatgatcagcctctcctattcccgaatctccttggctgacatcgcccagaagctgcagttggatagccccgaagatgcagagttcattgttgccaaggccatccgggatggtgtcattgaggccagcatcaaccacgagaagggctatgtccaatccaaggatagttctgtgtactcctttagggagtgggggactagaactgggatgtcttggcttgtatgttttttgaagcttcgattatgatttttaaacaataaaaagttctccccnnnnnnnnnnnnnnnnnnnn

SEQ ID NO: 136210 - DNA, 434 bp, Homo sapiens
ggcacgaggtttcaagcagatgggacctacaccctaattatccggctgcggcacaacgtgattaagacaggtgtggatcaggatctgaggggctgttggaggagcagaagccaggccagggcaaacctagtgggtatccttgggcaagtgaagggtctgtgtccactctgcccaccccatcgctccttcctctcccaggtgtacgcatgatcagcctctcctattcccgaatctccttggctgacatcgcccagaagctgcagttggatagccccgaagatgcagatttcattgttgccaaggtggggctggttcaggaaccacagtgaccaggttgtcactttcctgccaatctcaggaggcaggagtgggaggagtttggccaaggaggggaataagtaaagcaatggcataatcatttcagggcgtgcccc

SEQ ID NO: 136211 - DNA, 2274 bp, Homo sapiens
  misc_feature (1)...(2274): n = a,t,c or g
gcgtcacgctccgggtttgcagctgctccgtcatcgtgcggcccgacgctatctcgcgctcgtgtgcaggcccggctcggctcctggtccccggtgcgagggttaacgcgaggccccggcctcggtccccggactaggccgtgaccccgggtgccatgaagcaggagggctcggcgcggcgccgcggcgcggacaaggcgaaaccgccgcccggcggaggagaacaagaaccccccaccggcgccggccccccaggatgtggagatgaaagaggaggcagcgacgggtggcgggtcaacgggggaggcagacgggcaagacggcggcggcagcggcttgaagcaacttcccagccaagagctggaantacagtcacctttggaaggacatcaaggagcaccgtgaaacaagctagagaaaggcggtttcaggcaaggagccgagattcgtgctgcgggccctgcggatgctgccttccacatcacgccgcctcaaccactatgttctgtataaggctgtgcaggggctttcttcacttcaaataatgccactccgagactttttgctccccttcctggaaagagcccatgggacacaagaggctgatttactgttccgtccccgcacgggaaaagctgcggggacgacccctcctgcctgaagtggaagcctatctccaactcctcgtggtcatcttcatgatgaacagcaagcgctacaaagaggcacagaagatctctgatgatctgatgcagaagatcagtactcagaaccgccgggccctaggaccttgtaggccgcaaagtgttactattatcacgcccgggtctatgagttcctgggacaagctgggatgtggtgcgcatttctttgcatggttcggctccggacagctacgcttcggcatgacgcagacgggcaggccacccctgttgaacctcctgctgcggaattaccttacactacaagcttgtaccgaccagcctgagaagcntggtgtccaagtctgtgttccccaagagcaggcccaacaancaaatgagtggggccaagttacctcctacttacaccaggggcgaatcaaagccatccaggctggagtactcagaggcccggagaacgatgaccaacgcccttcgcaaggccccttcagcacacagctgtcggcttcaaacagacggtgcacaagcttctcatcgtggtggagctgttgctgggggagatccctgaccggctgcagttccgccagccctccctcaagcgctcactcatgccctatttccttctgactcaagctgtcaggacagggaaccctacccaggttcacccaggtcctggatcagtttggggagaagtttcaagcagatgggacctacaccctaattatccggctgcggcacaacgtgattaagacaggtgtacgcatgatcagcctctcctattcccggatcctccttggctgacatcgcccagaagctggcagttggatagccccgaaagatgcagagttcattggtggccaaggccatccggggatggtgtcattgaggccagcatcaaccaacgagaaggcctatgtccaaatccaaggagatgattgacatctattccaccccgagacccccagctagccctccacccagcgcatctccttctgcctagatatccacaacatggtctggtcaaggcccatgagggtttcntccccaaaatcgtacaaacaaggctcttggagtctgcagaggaacggccgtgagcgaagaaacaagcaggacttggaagtttcccaaggagatggccagaagatgatgatgacagcttccccttgaaactggggggctggggaggggtaagggggaaatgggggacaaggcaactttgtcccccttgggggtaccccctgccccagggcacctgtcccccattttccccacacacagctcatatgctggcattccgtggcagggggtgggggtgctgggagccagccacccctgacctccccccagggctcctccccagccgggtgactttacttgtacagccaggcaggagggtgggcaggcaacctccccggggcagggtcctggccagcagtgtggcagacaggaggggaaggatcagtctgtgtactccttttagggagtgggggactagaacttgggatgtctatggcttgctatgttttttgaagcttcgattatgatttttaaacaataaaaaagttctcccaaaaaaaaaaaaaaaaaaaaaaaaaaaagcggccgcgaattc

SEQ ID NO: 136212 - DNA, 416 bp, Homo sapiens
  misc_feature (1)...(416): n = a,t,c or g
gttttaggatcaccagcaattctctttaatcctctttcttttccttctaaaagcttttgcaaagtccaatttatttttccagtagatagattatcttttaagaaaacgcactagcaagattgtagcaaagtgtgtttatgcaaacaggtggtgcagagacagaggggcggaccttgtgggcagctggaggaccatcccagctcatgggccacgcacagatgggagcacctcagtgttttcagccaagagaacacaagtctcgggatccatgtggctccctcaggccctggacccaggcaggcaggacacccttgaccatggggggccgtggggagggaaagcgcagtaatagctgagtgttcagaggaggggctgggaaggncctcaggcacctgcgtggcagctccacgggccag

SEQ ID NO: 136213 - DNA, 356 bp, Homo sapiens
  misc_feature (1)...(356): n = a,t,c or g
gcctccctctctctatggacgtccgagcgcccccagctgtcatggccgccgtggaccaggctctgaaggagtttggcagaatcgacattctcattaactgctccagcagctcctgcggtctcccattctgcaggtgcggccgggaacttcctgtgccccgctggcgccttgtccttcaacgccttcaagaccgtgatggacatcgataccagcggcaccttcaatgtgtctcgtgtgctctatgagaagttcttccgggaccacggaggggtgatcgtnaacatcactgccaccctggggaaccgggggcaggcgctccaggtgcatgcaggcttccgcaaaggccgctgtggacg

SEQ ID NO: 136214 - DNA, 346 bp, Homo sapiens
ctggcccgtggagctgccacgcaggtgcctgagggccaggtgccacgcaggtgtctgaggaccagggcctgagggagccacatggatcccgagacttgtgttctcttggctgaaaacactgaggtgctcccatctgtgcgtggcccatgagctgggatggtcctccagctgcccacaaggtccgcccctctgtctctgcaccacctgtttgcataaacacactttgctacaatcttgctagtgcgttttcttaaaagataatctatttactgtaaaaataaattggactttgcaaaagcttttagaaggaaaagaaagaggattaaagagaattgctggtgaaaaa

SEQ ID NO: 136215 - DNA, 360 bp, Homo sapiens
gtggccctcaggccagcctgagcaccaaggtcactgccagcccgctgcagaggctggggaacaagaccgagatcgcccacagcgtgctctacctggccagccctctggcttcctacgtgacgggggccgtgctggtggccgatggcggggcatggttgacgttcccaaacggaatcttccggccgctgcttcctgccgcctcactcagccaggtggagagcaccaatctgaaccagcaatgcctgcagcccagcccctcctctgaacactcagctattactgcgctttccctccccacggccccaactccagggcaggagcaactggacagtgggcctggcccgtggagctgccacgcag

SEQ ID NO: 136216 - DNA, 1994 bp, Homo sapiens
  misc_feature (1)...(1994): n = a,t,c or g
atgttggtgggagaccaaaaaggtgagtcccacaggaagagatatggcctttccactggtggctttgtgctcagggcatctgaggaccagatgggacattgcagctccagtgggacctgcctagcaggggtagctacctttatggttattgtgggcaagcaacccccgaaccagaagagccgagaaaccaaagaacaaggcagacagatcccgtttgtctgtgtcagaacagtagataagctggaaatcctagcggcattcctggaaccagggttcatagaggccaacgtggtggattcgcatccacgtggtcaggaaggggagcagggagcaccccgcttcagaacagtcctccacgccagccccacagggagaaggagtttctccggcaggtactggaaggcggatcccacactggagtattccgaccttcagctgcacgactggtgccaaatccccactccctggtgtccccagacttactctgattggtgtcaagggctacactcacacattttcctggccgccaggaagctggctggggccaccggccggcgctgcctccctctctctatggacgtccgagcgcccccagctgtcatggccgccgtggaccaggctctgaaggagtttggcagaatcgacattctcattaactgtgagtcggtgctgagtgaggttggtggcttctcacaggctccagcagctcctgcggtctcccattctgcaggtgcggccgggaacttcctgtgccccgctggcgccttgtccttcaacgccttcaagaccgtgatggacatcgataccagcggcaccttcaatgtgtctcgtgtgctctatgagaagttcttccgggaccacggaggggtgatcgtgaacatcactgccaccctggggaaccgggggcaggcgctccaggtgcatgcaggctccgccaaggccgctgtggacgcgatgacgcggcacttggctgtggagtggggtccccaaaacatccgcgtcaacagcctcgcccctggccccatcagtggcacagaggggctccggcgactggatgcctctcagggaatgagctgggggagaggggagggtgctgggtcttggggctcacggggcctgagccttctgctgccctccaggtggccctcaggccagcctgagcaccaaggtcactgccagcccgctgcagaggctggggaacaagaccgagatcgcccacagcgtgctctacctggccagccctctggcttcctacgtgacgggggccgtgctggtggccgatggcggggcatggttgacgttcccaaacggtgtcaaagggctgccggatttcgcatccttctctgctaagctctaggaatcttccggccgctgcttcctgccgcctcactcagccaggtggagagcaccaatctgcaaccagcaatgcctgcagcccagcccctcctctgaacactcagctattactgcgctttccctccccacggccccaactccagggcaggagcaactggaccagtgggccttggcccgtggaagctgccacgcaggtgccntgaaggccaggtgccacgtcaggtgtctgaaggacccaggtgcccacgcaggtggttgggggtacaagacaaagatgcctgggaatgtcccctggcccccatggtccaagggtgtccctgacctgccctgggtcccagggcctgagggagccacatggattccgaagactttgtgttctctttggctgaaaaacactgaggtgctcccactctgtgcgtggcccatgagctgggatggtcctcccagctgcccacaaggtccgcccctctgtctctgcacccaccctgtttgcataaacacactttgctacaatcttgctagtgcgttttcttaaaagataatctatcttactgtaaaaataaattggactttcgccaaagcttttagaaggaaaagaaagaggattaaagagaattgctggtgatcctaaaaaaaaa

SEQ ID NO: 136217 - DNA, 1647 bp, Homo sapiens
atgctagagagccttctctttcctctgaggtttgaactgatgttctgtgtcttcacaccctggcatgacagttacgtgtggtcagcccgctccccaggcccgtccctgccgccgccaggctcctgcctgtgtctcccctgggctggacctaatggtagccgtcaggcaagggagtctggaaaagatattttcaggttgcccgatgttatcgagatgaaggttcaagaccagacagacagcctgagtttactcaggctcagcagggagctgctggatgagaaagagcctgaagtcttgcaggactcactggatagatgttattcgactccttcaggttatcttgaactgcctgacttaggccagccctacagcagtgctgtttactcattggaggaacagtaccttggcttggctcttgacgtggacattccttcctggtggtatggtgaggatcaggattccccagtgctcaggctgcagactagtaccagtcagtggcctgttaggaaccggactgcacagcaggaggggagtggcggcaccaatagctgcaggaactggcccaaatttttctctctcagatttggaaagttcttcatactacagcatgagtccaggagcaatgaggaggtctttacccagcacatcctctacgaggaagtgaacactggtgacagtctcagtgtcatgcccacagcagacattacagctcagtgccagctcttttcccaccgagcccccaaagctctcaatatccagtttactggagttgccctaaaagccatcctaaacagctggcagttctctgaacatatcacacttcactcacaatgtggcttcttcctgataggctcctcccttctgggggttatgttcgaaatatctgataacctgtgtgacatgagcataccaattagaacagacactgccctgcttgcagggctttctttggctaggtcctggaatgctcctgatctgcaagacattaaccctttagatttcggactgtggaggcaggagctagagccagccgcttattcctcaaaggaaacaggaacaggatgtggcagcagcagcaacttgattgacaataaaaatcaaactcagacacttggaacaacacagacccaagactttgttctacatccagtgactcaccagactgaacagaagtttaaaaggagtcctagaactacattaagttgcccaattgcttcctcccttggctttctttcaaccagaggtgcagtgtccaagagaaaggtggttgcgattgcttttaaacatgcacccatttgttatttcagctccacaaagcgcctcaagtctgtggaggatgaaatggacagtcctggtgaggagccattttatacaggccaagggcgctccccaggaagtggcagtcagtcaagtggatggcatgaagtggagccaggaatgccatctccaaccacactgaagaagtcggagaagtctggtttcagcagcccctccccttcacagacctcctccctgggaacggcgttcacacagcatcaccgacctgtcattacaggacccagagaatcaaagttccataaggccagggattccctgctgaatcctagcaccaagaagagtgcttggcacacagctgatgctcaataa

SEQ ID NO: 136218 - DNA, 1954 bp, Homo sapiens
  misc_feature (1)...(1954): n = a,t,c or g
tcaatagatccccatttcttgagagcagggatccatcatctctgaatcccacacactaacacagccatgccgtgtcacagatgcctgataggtgcaggcaccccaccctgtctcttcctcttcggggacaggtgctggtgggaagcacactgccacccgcaccttcatgccatcagctttacaggctagggcggaccatatgtaggaagggctgctgtggtctagtcctgccagcgacctggtagttggtgacgtgggggaggctgcacctccttctgttgacgtggttggaggctttgtgtctggcaccggcagaggcacaggcctggccatcggtggtggcggtggcggtggcaacattggggtgggaaggaatgggttgtgcaccttgccttggctgctcccattgggctgtccagcctgctgaccagcatcagggcagacaagttggacaaattctttcagcgtctcctgagggtgatagcggatggctgggtgtgagaagtaaggcccaggctgctggaaaaagggtgaatgtcggggaaaatgaaagaatcgatggtgttgcaatgtggaacttgctctggggtccctggtaaatgaacaggtcggtgaatgctgtgtgaaagccgttccccagggaaggaggtctgtgaaaggggaggggctgctgaaaaccagacttctccgacttcttcagtgtggttggagatggcattccctggctccaacttacagacaatccacttggactgactgtccacttccctggggagcgcgcttggcctgtataaaatggctcctcacccaggactgtccatttcatcctccacagacttgaggcgctttgtggagctcgtagaggatgtgctgggtaaagacctcctcattgctcctggactcatgctgtagtatgaagaactttccaaatctgagagagaaaaatttgggccagttccctgcagctaatgggtgtctgtgacactcttaactaagctcaagtgacactaaaaaacacctgaatgtgacaaaactgtccctggaagccccaaatgtcccattttctggctggtccttaatgtcagcgtcacttggcctggcctgggactttcagattgacttgaaatcctgcctgcatgcacaaagtatgcccaaatataaatcgagttccttaacagaaacccctatgtgatggggttggacacagagccctggattagagcattgtggggactttacaaggcgctcgccatcagtactttccagcgggaatacctttaaacaaaatcaccataacaaggtccaacctccagactttatctgcctggcggaggcagtcaattcttcgcatcttgcctttctggtctgggttggaaagaacacaacatggaggttttttccctgtaactgtaagaacaaaatcctctcgatattcgggtcggatatctttccgcaactttgccagaagtcgagatgcccacttctgcttgacctctggtttttcacttagcaattcatccttcacggctctctcttcttcttttgacatacgcttttcatgttttttgaagtattttcgttttcgggcccgcaggttgaaccatgtgtaggcaaaggctcggacgtggggcagaagtgcttcgatgaaaggatgaaattcatcctgggtgagacagagcggagaatacataactgccgggcgctggggtatgcgtgtgcgtctgggtgtgcggtttggaggtgtgcgtgagtgtgggtgagaaagnnnnnnnnnnnnnnnnnnnnnnnnnnnnnnnnnnnnnnnnnnnnnngggggagaaaaaaaaatcaagcctgcttcttgcgttcacatttccaagtcggctcgctctcccgctcgctccccggcccccccgccccctcccccgatcagcgcattactgggtaacgcagtgaggagcagttacagacgaaa

SEQ ID NO: 136219 - DNA, 329 bp, Homo sapiens
cccctccacccaaccacactgtctataaactgggcctggcccccagctctgcaagaaggtgagttaagttggggcggcctcagggctcttggaggagcaaccctgatcctgctccatgctcctgtccaggtctggggtcagtgacatatcagagaccccagggagacccatataccctgatgacaagtcccaggtacaacacagagacccaaaccactgctgaatcaccctgtgacccttgtaggtattaagctcttgccctgtgtattatgtctgttctcactctgccaataaagatatacccgagactgggtaatttatggtaattt

SEQ ID NO: 136220 - DNA, 1308 bp, Homo sapiens
tcaaggctggggcacccgaggaaggacatggatgatgacacaaaagcaactctcatttcctacatgtccttgagtttcaggcatgggtactgcttctccgaagacccctgtgtgcacacggagcttgggatccagtctggaaggggagggcggggcgacccggaccctccagggaacgcccttgagtaactcgcgcacttgggacccattcccacctaggaccataggctcaagatggcctggtggatgccgccggacgcgcctctcctctggcgggaaccgaaggcgccggtaggttttcacacttgcagccgatcggcctcgtggacctccagagtagggggcagcgggcgagagattccccagcggcgttgcaggagcccacgtggagcccacgggcttccctgccctgagcagctgcagctgcagccgccgccgcccagctgaatgcccaagacaggttccacatttgtggcccatttccccagtcctctggcccagggtcacagtccacctgggggcggtgcggggtggtgcagtggatgcagcccagacaggcccccactgcttggggtgggcagccatggtgagcttctcaacccaaacagtcccgcttacgaggttggcgcagggccccggccaccggcagctctggtacacgcgctggaccaccgtctccgagccattctgcacctggcaggacaccgtccgtgtcactgtgtgatggcaccagtgcctgagagccagccccacaggcagcatcggctccttgcctgcgcactggcgggaagggctggcggggccactgatggattgagttttccatgtggagggggcagctttcaaggtaggaatttttggcagttcacgtaacccccagcaggcagagaggaaacgtggcttcgacaccaccagatcctgcagctttccgctgtgcagacgtgctgctgtccacctgacccgtgtaactgcagcctgcagagagaccacaggcccttgaactcccgtctccgcatctccccacccctcgttcgggtttagcgcagggcccacatcagtggtatttatcaacttggatctctgcggcagcatctggcattgagtgggtgataagtaaatatcctcaatctgggtgggcaccatctcatcagctgccagtgcagctctgacaaaggcaggggcaacaatctgtgcaaaggcccttctctcaaaggcttcgtaactacgggggctggggaagcccaagtgagactccagtgagtgtttggcaggcctggtcgcctccaggggccgcacagccgcagacat

SEQ ID NO: 136221 - DNA, 2087 bp, Homo sapiens
atgggaagggcagaaatacgaactcctgagctttctcggcaaccaagtcctcttattgggcttatggacatgtccgcttatggacggaatcctgactttccctcgccccaagtcagcagatatttacttatcacccactcaatgccagatgctgccgcagagatccaagttgacggaaagctgcaggatctggtggtgtcgaagccacgtttcctctctgcctgctgggggttacgtgaactgccaaaaattcctaccttgaaagctgccccctccacatggaaaactcaatccatcagtggccccgccagcccttcccgccagtgcgcaggcaaggagccgatgctgcctgtggggctggctctcaggcactggtgccatcacacagtgacacggacggtgtcctgccaggtgcagaatggctcggagacggtggtccagcgcgtgtaccagagctgccggtggccggggccctgcgccaacctcgtaagcagggccctgactctctctataagcccctttatgttttttctggacttagtggaaatgggaaacagctgctgggggctgcagggagaagcagttcccatgcacaaatgcatgaactgcacccggctcagtgacatgagtgagcgactgaccacactggaggccaaggtcctcctgctagaagcagcagaacggccctccagcccggacaacgacctgccagcccccgagagcactccgccgacctggaatgaggacttcctccccgacgccatccctcttgctcaccctgtgccacgacagagaaggcccacgggcccagccgggcccccggggcagacaggaccaccagggcctgcaggcccccccgggtctaaaggtgaccgaggccagacaggagagaagggtccagcggggccgcctgggctcctggggcctccagggccccgtgggcttcctggagagatggggcgccccggccccccaggaccacccggcccagcaggcaacccaggcccctcaccaaacagcccccagggcgccctctactccctgcagccgcctacagacaaagacaatggagactcaaggctggcctctgccatcgtggacacagtgctggcaggtgtcccaggaccccggggtccccctggtccaccaggtccccctgggcctcgaggtcccccaggacccccaggaacacctggatcccagggcctggctggagagcgaggcacagtggggccgtccggcgagggggtgcagcagctgagagaggccctgaagatcctggcagagcgagtcctcatcctggagcacatgattgggatccacgatcccctggcctccccagagggaggttctggccaggatgctgccctgagagccaacctcaagatgaagaggggtggcacccaacccgatggggtccttgctgccctgcttgggcccgaccctggacagaagagcgtggaccaggccagcagcaggaagtctggggtcagtgacatatcagagaccccagggagacccatataccctgatgacaagtcccagtcggctgtgagcgtcctgtgtgccaggtcacgtcttcgtgcccagctcaggccaggtgcagagcagatgaatgactgcaaaggaatcactggcacaaggcaggacattcacgcagtcagctttgcaagtgaacacaatattcaaaactgggtgtcaaagcaccttcaattgtctcccccagtgaccccagcaacgcaggctcccctaaaggtaagagttcctcaggcaagtaccctggtgctgtaacaaatatccccattgaccctgggggcgacatttctcacagctctaaaggataggaagtccaagatcaaggtgccagcagatccggttccctggtgagggctctctttctggtttgcagatggccgccttcttgctgtgtcaggttgggcagcctgtcaccatcttgtagcccagccattgaaagaacgtaggctctgagactgtcacaacagggaagacagagatggaggagtctccatgcgagtgatgctgtcatttctgttcacagtccattgggcagcactagtcatatggcc

SEQ ID NO: 136222 - DNA, 453 bp, Homo sapiens
ttgaggtgtgggatgcggattccactaaatggactcaaaggctcaggctccgcaaaaggccagccgggatctctgggcgccgactcccaggacgcagctgtgaccctcttgcacgaacccctacggtggaggtcggcggtgcgatagcgtagttcctaaccagtgcttcaccaagcatatgcagagccgccttttgggttagggagaaaaagcactggagggtgggggaggaagaggggtaaagtctttagtaaccaaaagggacttctgacctgacaagggcacccgcaggagcggcgcactagcgcgagccagcagcctccacatggtcacgggctgtccggcggcgcggagctcccccagcgactccggctgtctcctgcacccaggtaagcagcggcgctccactacctagctgtaatcggctcaggacctcgtcggaattgcgcacgc

SEQ ID NO: 136223 - DNA, 1270 bp, Homo sapiens
actcaacctcccccggaactcaacccccgtcgctcgagtttctttcgcttccgtcgggactctgcggagtggacccgagtgaacacaacttccggccccactgagcggtgtcctgagccgattacagctaggtagtggagcgccgctgcttacctgggtgcaggagacagccggagtcgctgggggagctccgcgccgccggacgcccgtgaccatgtggaggctgctggctcgcgctagtgcgccgctcctgcgggggttcgtgcaagagggtcacagctgcgtctgggagtcggcgcccagagatcccggctggccttttgcggagcctgagcctttgagtccatttagtggaatccgcatcccacacctcaagactcctccggcggaagaaaatagatcttttgagatgtatagttttactttatcctgggttgtctgtgcttcttttagatgtttccattcctgaaaaacccaagcttagatttattgaaagggcaccactttgtgccaaaagcattggggtggtggctacctgcattgggggccactttgaaatgatgcgcctgacaatcaacccgctctatggaccccaagaacatgtttgccatatggcgagtacccagcccctttcaagcccatcactcgcaaaagtgttgggcatcgcatggtggggaggcaaaaggtgctatttgacactacctgacaccctgtgaaggctggccgccttgtttgtagagatgggtgggcgttgtgaatttgcaagaagtgccaaggtttccttgacccaggttgccctacgaagttgccccttcgccagcaaaaggctgtgagcctgcgggactcctagagaaggatgcgaacaagatcaagaggaaagagaacgtcaacaacccagaaccccttggaccatttgagcggaatagccgactgcccaacatggctgggcatacgggaaagtacctgagccccatatgacgttgaccccacaaggggaaatacttggggcaaggttctacatgcccaaaacgtgtgtagtgagtgtaggagatatactgtatataggctactgaaagaacggattctgccatttctattcccctcgagcctacccgactgaagtctttgggtagctcttaagaccataactaagtgagcagcatttgagtagatttctgaaaaacaatgttatttgttgatttaaaaagaaaactgtatttttattaaataaaatttaaacatcacttcaggaaaaaaaaaaaaaaaaaaa

SEQ ID NO: 136224 - DNA, 470 bp, Homo sapiens
cttgtttcaagtctttcgtacaatacattggtatctgttctcagcacaaaaactatatgaaaccagcgttcagggaagaaatcacaaccatggtaatcaacaataactccaccttctctcatttggttatctaactcatcaactactctgtcttcatctaaaatgggacagtcatactcttcatcatagccatcatacaattgctcggtgagcaggatgttcggaagcaacatggtccccgccgcgacggcttcgggcgcctcgctcacgtgccctttgctctggctttcgatgacacatttccgtcgcaaagttggagggtgggcataactcgggtcggtatttactataaagtgatgttgtgattcgctgcactccagcttgggtggcagagtgagtcccttaaaaaaccttcccagctgctgctgtttgtcaaactgtaaaatcatgacattatgtttaactgccat

SEQ ID NO: 136225 - DNA, 565 bp, Homo sapiens
tcaagagttatgatctttgatccactgctcaatccatttcaagatctgatctacattattttctagctcttctggtttattactgggcagctgatgcacgatttcttcctggtaggattccgtggcttattcataaagaacttgaaaaatctcacactgaatattgtctggtaggttcctctcaatatacccccttggttcaagtctttcggtccaatacattggtatctgttctcagcacaaaaactatatgaaaccagcgttcagggaagaaatcacaaccatggtaatcaacaataactccaccttctctcatttggttatctaactcatcaactactctgtcttcatctaaaatgggacagtcatactcttcatcatagccatcatacaattgctcttctcgagctaaatcacccacattaactgtatttcagtcctgattttgacgcaagttctttgcctagtgtggtttttccaacccctggtgtaccggtgagcaggatgttcggaagcaacatggtccccgccgcgacggcttcgggcgcctcgccggacgcgtggg

SEQ ID NO: 136226 - DNA, 1281 bp, Homo sapiens
gagcaaagggcacgtgagcgaggcgcccgaagccgtcgcggcggggaccatgttgcttccgaacatcctgcatcaccggtacaccaggggttggaaaaaccacactaggcaaagaacttgcgtcaaaatcaggactgaaatacattaatgtgggtgatttagctcgagaagtctgatcatcggatatcatggagtcctggcaagacggccttctcccaagagcatgcccgaaagatggcacagatgatgggcacaaatcctgaaggatatcggggattactagaatatgagccaagaagttataaatccagatgttggagttttgccttcccgatatgtgaccacaattctaggatgatgcaaaaatttattcaagccatgctaaggaaagctactgttgactgcagatgatgtgccgattgggcaatccaggtgcccgcgctggatccagtctttttacctctcctcccccaaagagattttcttattaagatatttggcaaggcaaaagaaatcaaaccccttttgcccattgatcaagccatatttcaggtcctaggttgccacctgatagatactgctttaacagctcccaaactataggctgaaatcttttacagaaaaagggcattcaacttctgcggggaaggaattaacagtccccgcggttaagtgttgggttcaggttactaagcaggaccaaggtactccccacattaggggcacacccaaccccacaggaccatgtctgttttcaacttaaagtaggggactccccatgtcccttcaccaggtcaaaggtttaccagtaccagatgccctacttcttcagtcttccagctgttaaaagctttcaatttcctggcaacctcagccagtttcagaatgttctggattaatcccatccattaaatcgggtcccaaaaacattcttattacccactaaatatgatgtcatccacaaaatactgcccaatgaatcatcaaatgcattgaaaagaaaacgtgaagatgatgatgatggccgatgatgatgatgatgactatgataatctgtaatcctagccttgctgaatggaacatgaatacttggttcttgaattcattgtactgatactaaacatgcgtgctggatgttttcaagttgtattttagaaaactttcatatttaatgagtaaacacagttaccatacttttcaattgaaatgaagtgtttttcatcagccttaaaagtgtaagaaaaataaagttgtcattcattcgaaaaaaaaaaaaaaaaa

SEQ ID NO: 136227 - DNA, 511 bp, Homo sapiens
tgttaagtggtctccttgtcactcacatacctttgctcctgagttcttccataggtgccactgaacagcttccttgaggtaaactcttctgaacttgtaacctacattaactgggatattaaataatctcttttaaccttaatgcccttatgaaatgacataaaaagaagaaatgcattgcactgttgtatgagcagataagacaaaatactaattctctccttttccccccatccctatcttgttttctttctcagaagctgtagatgaaaccaaacctaaggaaagtgcccggcaggacgagggtaaagaagaggaacctgaggctgaccaagaacatgcctgaactctaagaaatggctttccacatccccaccctcccctctcctgagcctgtctctccctaccctcttctcagctccactctgaagtcccttcctgtcctgctcacgtctgtgagtctgtcctttcccacccactagccctctttctctctgtgtaagcaaacatt

SEQ ID NO: 136228 - DNA, 1772 bp, Homo sapiens
aagtgattatttcactgaaggctagacaacaattccgagaaagagacggagagagagggaagaaaaagacagatagatattggggggaaggagaagactggagaagagagggaagagaggacagcggagagagagcaccagagagagagggagagagagagagagcgctagagagagggagcgagcatgtgcgatgagcaatagctgtggaccttacagttgctgctaactgccctggtgtgtgtgagggagagagagggagggagggagagagagcgcgctagcgcgagagagtgagtgagcatgcgagcagaaaagaggtggagagggggggaataagaatagagagagaaggaaaggagagaaggcaggaagaaggcaagggacgagacaaccatgctcccgctgtatgagaagaaccaaacaggttgaaaaaaatgatgacgaccaaaagattgaacaagatggtatcaaaccagaagataaagctcataaggccgcaaccaaaattcaggctagcttccgtggacacataacaaggaaaaagctcaaaggagagaagaaggatgatgtccaagcttgctgaggctgaagcttaataagaaggatgaagccccttgtttgccgatggggtggagaagaaaggagaagggcaccactactgcccgaagcagcccccagccactggctccaaagcctggatgagcccggcaaagcaggagaaacttctttccgaggagaagatgggggaggggtgattgcttgccacagagcaaggcagcccccccaggctccttgcatccttcagaggagaaggccggctcagctgagacagaaagtgccactaaagcttccactgataactcgccgtcctccaaggctgaagatgccccagccaagggaggagcctaaacaagccgatgtgcctgctcctttggggtttttcccaaccccttgggggcccttttgcttgctgccaccacccctgccgcagaggatgctgctgccaaggcaacagcccagcctccaacggagactggggagagcagccaagctgaagagaacatagaagctgtagatgaaaaccaaacctaaggaaagtgcccggcaggacgagggtaaagaagaggaacctgaggctggaccaagaacatgcctggaactctggagaaatgggctttccacatccccaccctccgggctgcttagcctgtctctccctaccctcttctcagctccactctgaagtcccttcctgtcctgctcacgtctgtgagtctgtcctttcccacccactagccctctttctctctgtgtgggcaaacatttaaaaaaaaaaaaaaaaagcaggaaagatcccaagtcaaacagtgtggcttaaacattttttgtttcttggtgttgttatggcaagtttttggtaatgatgattcaatcattttgggaaattcttgcactgtatccaagttatttgatctggtgcgtgtggccctgtgggagtccactttcctctctctctctctctctgttccaagtgtgtgtgcaatgttccggttcaactgaggagkccaaaatatcgagtgaattcaaaatcatttttgttttcctccttttcaatgtgatggaatgaacaaaaaggaaaaaattcaaaaaacccagtttgttttaaaaataaataaataaagcaaatgtgccaattagcgtaaacttgcggctctaaggctcctttttcaacccgaatattaataaatcatgagagtaatcaaaaaaaa

SEQ ID NO: 136229 - DNA, 1620 bp, Homo sapiens
  misc_feature (1)...(1620): n = a,t,c or g
ccacggattccgacttccccatccacaacctgccctacggcgtcttctcgaccagaggcgacccaagaccgaggataggtgtggccattgggaccagatcctggacctcagcatcatcaagcacctcttcagcatgtccttcatcccggtggccgaggattccgacttccccatccacaacctgccctacggcgtcttctcgaccagaggcgacccaagaccgaggataggtgtggccattggcgaccagatcctggacctcagcatcatcaagcacctctttactggtcctgtcctctccaaacaccaggatgtcttcaatcagcctacactcaacagcttcatgggncctgggtcacgctgcctggaaggaggcgagagtgttcttgcagaacttgcttgtctgtgaagccaagccaggctcagagatgacaccgaacttcggaagtgtgcattcatctcccaggcttctgccacgatgcaccttccagccaccataggagactacacagacttctattcctctcggcagcatgctaccaacgtcggaatcatgttcagggacaaggagaatgcgttgatgccaaattggctgcacttaccagtgggcctaccatggccgtgcctcctctgtcgtggtgtctggcaccccaatccgaaggcccatgggacagatgaaacctgatgactctaagcctcccgtatatggtgcctgcaagctcttggacatggagctggaaatggctttttttgtaggccctggaaacagattgggagagccgatccccatttccaaggcccatgagcacatttttggaatggtccttatgaacgactggagtgcacgagacattcagaagtgggagtatgtccctctcgggccattccttggggaagagttttggggaccactgtctcttccgtggggtggttgcccatgggatgctcttcatgccctttggctgtgcccaacccgaaagcagtaccccaggccccctgccgttatctgtgccatgacgagccctacacatttgacatcaacctctctgttaaccctgaaaggacgaaggaatgcagccaggcggctacccatatgcaaagtccaaattttaaagtacatgtactggacgaatgctgcagcaagctcactcacccactctgtccaacggctgcaaacctgcggccggggggacctcctgggctttctgggacccatcaggcgggcccggagcccagaaaaatttcggctccatggttgaaactgtcgtggaagggaacgaagcccattagaccttggggaatggtcagacccaggaagtttctgctggacaggggatgaagtcatcataacagctatggctacccgggacttcaagtggtactgcccagggggatggttaaccgcatcggctttgggcaagtgtgctggaaaagtgctgcctgctctcctgccgatcatgagattttctctgctcttctggaaacaaagggctcaaagcaccccttttcaaccctgtgactgggggtcctcccctcgggctgtaggcttggttccgccatttcagttgacaaattaaagccattgtgctctgaggcctgcactgccgcagaaaaaaaaaa

SEQ ID NO: 136230 - DNA, 778 bp, Homo sapiens
gcgattctcggaattcttccatcttaccaaggagaggtgctttgctgaaagttaaccaggaactggcaggctacactggcggggatgtgagcttcatcaaagaagattttgaacttcagttgaacaagcaactcatatttgattcagttttttcagcgtctttctggggcggaatgttggtacccattggtgataagccgtcaagcattgctgataggttttaccttgggggacccacaagcatccgcggattcagcatgcacagcatcgggccacagagcgaaggagactacctaggtggagaagcgtactgggccggcggcctgcacctctacaccccattacctttccggccaggccagggtggctttggagaacttttccgaacacacttctttctcaacgcaggaaacctctgcaacctcaactatggggagggccccaaagctcactatatcgtaaagctggctgagtgcatccgctggtcgtacggggccgggattgtgcctcaggcttggcaacatcgctcggttgggaacttaattactgcgtccccatgggagtacagacaggcgacaggatatgtgatggcgtccagtttggagctgggataaggttcctgtagccgacacccctacaggagaagctctgggactggggcagcagcaaggcgcccatgccacacaccgtctctcgaggaaacgcggttcagcgattctttgactgcggaccctgtgggaaaccccgtcaataaatgttaaagacacactccgagaaa

SEQ ID NO: 136231 - DNA, 2649 bp, Homo sapiens
tcgagtgctgatgtgtctgctccccgcctccaggtaaatactttggctgtgggtgtgtgggccggacgggcacctctctcatctgatgaggcctcacacgacattggcaataaagtacctgctggtgctgaggggctctccacctttcccagtttttcactagagaagagtctgtgagtcacttgaggaggcgagtctagcagattctttcagaggtgctaaagtttcccatctttgtgcagctacacagtccacgcgccagcagcttcgcggatgtcagtgaacgctcttcgcttgcgcagtcagaacgtcctccgcggccgtgtgaacatccgggtcacaggcgcataaggaccaatgagcgaaggcatcgcgagccagggggcgcggagaaggcggggaatcatggggctgcgaggcctctgggccagcagggcagacgggcgccgcggggagacggagcctgaagctaaacaggaaattcttgaaaacaaagatgtgagttttctgttgaaggtcttgatagaattgttagtggaaacattcacttccatacaccactagggagatgatgttttcaaggccaaaaacctaattgaggtaggtgtggtctctacatggtgtgctttcccagtctcttctgaagaactcgtaaatgtccccatgtgaaacattgacacatgtcaaggtacatattgtggtgtagtatctttataattccctttctgtccatcagagaaaagctgtttttatggccagaataacaccatggttggaaacaatgaaggcagtatggtatgctacaggctttttactttcttatattggaacttagagttgggaacttttacactatgactgcattctaaagaaacttcgtatggcctgtccttcttcaaaccacggcccggaaacttcgaaagaaagtaggaagcccaacagatcattgagtacactggcctgatagaaaagttaaaataggtggcttatttgtgaaagtcagctgagtacagtgtgagtagcatttcagtccttccctctgggcttgggggaaaacagggtggctttttcactgattcccaaaggctcatatttgattcagtgagtatctaacggatgctggcacctgcactgtcagcccttactttggggatcttaccacagaatcttagcggaattgcgtgttttaatagaatccacgtggcccttcgaagggtagctctgcaacgggacaagccaggcattctcctgcggcccttgcaccccatcgcggagctctgcacgccacgggcattcagtgtgtggccagttgctagttgctgatgttcctggagtgaaaggaatgctgggagaaaacaaccatttgtttcttaagtactaatcaatgaatggataatttgcacatattttcctttggatcttttcagttgttttttataagagtcctttcccctcacggcgccaagtctagaaggctcgcgtctcactttggaaaccatgtacctgttatgccagggtggctttggagaacttttccgaacacacttctttctcaacgcaggaaacctctgcaacctcaactatggtaaaacttgcgctattcaagaaaccattgtagtacagttgttttcatgtttaaaagcacagtacacaaagatcaggcttggcaacatcgctcggttggaacttaattactgcgtccccatgggagtacagacaggcgacaggtacgtgttgggaattattttccacaatcacatcccactctccagtaattttattttgttttggacgtggttcgcgtctggggacacggcaggggctgccaggctgctgcggctccctactgatgacagggccttcagagatggcggcggctgctcccacaaccgccagctcccattcccctccacgcctctcctgttctccacacaaagcccaagctggaaagggtgtagtcacgcaggctgcatgcatgtgtgcctgggggcccagctacccgggcttggggcccagcttggccatggaagtgagagccaggtggagaggctcctggcgtgtggtgggaggtggggtgcaaggcgccaagggtgctgttggcatgaccttcctaaagcaccccatgctgggtgcttcctggcgggtgagaagaaggtgggagatgaccaggagccctgcaccaagacagcggccgtgagggagggagagagcgtggggtgcacagcagaaggtggatgtttggggctgtctggaggatgccaaggctggcttgcccctggtctggtggaacttcgcagcgctgcagccaggcaggaaggcagcaggaggaggaggaagcggaggcggcaccttctgagagttcatcctcagaaggtggtaagtgggcagactagagcgtgaagccagaggcacttcatcaagtgctttccacaaaagaccaaaaataagatcgctactaggacaaaggacagtcacctggtgaggatctgccatcaggccacattttcccattgggtgactcctgcaaaggccctacactttgacgtcctccccatctccggcagctccttaaactaagaactcattttaatttctgaattctccctttttaaagaccagataaatttacctttgggacagttagatgtg

SEQ ID NO: 136232 - DNA, 1020 bp, Homo sapiens
atggagagttgtgaggttcctaaacccagagaagatctttctggactacctttggaggtccatgggagaggtgacactgagtggtcacctcgagctttacgtagatcaactgtgcctcgagctttacgtagatcaactgtggtctgcattttagaatgcacgttcccaaaggttcacagtcagctgcaaggccaggtgcacactgcagacacctgtgagacctgtggatgccgaggaggcaccaaaggggagagggaacagtgggctctggctctgggagtctccaagcatttgctgctgctgctcctcgcagccacaggaggtgccagtgctgtggttgatgccagacctgccttcctgcttctgtgggttcggctttgttgtcccttcacgtttttcccatttgcctttccacttggcagacttcagtctgaacaccctcccaatgccgaagggcctgttcgcagctgggatctttcgaacatcttcatgcttaggcagcatttgcacaagaggcataacctgaagtcctgtcttgttcgttttgtagccaagtcttcattcagcttaagaagtactagtggctgctggttgcctctcaccccaactgaccagccacagcttggaggggagaacgctgtcctggttgccagcaggtctaaatttgatagactggcaatgaacagccatagcatgaagacatccgagcctggaactgagtgtctaggaaagtccctggtgaagatgaggccacggggactgcgggatcagacatgggagggtggacccatagaaacgatcgcgggaacacagccagggagggctgagaaccgggaccagcttttattagccggcactgttatcacaaccatcactcgcgatgggagtttgcacgccacagtctcgatcatcaacatctacaaagagggaaatttggcgattcagcaggcgggcaagaacatgagtgccaggctgactgtcgtctgcaagcagtgccctctcctcagaagaggccagtag

SEQ ID NO: 136233 - DNA, 438 bp, Homo sapiens
atgttgctggaacaactggacattgacatgccagaaagtgaatttagacacagagcttatacccttcatgaaaataaactcaaaatgggtcacaggcctaaatgtaaaacacaaagctttgaaactcctggaataaaattattagccggcactgttatcacaaccatcactcgcgatgggagtttgcacgccacagtctcgatcatcaacatctacaaagagggaaatttggcgattcagcaggcgggcaagaacatgagtgccaggctgactgtcgtctgcaagcagtgccctctcctcagaagaggtctaaattacattattatgggccaagtaggtgaagatgggcgaggcaaaatcatgccaaacagctttatcatgatgttcaagaccaagaatcagaagctcctggatgccttaaaaaataagcaatgttaa

SEQ ID NO: 136234 - DNA, 1356 bp, Homo sapiens
atgtctggtgaagaacttgtattcagaatatacaaagaactcatacaactcaacgataaaaaggtaaagattccaaagtatgacagaaagttaggcagagctgtgaaggtcactctgaagggtctgggacctcagagaggcagcaaggagcaaagtccatcgaaagacagtcagtgtagcactggggttgaatctcctattggtgaatacaagcactgctggcgggttcaagcttctgctgaccagcggaaagacttcttcagtgagtgggggctgttcacagggggttttctgaaagagtatctactatgcggggttgactctctgaccatattttacaactgcttaggggattcccggttaaaatgctgggattataggcgtgagccacagcactgggccacgaatagcctctttttgacaaaggctctctggatgtacaagtgtgggattgcccatggatgcatggaatcgggtgttctggcgcatgtggcaatctttgtcacaagatttagctatggagaagaactgcagtcctttgtgggagctgtcattgttggtacatacaatgtcgtggttgtgattgtgcttaccaaactgctggtggcaatgcttcataaaagctttcagttgatagcaaatcatgaagacaaagaatggaagtttgctcgagcaaaattatggcttagctactttgatgacaaatgtacgttacctccacctttcaacatcattccctcaccaaagactatctgctatatgattagtagcctcagtaagtggatttgctctcatacatcaaaaggcaaggtcaaacggcaaaacagtttaaagataatatgtgtcctttttctcttgcattttcctgtgtgggtggaccttgtcatcacagtggtctgtgagagcctgagagtctgggcagattgttccatgcctcgcctgaggtgtaaagaccttgctgcagctttcatcggaggagcagggaaagaggttcccagacctgttttcacatgtggtggcattcttactggagagtctggatttattggcagtgaaggttttcctggagtgtaccctccaaatagcaaatgtacttggaaaatcacatatcatattgttgttttgaaggaatggaggaatttgaaacagaagagagatgaaaactatcaaaaagtgatgtgctgcctagtgcatcgttacttgacttccatgagacagaagatgcaaagtacagatcaggcaactgtggaaaatctaaacgaactgcgccaagatctgtcaaaattccgaaatgaaataagggatttacttggctttcggacttctaaatatgctatgttttatccaagaaattaa

SEQ ID NO: 136235 - DNA, 837 bp, Homo sapiens
attcacgttcccatacttcccttcatctgctctgtattggagctgattctcagctctcttgccctctggctttttgttaggttctgccaaggggacaaatcacggaagattggattggaacaaaaagcagcagaaggcaggccaattgtgtctgagagaaatgaacttcttattcagtttttatcagacttaagtttaactgcagatgggtttattggtcactacatattcaggccaaaaaaactgcctacaactacagaacagcctgtcaccaccacattccctgtaaccacgggagctccacccctgctttgcggcacttctatatgccctcccccggcaacactctcaggccatgccagtggccaaggcttcagtgaccagtaccagtgttcccccagtgaagtaatggcaccctggccattggttcagtctttgcctacctgtgaggttcccgaaggaaaagtagtcgttctcaatttccgattcatagacctcgagagtgacaacctgtgccgctatgactttgtggatgtgtacaatggccatgccaatggccagcgcattggccgcttctgtggcactttccggcctggagcccttgtgtccagtggcaacaagatgatggtgcagatgatttctgatgccaacacagctggcaatggcttcatggccatgttctccgctgctgaaccaaacgaaagagagaaatcagtaatttattattgcacaaaaccctacccagatgctgcagcaaaacatgaaaaatactttctagagctaagtgctgtccgagatagaatcagggacacgttcattgcttttgcccaaatttaa

SEQ ID NO: 136236 - DNA, 4345 bp, Homo sapiens
gaattccgatctctcgtcctcttcctgggctaggccgccccaggcgcggcccctgcgactcctggcacggccccgtgctcggctgccgccctggcgcgcgccacactgtcgtccccggacgggcgcggaccggctcggccggggcgccggcggctggggaggggtcgctggccccggggccgcgcatgcgccgccaccaacttggggctgtcagtggagggcgagtgctggttctcaggggaggcgacgccttcgggccaacgggcctcgagccgaggcagcagtgggaacgactcatcctttttccagccctggggcgtggctggggtcggggtcggggtcggggccggtgggggccccgcccccgtctcctggcctgcccccttcatgggccgcgatgatggcggccctgtacccgagcacggacctctcgggcgcctcctcctcctccctgccttcctctccatcctcttcctcgccgaacgaggtgatggcgctgaaggatgtgcgggaggtgaaggaggagaatacgctgaatgagaagcttttcttgctggcgtgcgacaagggtgactattatatggttaaaaagattttggaggaaaacagttcaggtgacttgaacataaattgcgtagatgtgcttgggagaaatgctgttaccataactattgaaaacgaaaacttggatatactgcagcttcttttggactacggttgtcagaaactaatggaacgaattcagaatcctgagtattcaacaactatggatgttgcacctgtcattttagctgctcatcgtaacaactatgaaattcttacaatgctcttaaaacaggatgtatctctacccaagccccatgcagttggctgtgaatgcacattgtgttctgcaaaaaacaaaaaggatagcctccggcattccaggtttcgtcttgatatatatcgatgtttggccagtccagctctaataatgttaacagaggaggatccaattctgagagcatttgaacttagtgctgatttaaaagaactaagtcttgtggaggtggaattcaggaatgattatgaggaactagcccggcaatgtaaaatgtttgctaaggatttacttgcacaagcccggaattctcgtgaattggaagttattctaaaccatacgtctagtgacgagcctcttgacaaacggggattattagaagaaagaatgaatttaagtcgtctaaaacttgctatcaaatataaccagaaagagtttgtctcccagtctaactgccagcagttcctgaacactgtttggtttggacagatgtcgggttaccgacgcaagcccacctgtaagaagataatgactgttttgacagtaggcatcttttggccagttttgtcactttgttatttgatagctcccaaatctcagtttggcagaatcattcacacaccttttatgaaatttatcattcatggagcatcatatttcacatttctgctgttgcttaatctatactctcttgtttacaatgaggataagaaaaacacaatggggccagcccttgaaagaatagactatcttcttattctgtggattattgggatgatttggtcagacattaaaagactctggtatgaagggttggaagactttttagaagaatctcgtaatcaactcagttttgtcatgaattctctttatttggcaacctttgccctcaaagtggttgctcacaacaagtttcatgattttgctgatcggaaggattgggatgcattccatcctacactggtggcagaagggctttttgcatttgcaaatgttctaagttatcttcgtctcttttttatgtatacaaccagctctatcttgggtccattacagatttcaatgggacagatgttacaagattttggaaaatttcttgggatgtttcttcttgttttgttttctttcacaattggactgacacaactgtatgataaaggatatacttcaaaggagcagaaggactgtgtaggcatcttctgtgaacagcaaagcaatgataccttccattcgttcattggcacctgctttgctttgttctggtatattttctccttagcgcatgtggcaatctttgtcacaagatttagctatggagaagaactgcagtcctttgtgggagctgtcattgttggtacatacaatgtcgtggttgtgattgtgcttaccaaactgctggtggcaatgcttcataaaagctttcagttgatagcaaatcatgaagacaaagaatggaagtttgctcgagcaaaattatggcttagctactttgatgacaaatgtacgttacctccacctttcaacatcattccctcaccaaagactatctgctatatgattagtagcctcagtaagtggatttgctctcatacatcaaaaggcaaggtcaaacggcaaaacagtttaaaggaatggaggaatttgaaacagaagagagatgaaaactatcaaaaagtgatgtgctgcctagtgcatcgttacttgacttccatgagacagaagatgcaaagtacagatcaggcaactgtggaaaatctaaacgaactgcgccaagatctgtcaaaattccgaaatgaaataagggatttacttggctttcggacttctaaatatgctatgttttatccaagaaattaaccattttctaaatcatggagcgaataattttcaataacagatccaaaagactatattgcataacttgcaatgaaattaatgagatatatattgaaataaagaattatgtaaaagccattctttaaaatatttatagcataaatatatgttatgtaaagtgtgtatatagaattagttttttaaaccttctgttagtggctttttgcagaagcaaaacagattaagtagatagattttgttagcatgctgcttggttttcttacttagtgctttaaaatgtttttttttatgtttaagaggggcagttataaatggacacattgcccagaatgttttgtaaaatgaagaccagcaaatgtaggctgatctccttcacaggatacacttgaaatatagaagttatgttttaaatatctctgttttaggagttcacatatagttcagcatttattgtttaggagtataattttattttatctaaaataatagtctattttttcttttgtattttgttataatcttaagcaacaaagaaaaaaccctaatatttgaatctatttatgtctttcaatttaaattcacttcagtttttgttattgtaatatatttacttttacatggttataatcactttatatttttaatgtttttttcacttaatattttatatatacatttccatgtattgatgtagttagtccacatttaaatttttatagaattatatagtttttgaaaaatacagtcagtagatgttttattttttagctattcagttatgtttataagtttgcatagctacttctcgacatttggtttgttttaatttttttgtatcataatagtcctatttttttttcaagttggagtgaatgtttttagttttaagatagataggagacacttttttatcacatgtagtcacaacctgttttgtttttgtaaaacataggaagtctctttaatgcaatgatttgttttatatttggactaaggttcttgagcttatctcccaaggtactttccataatttaacacagcttctataaaagtgacttcatgcttacttgtggatcattcttgctgcttaagatgaaaagcattggttttttaaaattagagaataaaatatgtatttaaatttttggtgtgttcacataaagggatgtagctaaaatgttttcataggctattatatattctcgcagcatttccagttaagaggatattaggtatataattctcttcttaaccgaatgtcagatggtcttacgccacagggtgcaggtaacccttggtctgtaagcaccaccgatccagggatcattgtctaaataggttactattgtttgtttcatcttgcttttgcatttttattttttaatttccaaattttaagtgttccctctttggggcaaattcttataaaaatgtttattgtaaagttatatattttgtctacgatgggattatgcacttcccaattgggattttacatctggatttttagtcattctaaaaaacacctaattattaaaacatttatagagtgcctactgtatgcatgagttgagttgcttctgaggtacattttgaatgacagcatattgtaagaaaaaaaaaggtgaataaaatttgacattagattataaaaaaaaaaaggaattc

SEQ ID NO: 136237 - DNA, 1844 bp, Homo sapiens
gcgcggtgggtgcggaggggcgtgtgtgccggcgcgcgcgccytggggtgcaaaccccgagcgtctacgytgccatgaggggcgcgaacgcctgggcgccactctgcctgctgctggctgccgccacccagctctcgcggcagcagtccccagagagacctgttttcacatgtggtggcattcttactggagagtctggatttattggcagtgaaggttttcctggagtgtgcgcctccagagagcaaatgtacttggaaaatcacagttcccgaaggaaaagtagtcgttctcaatttccgattcatagacctcgagagtgacaacctgtgccgctatgactttgtggatgtgtacaatggccatgccaatggccagcgcattggccgcttctgtggcactttccggcctggagcccttgtgtccagtggcaacaagatgatggtgcagatgatttctgatgccaacacagctggcaatggcttcatggccatgttctccgctgctgaaccaaacgaaagaggggatcagtattgtggaggactccttgacagaccttccggctcttttaaaacccccaacttggccagaccggggattaccctgcaggagtcacttgtgtgtggcacattgtagccccaaagaatcagcttatagaattaaagtttgagaagtttgatgtggagcgagataactactgccgatatgattatgtggctgtgtttaatggcggggaagtcaacgatgctagaagaattggaaagtattgtggtgatagtccacctgcgccaattgtgtctgagagaaatgaacttcttattcagtttttatcagacttaagtttaactgcagatgggtttattggtcactacatattcaggccaaaaaaacttgcctacaacttacagaacagcctgttcaccaccacattccctgtaaccacgggtttaaaacccaccgtggccttgtgtcaacaaaagtgtagacggacggggactctggagggcaattattgttcaagtgacttttgtattagccggcactgttatcacaaccatcactcgcgatgggagtttgcacgccacagtctcgatcatcaacatctacaaagagggaaatttggcgattcagcaggcgggcaagaacatgagtgccaggctgactgtagtctgcaagcagtgccctctcctcaggaagaggtctaaattacattattatggggccaagtagggtgaaggatggggcgaggcaaaattcatggccaaacagctttatcatgatgttccagacccaggaatcagaagctcctgggatgcccttaaaaaataagccaatgttaaccagtgaactgtggtcccatttaagctgtattctgcccattgccctttgaaaagatcctatgttcctcctcagtagaaaaaaaaatacgttataaaattacatattctgaaagagcattcccgaaaagatggggactggttgactcttcaccatgatgggaggtatgagggcctcccgagatagctgagggaagttcctttgccctgctgtcagaggagcagctatctgattggaaacctgccgacttagtgcggtgataggaagctaaaagtgtccaagcgttgaccagcttggaagccgtttatttatacatctctgtaaaaaggatattttagaattggagttgtgtgaaagatgtcaaaaaaagattttagaagtgccaatatttataagtgttatttggtttcaccttcaagccttttgccctgaaggtggttacaatcttgtcttgcgttttctaaatcaatgcttaataaaatatttttaaaggaaaaaaaaaaaaa

SEQ ID NO: 136238 - DNA, 389 bp, Homo sapiens
  misc_feature (1)...(389): n = a,t,c or g
cgcagcagcaatgaagagagcacacctgtggggggcgccattgtgcnccacacagtgggtgatggcaggcttctgaggcggccctaaagagagtttggtgcaagcttcctttgatgttttttagaagccagatttggcctcaagaactggggtcactgctggcgacactgaagctcgccccatgcgttgctgctggccctgagcatcactcgccgtcccacttgttcctcctcgtcgtcatcgcaggtttnnnnnnnnnnnnnnnnnnnnnnnnngttcacaccctcgcgcgcgcacctgctgttaagaggtacagccccaccccagcaaaatcctcgcttcctcttccccgagacgtagccccagaggagcgaatctggaacgaaatt

SEQ ID NO: 136239 - DNA, 720 bp, Homo sapiens
  misc_feature (1)...(720): n = a,t,c or g
tttcgtgggatcccccgggggtgcaaccttgctccacctgtgctgccctcggcgggcctggctggccccgcgcagagcggcggcggcgctcgctgtcactgccggaggtgagagcgcagcagtagcttcagcctgtcttgggcttggtccagattcgctcctctggggctacgtcccggggaagaggaagcgaggattttgctggggtggggctgtacctcttaacagcaggtgcgcgcgcgagggtgtgaacnnnnnnnnnnnnnnnnnnnnnnnnnnnnnctgcgatgacgacgaggaggaacaagtgggacggcgagtgatgctcagggccagcagcaacgcatggggcgagcttcagtgtcgccagcagtgaccccaggtacggtatctacttcgcagcgcgcctggccgagaaataagaaagagggcagccagtaggcaggcctatacccaacaaaagtataatcgagacgccctgagttcagaagttcttgaggccaaatctggctcctaaaaaacatcaaaggaagcttgcaccaaactctcttcagggccgcctcagaagcctgccatcacccactgtgtggtgcacaatggcgccccccacaggtgtgctctcttcattgctgctgctggtgacaattgcaggtagggaactactaccctggagatacccgtgttggacttgagtttcttgactagtgtaagcaactcaga

SEQ ID NO: 136240 - DNA, 1088 bp, Homo sapiens
gctcgaggggtgtgttcctacttagctttgtacagcccagatgtgatatttctacaggaagttattcccccatattatagctacctaaagaagagatcaagtaattatgagattattacaggtcatgaagaaggatatttcacagctataatgttgaagaaatcaagagtgaaattaacaagccaagagattattccttttccaagtaccaaaatgatgagaaaccttttatgtgtgcatgtgaatgtgtcaggaaatgagctttgccttatgacatcccatttggagagcaccaaagggcatgctgcggaacgaatgaatcagttaaaaatgggtttaaagaaaatgcaagaggctccagagtcagctacagttatatttgcaggagatacaaatctaagggatcgagaggttaccagatgtggtggtttacccaacaacattgtggatgtctgggagtttttgggcaaacctaaacattgccagtatacatgggatacacaaatgaactctaatcttggaataactgctgcttgtaaacttcgttttgatcgaatatttttcagagcagcagcagaagagggacacattattccccgaagtttggaccttcttggattagaaaaactggactgtggtagatttcctagtgatcactggggtcttctgtgcaacttagatataatatttgtaaaatgcttttcaagtgtggggttttgccctgattgttgcaaatacaatttccaccttctgggaaaggtaggtttgctgtggagggaaataatgtactaggatccattgtcacagaaaaaccaactatgatttatggttgtgttttcagaattcaacattaaagattaatgtttatttaaacgaacacattcctgcattcaggatgtgaggccatttaatagaaagggcacaaagcctgtcagagtttttcaacggtgcttacagctgccagctgggattcccaaacaggtaccccattgtctctgagctaatgtttatatttttccattcaggcaccgaaatagttaatatttaaaataagtcttcaaaagaaaacataagagattattgagttc

SEQ ID NO: 136241 - DNA, 1227 bp, Homo sapiens
cacaggcgcctgcgcagagccgcgcgttggcctcctgttccgcttaaaggggcggtgcagaggcggcaggaatatggagttggggagttgcctgttatggctttagggaggcggcggaggaagagggcgagcctgaggtgaaaaagcggcgacttctgtgtgtggagtttgcctcggtcgcaagctgcgatgccgcagtgagctcagtgcttcctggccgagaacgactgggagatggaaagggctctgaactcctacttcgagcctccggcggaggagagcagccttggaacgccgacctgaaaccatctctgagcccaagacctatgttgacctaaccaatgaagaaacaactgattccaccacttctaaaatcagcccatctgaagatactcagcaagaaaatgggcagcatgttctctcttcattacctgggaatatttgatgggattaggatcttaaacaatctgttcagaggagggctcgaggggtgtgttcctacttagctttgtaagtattatcacttctatttaatagtaatgtgtcttatgtatatacggaacgaatgaatcagttaaaaatggttttaaagaaaatgcaagaggctccagagtcagctacagttatatttgcaggagatacaaatctaagggatcgagaggtgagtgacaaagtcagtttgatgtttgaggacagattattgctatggagactaatttaggttcctttttgccagtatacatgggatacacaaatgaactctaatcttggaataactgctgcttgtaaacttcgttttgatcgaatatttttcagagcagcagcagaagagggacacattattccccgaagtttggaccttcttggattagaaaaactggactgtggtagatttcctagtgatcactggggtcttctgtgcaacttagatataatattgtaaaatgcttttcaaggtccagattcgctcctctggggctacgtcccggggaagaggaagcgaggattttgctggggtggggctgtacctcttaacagcaggtgcgcgcgcgagggtgtgaacgtgtgtgtgtgtgtgtgtgtgtgtgtgtgtgtgtgtgtgtgtgtgtgtaagacctgcgatgacgacgagggcgagcttcagtgtcgccagcagtgaccacaggtacggtatctacttcccagagcgcctggccgagaaataggaaagagggcagccagtaggca

SEQ ID NO: 136242 - DNA, 534 bp, Homo sapiens
tcaggtaatcaggatgatctcacttgaaattcttaacataaatgcatttgcaaaggcctttttctccccaaataatgtcacattcttgggttcccggtggaccagtcttctggggagccagccttcaacccactgcgccagggcttctggatgtgaactaggctctgtccatgagatgcaccgtgtatcaaaagcatctggaatggtatctgacacataagacgtgtacagtacattccaaaaacattcattaaggaactgctgctctgacactgatgctacactggtggaacacagtccctttggcccggaagcagttgcgccagcagcgtcgcgcggcccagttcccttttccggtcggcgtggtcttgcgagtggagtgtccgctgtgcccgggcctgcaccatgagcgtcccggccttcatcgacatcagtgaagaagatcaggtgtgcttcggtcagctcgccggccggcggtcccagcgcggggcccgacgcttcaccgccagctccctggtcggcgtcgggactcat

SEQ ID NO: 136243 - DNA, 1408 bp, Homo sapiens
  misc_feature (1)...(1408): n = a,t,c or g
gcgtcgcgcggcccagttcccttttncggtcggcgtggtcttgcgagtggagtgtccgctgtgcccgggccctgcaccaatgagcgtcccggccttcatcgacatcatgtgaagaagatcaggctgctgagcttcgtgcttatctgaaatctaaaggagcctgagatttcagaagagaactcggaaggtggacttcatgttgatttagctcaaattattgaagcctgtgatgtgtgtctgaaggaggatgataaagatcgttgaaagtgtgatgaacagtgtgggtatcccctactcttggatcctgggagccagacaagcaaggaagcttttgatttgaaagccttatgtgaaaaagctgggtccaaatttccgcgaaggtgaaccgccccgtctcttgagacttgcagttttttaagcaaccttttccaccgggatgggataaggaatacttcctgttaagatacacagtgttatttgcagcctttattaaagtgggcagcatcttgtgggggccatccagtaccatccccaactggagcctgggatcaagtttagaaaatgggatttcctgaactggaatcctaaccactggaaaaaaaagcacaccccttttaaagactacctttatgaaggcacttgtggaatcgtaagaagagtgatgctgcttcaaaaggcatgggtggaattgctcggaagttacccaggagggcaatgcttcccagggctcgagttgatgcccacagggtgtattgtaccgagcattgaaagatccaaattgcatttctttttgacccaccttcttacttttaaaaccagtcaagttttttggaaaggcgagcttattccattgttcctttttaaccaaattttgtgagtgcctaaatgggccatcatatgtccaggttttatccggattaattaaggaccttccattgaattccacttggccctgttaccatggacccaggaatatggccaaaaatgaggcttcttttccttttatgggaaatggccagtagaaaaataaggaaatttccttttgaccacaatgccagcaagaaccttccagattgggagctgatggatgttgaaagccatttggttattgacgccggtaaggaactaaaaatgggtctactgccaaaattggtccagacccaggagaaaagtagttgtcagtcatagcacacatcgggacatttggaaaacgagcagtggcaaacaactgtattgacacacttaaatgcctgggaaacaaaatctgaacaaaggtgaaaaacagccttttgagtcttttctgatacctgaagtttttatgcttataaattttgggttcctttggaaaaaaaagcccctaaaatcataggtaaaacattataaactaaaaaaaaaaaaaaaaaagtcg

SEQ ID NO: 136244 - DNA, 413 bp, Homo sapiens
  misc_feature (1)...(413): n = a,t,c or g
ngggatcgtccggnatttttggatagaagcattcgtcggggctggtagcccggcagccgcaggtggggccactatgttctggctgagggaccgagccggagagccccggagcccccgtaaccctactgcgcgcgcttctcctacctctggctcaagttttcacttatcatctattccaccgtgttctggctgattggggccctggtcctgtctgtgggcatctatgcagaggttgagcggcagaaatataaaacccttgaaagtgccttcctggctccagccatcatcctcatcctcctgggcgtcgacatgttcatggtctccttcattggtgagctggcgtccctccgtgacaacctgtaccttctccaagcattcatgtacatccttgggatctgcctcatcatggagcg

SEQ ID NO: 136245 - DNA, 335 bp, Homo sapiens
ttgaggtgaaatttcaatgggtattaagtctggggtagagcttctctctccccaaatctagcttccaaagatgtggagctggtggagctgtccattggtccactgccctgtttctcctgggtgctgcctctgcctcctcatatcaccagcgtcccgggtgagggacttggggtgaaagtactgaagggctttgaagtcgttgtggatggcatgccccaccactatcttccctgtgagtatcttcaagatctggcctcgagcaatcttgaagggtgtggcattcaccatgtgagatgcttcagagacatggtggcattctccgggcagtcagcctt

SEQ ID NO: 136246 - DNA, 572 bp, Homo sapiens
agtcgcgacgagggaagatggggacatatgtcacatatagagcagttaaggaactagggaaagtggaagactcataagacctgtctttgacctggtatgttctatctctacagaacctaatatggcttatacatactgccacagaaaggactgaggtagacagtggcaaagacttcctaggagttgaacccctgaaattacataaggagtaggaccccaccagaattctgtctttgtaggctgctgactgcagaagaaactgtgtagcggaggcagggggaagaggagtacagagagtacactgggaaggaaagaacggtttcttttctcttcatgctcttgtcttccttgcttgctcaggttgggaagagcggacattcctctgtggaagatgcccaggccaccatggagctatataagttggttgaagtcgagtgggaagagcacctagcccggaatccccctacagactagtggcagtggggacgctggtgatatgaggaggcagaggcagcacccaggtgaaacagggcagtggaccaatggacagttccaccaggttccacatcttt

SEQ ID NO: 136247 - DNA, 500 bp, Homo sapiens
  misc_feature (1)...(500): n = a,t,c or g
aaaaactgaacaaacagaagtgattttatctaatacagttccaaggtagaaaaagtggagcaggcagggcttgcacccctctccacccccccatgggggtngngttnagacggcacatacacaatcatagtaaattggcagaagaaaaacacaatagattcctggctagatggggagagataaggcaatgtgcatgggggaatcagaggggagatgtgagcccctctgctcctcccacaagagtttcccctttggcccgggcacggtgggctcacgcctgtaatcccagcactttgggaggcggaggcgggtggatcactttgcggtcaggagttcgagaccagcctgggccaacgtgggtgaaatcccgtttctacttgaaaatacaaaaatttagcttgggcatngttgcnttcctgttatttcccagctacttttgggaggcttnaggcaggaaaatcattttgaaccccagggagntggaagtttnccgttacttt

SEQ ID NO: 136248 - DNA, 398 bp, Homo sapiens
tttttttttgagacggagtctcgctctgtcgcccaggccggactgcggactgcagtggcgcaatctcggctcactgcaagctccgcttcccgggttcacgccattctcctgcctcagcctcccgagtagctgggactacaggcgcccgccaccgcgcccggctaattttttgtatttttagtagagacggggtttcaccttgttagccaggatggtctcgatctcctgacctcatgatccacccgcctcggcctcccaaagtgctgggattacaggcgtgagccaccgcgcccggcctgaaacatataatttttgttcctttattattatttcttctttacctgtggagccagaggcaaggaagatgaccaagaattcagacataggagagatctgga

SEQ ID NO: 136249 - DNA, 2227 bp, Homo sapiens
ggctcattgctgggaccggcagcaacgcctgctacatggaggagatgaagaacgtggagaaggtggagggggaccaggggcagatgtgcattaacatggagcggggggcctttggggacatttggtgtctgtgatgatatcaggacacactacgacagactggtggacgaatattccctaaatgctgggaaacagagggtatgagaagatgatcagtggtatgtacctgggtgaaatcgtccgcaacatcttaatcgacttcaccaagaagggattcctcttccgagggcagatctctgagacgctgaagacccggggcatctttgagaccaagtttctctctcagatcgagagtgaccgattagcactgctccaggtccgggctatcctccagcagctaggtctgaatagcacctgcgatgacagtatcctcgtcaagacagtgtgcggggtggtgtccaggagggccgcacagctgtgtggcgcaggcatggctgcggttgtggataagatccgcgagaacagaggactggaccgtctgaatgtgactgtgggagtggacgggacactctacaagcttcatccacacttctccagaatcatgcaccagacggtgaaggaactgtcaccaaaatgtaacgtgtccttcctcctgtctgaggatggcagcggcaagggggccgccctcatcacggccgtgggcgtgcggtattcccggcgtttccacaagactctaaggcgcttggtgccagactccgatgtgcgcttcctcctctcggagagtggcagcggcaagggggctgccatggtgacggcggtggcctaccgcttggccgagcagcaccggcagatagaggagaccctggctcatttccacctcaccaaggacatgctgctggaggtgaagaagaggatgcgggccgagatggagctggggctgaggaagcagacgcacaacaatgccgtggttaagatgctgccctccttcgtccggagaactcccgacgggaccgagaatggtgacttcttggccctggatcttggaggaaccaatttccgtgtgctgctggtgaaaatccgtagtgggaaaaagagaacggtggaaatgcacaacaagatctacgccattcctattgaaatcatgcagggcactggggaagagctgtttgatcacattgtctcctgcatctctgacttcttggactacatggggatcaaaggccccaggatgcctctgggcttcacgttctcatttccctgccagcagacgagtctggacgcgggaatcttgatcacgtggacaaagggttttaaggcaacagactgcgtgggccacgatgtagtcaccttactaagggatgcgataaaaaggagagaggaatttgacctggacgtggtggctgtggtcaacgacacagtgggcaccatgatgacctgtgcttatgaggagcccacctgtgaggttggactcattgttgcctacattctcctgaaaggagcggatgatgctggcgccgaagttatcattgagccaatcacagtggaggacagggaggatatggctgtcatcaaggctgtcatcaaggctgtcatcaaggctgtcatcatcattcctggctttgtggatttcctagtatgcaatgccctgagaggaatggccaagatgggagaaggagaggagctctgggaagttgggcctccaggacccaatgcccaactaagcgccaaactcccagggcccaggattgtctcagaaacaacagcccccacccccttcctcaagaaccctgcagaaatggacagcaggcatctccaaagtgacctgtgtagattaatgaccagtaaaggcacaccccagatgccctggcactatggacggcaccaggagggggatagtgggagcccaggagtaataagttggatttccctgccagctggacgagatgaggactcagagtcaagatcaagttgcttttcagggacactgacaacgttctggccactcctagacactggaaacaaacaagacgcgatccaagacctgagaagccttgcctgccatcagtgtgacaaggaggtgatcaaggaagtggtttcgatgggcctccgggacgtggaggccgacagaacagtaaaggcaagacaaggggacggagcaccggccccacctccaggaccaccaggcggtactctaagttctggggacactgaacctccatcccactga

SEQ ID NO: 136250 - DNA, 3598 bp, Homo sapiens
tttttttttttttttttgaattggtacaaagtttactaggtcatacgacacggctcacaaagcggtgggaaattccagtgatggcattgtttgttggttggttccttttatccaaatggaagacaagacacatttccgcaggactgtccacctccccccacgagacaaacagaatgcaagactgtcacacgcggctaggactggttccacggacacacgattttgtggcattgacacaccacgatgcgatgccaggccacagtgggtgccaggaggggaggaagcagctaatgctatgcccacactcgccttcaggcagtgcccccgggagggaggcccggcagtgtctgctggtgataatacatttcacacagggagggggaaccccaaggatgggctttggaggcccagaaggcctgtcaggtggtgtgattttccatctccagccaataaataactctgttggatgaatgcatacattagaaatggatgccactacacttcacacgtgggggaccaggtcaaaatcaaaccatgcaaagtggcagggcaagtgaggagggatccgggtgagagatattatcaacagcacacgctctattctgtaccctacaatatataccattagttggattttgctttcctcccccgcgccggcaggccctggcgccagcgtctcccagcgcaactcgctgggagggtagggggtcgccgcttgaagagagaagtgctggagaggcagtaggctggggatcccggactcttagctgcttgcctctgtgcgtaaccgcacgcccacggccgtgatgagggcggcccccttgccgctgccatcctcagacaggaggaaggacacgttacattttggtgacagttccttcaccgtctggtgcatgattctggagaagtgtggatgaagcttgtagagtgtcccgtccactcccacagtcacattcagacggtccagtcctctgttctcgcggatcttatccacaaccgcagccatgcctgcgccacacagctgtgcggccctcctggacaccaccccgcacactgtcttgacgaggatactgtcatcgcaggtgctattcagacctagctgctggaggatagcccggacctggagcagtgctaatcggtcactctcgatctgagagagaaacttggtctcaaagatgccccgggtcttcagcgtctcagagatctgccctcggaagaggaatcccttcttggtgaagtcgattaagatgttgcggacgatttcacccaggtacataccactgatcatcttctcatacctttgtttcccagcatttagggaatattcgtccaccagtctgtcgtagtgtgtcctgatatcatccagacacccgttgtccccaaaggccccccactccatgttgatgcacatctgcccctggtccccctccaccatctccacgttcttcatctcctccatgtagcaggcattgctgccggtcccaacaatgagtccaacctcacaggtgggctcctcataagcacaggtcatcatggtgcccactgtgtcgttgaccacagccaccacgtccaggtcaaattcctctctcctttttatcgcatcccttagtaaggtgactacatcgtggcccacgcagtctgttgccttaaaaccctttgtccacgtgatcaagattcccgcgtccagactcgtctgctggcagggaaatgagaacgtgaagcccagaggcatcctggggcctttgatccccatgtagtccaagaagtcagagatgcaggagacaatgtgatcaaacagctcttccccagtgccctgcatgatttcaataggaatggcgtagatcttgttgtgcatttccaccgttctctttttcccactacggattttcaccagcagcacacggaaattggttcctccaagatccagggccaagaagtcaccattctcggtcccgtcgggagttctccggacgaaggagggcagcatcttaaccacggcattgttgtgcgtctgcttcctcagccccagctccatctcggcccgcatcctcttcttcacctccagcagcatgtctttggtgaggtggaaatgagccagggtctcctctatctgccggtgctgctcggccaagcggtaggccaccgccgtcaccatggcagcccccttgccgctgccactctccgagaggaggaagcgcacatcggagtctggcaccaagcgccttagagtcttgtggaaacgccgggaatactgtgggtgcgtcttgtaaagagatccgtcgacaccaaccgtggtccgcagcctgggtgtgcccttgttatcacgcaggcggttcaagatggcgcccagtgtggcagccaccaagttggctgagcgaaatgagacaatggtgcaaacgtgctggactgagacacagtcatcatcggacggctccactcccaggcgggtcaggatttctttggcattgtggaggccttccttattcttttcgatggctgacacatcactggtgttaaacttccctcgggtgagcagctccggggtgatccgcccttcaaataagaggccctccttggccatcttgactaggatcagtcgaaccagctctcccaagtacatgccactgaccatcttctcaaacagctgttttccagggttgagggatccccggtctatctccctgtcaaactctgtccggatgtcttctaatgatccatcgtctccaaaggctccccattctgtattgatacacatcctcccctcgtctccttccaccagatcaatgtgcctcagttcctccatgtagcaagcattggtgccagtgccgatgatcaggccgacttcacagtgctggtcgtcatagccacaggtcatcatggtgcccactgtgtcattcaccacagctacgatgttggcatcatagtcccctcgctttttgatggctttgttaagcagtttgaccacatctgctccttccactccgctcgctttaaatcgctttgtccaggtgatcaggatggcctcatctattttggattgttggcaaggaaaagaaaacgtgaatcccacaggtaacttcttgtccttgatcttccttttctccatgaaatctcccaggcactcagcaacatgatcaaaaagctggcttccactgccgtgcacgatgttctctggggtgtcataaacctcggactccatgtgaacattctggtttttctcatgattcacttgcacccgcagaattcgaaaggaagacccaccaagatccagggcaatgaaatctcccttttcagagccatcaggaatggaccttacgaatgttggcaacatcttgactgtggctgttggattaaaatcccgggagaggccattcttcatctccttcctgaagcgagtcatgatatctatgagagtttcatcggagagccgcatggcatagagatacttgtcaatctttttgacctggtcatccttcagctccgtgaagtaataggccaggagctgcgcggcgatcatgctggcggtcggggtcgcggggcggcaggcgtggggacggtcggtcctccgcagccctggcgagccgtggtcctccggcgg

SEQ ID NO: 136251 - DNA, 3209 bp, Homo sapiens
ttttttttttccattataaaaatttatcaagggaataatttgagtttttagaggcttggtttagcaaggtaaaaaagacaaccaaattattaaaacactttataaattattttaaaacctaccaactggggcctaaatgaaataaaccccctattaccttaggaaagagacagctttcctaaatcacagaagttggtttccaagctacactcttacttctaatgccttggaaccctaaggagaactaaagctcaccagcgatggctgctctggaagtcaaggtgggaagaacaggcaatatcctgacacaggctagatacagactctgagccaaaagcagactctgtgacatggaaagggaccacacaattttaatttttttttttttttgagacagagtctcgctctgtggccgtggcccaggctggagtgcagtggcacaatctcggctaactggaaagtccgcctcctggggttacgcaattctcctgcttaagcctcccaagtagctggaactaaaggtgcccgccaaccacgcctggctaatttttttgtatttttttagtagagacgggggtttcaccgtgttagccaggatgggtctcgatctcctgacctcgtgatctgcccgcctcggcctcccaaaagtgctgggattacaggcgtgagccaccgcgcccggccctatttttagttttaaacaaaaaagtttaagaagtaaaaaaaaaacatgttttgttgtcgttttctttgagagggagtttagcattgatgcccatgctggagtgcagtgacacgatctcgggttcactgcaatcttccgcctccttgggctcaagcgattctcctgcctcaagcctcctgagtagctaggatttacaggctcctgccaccacaccccacacattttttgtatttttagtagagaacgggaattcgccatgttggccaggctggtcttgaactcctgatctcaggtgatccgcccgcctcggcctccctaagtgttgggactacaggcgtgacgtctcgatgcctggccccaaccagaacacttctgagcgtggaagagaatgctgttaattactcaagaccaaaaggcataaaaggagacatatgtccacccaagtgataaggcagtctgggaaactacatttcccagtatgccctgccccgtgaaagttaaaaatcttagctggcacagagcgccctgggactcctgtggttagcaccatttaagaagtacaaggtatacggttgggttctgacgtgaaggcatgttccccttccatgggacacttaaccagacacaggacacaacacgtgaggtgaaatttcaatgggtattaagtctggggtagagcttctctctcccccaaatctagcttcccaaagatgtggagctggtggagctgtccattggtccactgccctgtttctcctgggtgctgcctctgcctcctcatatcaccagcgtccccactgccactagtctgtagggggattccgggctaggtgctcttcccactcgacttcaaccaacttatatagctccatggtggcctgggcatcttccacagaggaatgtccgctcttcccaacctggatatcccggtttagcagcttcttggtgagatgcttcagagacatggtggcattctccgggcagtcagccttccggttgaggggggggatatgggaggtgtcacgggtgagggacttggggtgaaagtactgaagggctttgaagtcgttgtggatggcatgccccaccactatcttccctgtgagtatcttcaagatctctccatccttgaaatgctcactcccacaagttttctttcttctggaatccaccttcctcttccacaggtgatttccatggtataccctgtttggactcatactgccagtggctccttaccttcttattgatctccaccccatgacattaatttgccttcagtcctaaatgacactcatgtttgagatgtccatgtatttagttcagttctggcttgctacatgaagtcctttaactattaccattatgttggccttagacacatggctgggacccgggctccagggaggctaacaaaagcccaaaattacatgcaattagatgtgtatgggtactagaggaagagaatctgtggctttcatcaaattctcagagtctacaaaccgtaaaaaattaagaatcacatataaactaaagttgcagaagcaaccttattcacactagttttggaaccaagtaaaataaaaataacttctcaatatttcaggaaactgttttttttttttgagatggagtcttgctctgttgcccaggctggagtgtactggcgcgatcttggctcactacaacctccgcctcccgggttcaagcgtttctcctgcctcagcctcccaagtagctgggactactggcacctgccaccatgcctggctaagttttgtatttttagtagagacggagtttcaccatatgggccaggctggtcttgaactcctgatcttgtgatctgcccgcttcaggctcccaaagtgctgggattacaggtgtgagccaccacacctggccttcaggtaacttattttttaaaagagatgaggtcttgctatttttcccaggttggctggcctcaaactcctgggctcaagcaatgctctcacctcaaactcctgagtagctgggattacagacacatgtcaccacacctagccatttcaggctcttgaagtaggaggacatgctaccaatgaggacaaccgaagaacacaccacaggctctgaaggccattcccaaatgaggttccaaacaggttttcaacaaaagtgacagtcctgcatagcctcccaaagggaccccctctgaaggggctaggctcatctggacataccttagtctcataaccccagcttggcactggggaagtgctttatgatgaaaaccagacgtagtcccgtgaactagatatttcgttactcctgacttcacctacttactgtccaccaccaccttcacttcttattaacctcgacatatagccctcatcaaagctgggcagatttgctgtctcagacccgtcccatcttctgcctctcctatgcctttgcttggctgcgcccctttgtgcacaagatgtttaactcttctttccgtcttttctaaaatagtcagtcacctcacctctaacgc

SEQ ID NO: 136252 - DNA, 228 bp, Homo sapiens
  misc_feature (1)...(228): n = a,t,c or g
acagcaatcccactagcagttctgatgggtttcgcctttaacttgggcatcaagnccttgcgatactgaggagggacggcagcaatgatatccaccaggcggggctgggcagaaaggccatatttggcagctgtcttggttttcacccagactatggaggattcaccaccagaccaggaagcaanagcctgggctccagagttggccactcctccttgcacagatgag

SEQ ID NO: 136253 - DNA, 436 bp, Homo sapiens
aagatactgcaaagatgttacctggatgcggttcctggccaaaaacatccttcgtttctgccattccttgttacgtgaactcctgctcttctcagttcaggagaaccagcctgtgaagacaaagtacaaagacaggtattctgagagaagcctcacaaagtgtattggaattactattgaaaccagaccagattactgcatgaagcgacatttaagtgacatgttgacctatggctgcacaaggctggagattggggtgcagagtgtttatgaagatgtggctagagacaccaacaggatttgggtaggtgtgattggtgttgtgccaggagaaggaagcaaaggggaactagggaaacaagcactgatcagcatcttagaaacaaccaagaggaatgccaggccgaggaggatggaattttcccttaaggaatag

SEQ ID NO: 136254 - DNA, 1359 bp, Homo sapiens
atgcaacgcagagctgtcagtcaggaaggctgcactggcagagtggagcaaaaggggaagaacctggggcaacatcttgagtcctgggatattccaatgcctttagttagctcaggagtagagcatggtaacctgagagagctggcacttgcaagaatgaaagacctcggaatacagtgtcgagatgtgagaaccagagaagttggaatccaagaaattcatcacaaagtacggccataccaggttgaattggtaaggagagattatgttgcaaatggtggctgggaaacattcttgtcatacgaagacccagatcaagacattttgattggcctcctacgattacgcaagtgttcagaagaaactttccgtttcgaattgggtggaggtgtctccatagtacgagagctgcatgtgtatgggagtgtggtccctgtgagcagccgggatcctactaaatttcagcatcagagtttagggtcccgagatgttattttccttccacaagagacatccacagctttcacgatggttaccgatcatatgtgccattcatctaagaccaagttgcaacacggggcggggcgtggctttgtgcacgtcggcttccgggaagagctttacgatacattgaccgacattttacgacaggcgggattgttttgtggctgtcagctttccccgtggtctgagtttgtggctgcatttttatctctggtggctctgctacggcggcgcagaaatgaggcagaagcggaaagggtgaaaaccaagacagctgccaaatatggcctttctgcccagccccgcctggtggatatcattgctgccgtccctcctcagtatcgcaaggtcttgatgcccaagttaaaggcgaaacccatcagaactgctagtgggataaggaatggggaagctcctgatggggttcagaacacactaccgcaaaagacggtgtcttggcatactgagtatcttaagaccctgaaacatgaagctgctagtttaatagtacctgctgcaaatattgagatccagtgtgttcatgaggcgtttgagtcacaaagatactgccctggtggacctgattctgattttgagtattccacccagtcttacactggctatgagccaacctccatgagagctatccgtgccagatatgaccctttcctacagacaagacaccgaatagaacagttaaaacaacttggtcatagtgtggataaagtggagtttattgtgatgggtggaacgtttatggcccttccagaagaatacagagattattttattcgaaatttacatgatgccttatcaggacatacttccaacaatatttacgaggcagtcaagtaa

SEQ ID NO: 136255 - DNA, 2497 bp, Homo sapiens
  misc_feature (1)...(2497): n = a,t,c or g
gacctatcctcatctgtgcaaggaggagtggccaactctggagcccaggctgttgcttcctggtctggtggtgaatcctccatagtctggtgagtgtagtgcccaactctggagcccaggatgttgcttcccggtctggtggtgaatcctccatagtctggagatctcagccctgctgagcttgatgatgctgactataggagatgttattaaacaactgattgaagcccacgagcaggggaaagacatcgatctaaataaggtgaaaaccaagacagctgccaaatatggcctttctgcccagccccgcctggtggatatcattgcttgccgtccctcctcagtatcgcaaggtcttgatgcccaagttaaaggcggaacccatcaaaaactgcttagtgggattgttgtcgtggctgtgatgtgcaaaccccacagatgtccacacatcagttttacaggaaatatatgtgtatactgccctgggtgggacctgattctgattttgagtattccacccagtcttacactgggctatgagccaacctccatgaggagctattccgtgccagatatgaccctttcctacaaacgaaggaccgaatagaacagtgaagacaacttggtcatagtgtggataaagtggagtttattgtgatgggtggaacgtttatggcccttccagaagaatacagagattattttattcgaaatttacatgatgccttatcaggacatacttccaacaatatttacgaggcagtcaagtattctgagagaagcctcacaaagtgtattggaattactattgaaaccagaccagattactgcatgaagcgacatttaagtgacatgttgacctatggctgcacaaggctggagattggggtgcagagtgtttatgaagatgtggctagagacaccaacaggggccacactgtgaaggcagtgtgtgagtcatttcacctggccaaagattccggttttaaagtggtggcccatatgatgcctgacctgccaaacgtgggactagaaagagacattgaacaagttcacagagttttttgagaaccctgctttttcgtcccgatgggcttaaaactctatcctaccctggtgattcgtgggaccgggctttatgagctttggaaatccaggaagatataagagttacttctcctagtgacctgggttgaattgggtggctcggttcctagccctcgtgcctccatggactcgagtgtaccgagtacagagggatattccaatgcctttagttagctcaggagtagagcatggtaacctgagagagctggcacttgcaagaaatgaagaccttcggatacagtgtcgagatgtgagaaccagagaagttggaatccaagaaattcatcacaaagtacggccataccaggttgaattggtaaggagagattatgttgcaaatggtggctgggaaacattcttgtcatacgaagacccagatcaagacattttgaattggcctcctacggattacgcaagtgttcagaagaaactttccgtttcgaattgggtggaggtgtctccatagtacgagagctgcatgtgtatgggagtgtggtccctgtgagcagccgggatcctactaaatttcagcatcagggatttggcatgctgctcgatggaggaagcagaaagaattagctagaggaggaacatgggtctgggaaaaatcgctgtaatatcaggggtcggcaccagggaattattattggaaagatcggctacagattaccaaggccccgtacaatggtgaagatgctggaaataatgggccacacccagtcccactccttctgcagtatccttccctggcatgaacaccggagaatcaggatttccttaaatactcaacagagagggcttnagcagagcaaatgggggggcttcaccctcatccccgcagctgcagagactggaaactgccttcaaggccacggctggtcatctgctgacccacaccccagatccgcccttctcctgcgtgcaccccaaaaaaaatcacttgcgtttttgaggcttaaatcatctatcccagtttctacattttgcatgaggcctgcaggtggcctattttgactcagacggtgaaaaaagcaaattaactcatttggacaccataactcatgcaataaaactgattgtcattcgaggagcaaacttaagagtagtttatttatataccctgggggacagatagtcaggttgaaacaggaaaaccaccagactctaatctcagccctttaacgacatacgcattggagcgcaagttaggaaaatgagcttttgttttcatggaaatcattctgattacagtgctgatgtttagaaataaatagcagtgtgactgggaaagaggaattgcagttgtgggggtgtgagcctggcagcagccagccagcagcctctcccaggcgggagtctaccatccgagacggcgatgacaaagagcttc

SEQ ID NO: 136256 - DNA, 457 bp, Homo sapiens
ggcgatggcattgcagcacgaggccccgggtatggcatcatgtcaatccgcgtggatggtaatgatgtgtttgccgtatacaacgccacaaaggaggcccgacggcgggctgtggcagagaaccagccctttctcatcgaggccatgacctacaggatcgggcaccacagcaccagtgacgacagttcagcgtaccgctcggtggatgaggtcaattactgggataaacaggaccaccccatctcccggctgcggcactatctgctgagccaaggctggtgggatgaggagcaggagaaggcctggaggaagcagtcccgcaggaaggtgagggcacattcaggactagaagcccctctgggcatggggtggacatggcaggtcagcctgtggaacttgcgcaggtgcgagtggccagcagaggtcacgaataaactgcatctctgcgcaaaaaaaa

SEQ ID NO: 136257 - DNA, 297 bp, Homo sapiens
gtgtgtgatgtatcgggactaccccctggaactattcatggcccagtgctatggaacatcagtgacttgggcaaggggcgccagatgcctgtccactacggctcaaggaacgccacttcgtcactatctcctctccactggccacgcagatcctcaggcagcacgaggccccgggtatggcatcatgtcatccgcgtggatggtaatgatgtgtttgccgtatacaacgccacaaaggagcccgacggcgggctgtggcagagaaccagccctttctcatcgaggccagacctacag

SEQ ID NO: 136258 - DNA, 1874 bp, Homo sapiens
  misc_feature (1)...(1874): n = a,t,c or g
ctgactggttgttagccaagatggcggaagcgatcgctgcagcgaggtgtctggcggctaaaccgtggtttgagccatgctgccctcctgctgctgcggcagcttgggggctcaggggactgagctagatctcacccccccaggcagcagcagcagtgttcagctctggatgacaagcccccagttcccaggggcctcggcgggagttatagataagttggaattcatccagtcccaacgtcatctctggaatccccatctaccgcgtcatgggacccgcaaggccagattcatcaaccccaggcgagggacccccaccttgccgaaggagaaaggtggttgaagctcttacaagagcattgacactgctttaacacccatgggaccgcatcctctaatgagtcttcagcgggcagggccgaattctccttcttacatgaaccaattattggttgaggaggggcacgcacgtgggggagtgcccgccgccttggacaaacacggaccctggtgtttggccagtaccgggagggcaggtgtgctgatgtatcgggactaccccctggaactattcatggcccagtgctatggcaacatcagtgacttgggcaaggggcgccagatgcctgtcaactacgggctgcaaggaacggcacttcgtcactatctcctctccactgggccacgcaggatccctcagggcggtggggggcggcgtacgcagccanaggcggggccaatgccaacagggttcgttcatctgttactttcgggcgaggggggcagccagttgagggggggacgcccatgcccggctttcaactttcgctgccacaatttgagttgccccatcatcttcttctgccggaacaatggctacgccatctccacgcccacctctgagcagtatcgcggcgatggcattgcagcacgaggccccggggtatggcatcatgtcaatccgcgtggatggtaatgatgtgtttgccgtatacaacgccacaaaggaggcccgacggcgggctgtggcagagaaccagcctttttctcatcaggcccatgactccagggtccaggcccccagccccaggtgacgccagttaaacgtaccgctcggtggatgaggtcaatttactgggaaaacaagggcccacccattctcccgggcttcggccactatctgtttagccaaaggctggtgggatgaggagcagcagaaggcctggaggaagcagtcccgcaggaaggacccagggcccgtgcagcccagtggtgatggaggcctttgagcaggccgagcggaaggcccaaacccaaccccaaacctacttcttctcagacgtgtatcagaatatgcccgcaccagttcggcaaccaccagagtcttgtggcccgccacttcaagacctacgggaaccattacccatgggatcacttcgataagtgagacctgctcagcccacccccacccatcctcagctaccccgaagaggtaagccccaactcctaaggggaagcagggggaccctgaacagcacacccactgtcttcccccagtcagctcccctcctaaaatactcagcggcccagggcggctgcccactcttcacccctgctcctcccggctgttacattgtcaggggacagcattttgcaccagttgttaaggctccgtcagcccccttttcacctgttgttacagtgccttttcccaggggctgggtgatgggcacattcaggactagaaacgccctctgggcatggggtggacatggcaggtcagcctgtggaacttgcgcaggtgcgagtggccagcagaggtcacgaataaactgcatctctgcgcctggatatctaccaaaaaaaaaaaaaaa

SEQ ID NO: 136259 - DNA, 504 bp, Homo sapiens
gggtctcctgcagcggcaaaatcttctaacgcaactacctcagcaaagccaagccaacctcctacagtcgcagccaagcatcaccctcacctccgagccagcaaccccaacacgcacaatagcagcaaccccaattcagacacttccacagagccagtcaacaccaaagcgaattgatactcccagcttggaggagcccagtgaccttgaggagcttgagcagtttgccaagaccttcaaacaaagacgaatcaaacttggattcacttcacgccacctccacctctgctgagtccatccagaactctctcttcacagtggcctctgccagcggggctgcgtccaccaccaccaccgcctccaaggcacagtgagctgggcagagctgggctgccagaagcctttttcactctgcagtgtgattggactgccagccaggttaataaactgaaaaatgtgattggcttcctctcgccgtgttgtgagggcaaaggagagaaggga

SEQ ID NO: 136260 - DNA, 1895 bp, Homo sapiens
caaagcctagccgacctcctacagtcgcagccaagcatcaccctcacctcccagatctggcccagtccagcctgaggtttctggagctggggtaacttatctgtaaccaccccatctaaagccagcaacccctacacgcacaatagcagcaaccccaattcagacacttccacagagccagacagcaccaaagcgaattgatactcccagcttggaggagcccagtgaccttgaggagcttgagcagtttgccaagacctttaaacaaagacgaatcatacttggattcacctcagggggatgctgggctcgctatggtgaaactatatggaaatgacttcagcccaactaccatctttcgatttgaagccttgaacctcagctttaagaacatgtgcaagttgaagccacttttagagaagtggctaaatgatgcagagaacctctcatctgattcgtccctctccagcccaagtgccctgaattctccaggaattgagggcttgagccgtaggaggaagaaacgcaccagcatagagaccaacatccgtgtggccttagagaagagtttcttggagaatcaaaagcctacctcggaagagatcactatgattgctgatcagctcaatatggaaaaagaggtgattcgtgtttggttctgtaaccgccgccagaaagaaaaaagaatcaacccaccaagcagtggtgggaccagcagctcacctattaaagcaattttccccagcccaacttcactggtggcgaccacaccaagccttgtgactagcagtgcagcaactaccctcacagtcagccctgtcctccctctgaccagtgctgctgtgacgaatctttcagttacagcctccacctccgaggcatccagtgccagtgagaccagcacaacacagaccacctccactcctttgtcctcccctcttgggaccagccaggtgatggtgacagcatcaggtttgcaaacagcagcagctgctgcccttcaaggagctgcacagttgccagcaaatgccagtcttgctgccatggcagctgctgcaggactaaacccaagcctgatggcaccctcacagtttgcggctggaggtgccttactcagtctgaatccagggaccctgagcggtgctctcagcccagctctaatgagcaacagtacactggcaactattcaagctcttgcttctggtggctctcttccaataacatcacttgatgcaactgggaacctggtatttgccaatgcgggaggagcccccaacatcgtgactgcccctctgttcctgaaccctcagaacctctctctgctcaccagcaaccctcccggaggcttcaccattgagattagtaacaacaatagcactatggtgatgacaggcatgcggatccagattgggactcaagcaatagaacgggccccgtcatatatcgagatcttcggcagaactatgcagctcaacctgagtcgctcacgctggtttgacttccccttcaccagagaagaagccctgcaggctgataagaagctgaacctcttcactgttagaaaatttcagaacatcagacacaccctattcaaatgtgagaacaaaaacaccttccagcagtgcctgcttctggaacaggactcctcctgcggtacagggttttgctcaatgactacctacccggtcatgctgctgtccagtgagcagccggtccagagcttgtcggtccggcagtgtgttattctgctagatgcggcagctgtgatctcagggggaatgggggctgtatgcctgctcctgacacacctctgcccgttgtgctatgcaggtcttttatcagaaatcaccgatccagagagcttcgtgaaggacctgttgtactcagtcccctga

SEQ ID NO: 136261 - DNA, 2633 bp, Homo sapiens
  misc_feature (1)...(2633): n = a,t,c or g
atgagggtaagaacttcatctttgccctcaactatgctcagggtccaaaactatgctcgggccaaagcaggccctgaatacgcttttgttgactcaacagaatgcagccctcagtggatggtttctcccttgaaacgaggcacacaaaccaatggtctggactttcagaagcagcctgtgcctgtaggaggagcaatctcaacagcccaggcgcaggctttccttggacatctccatcaggtccaactcgctggaacaagtttacaggctgctgctcagtctttaaatgtacagtctaaatctaatgaagaatcgggggattcgcagcagccaagccagccttcccagcagccttcagtgcaggcagccattccccagacccagcttatgctagctggaggacagataactgggcttactttgacgcctgcccagcaacagttactactccagcaggcacaggcacaggcacagctgctggctgctgcagtgcagcagcactccgccagccagcagcacagtgctgctggagccaccatctccgcctctgctgccacgcccatgacgcagatccccctgtctcagcccatacagatcgcacaggatcttcaacaactgcaacagcttcaacagcagaatctcaacctgcaacagtttgtgttggtgcatccaaccaccaatttgcagccagcgccagtttatcatctcacagacgccccagggccagcagggtctcctgcaagcgccaaaatcttctaacgcaactacctcggcaaagccaagccaacctcctacagtcgcagccaaggattaaccctcacttcccagccagcaaccccaacatgcacaatagcagcaacccccattcagacacttccacagagccagtcaacaccaaagcgaattgatactcccagcttggaggagccccagtgaccttgaggagcttgagcagtttgccaagaccttcaaacaaagacgaatcaaacttggattcactcagggtgatgttgggctcgctatggggaaactatatggaaatgacttcagccaaactaccatctctcgatttgaagccttgaacctcagctttaagaacatgtgcaagttgaagccacttttagagaagtggctaaatgatgcagagaacctctcatctgattcgtccctctccagcccaagtgccctgaattctccaggaattgagggcttgagccgtaggaggaagaaacgcaccagcatagaagcccaacatccgtgtggccttagagaagagtttcttggagaatccaaaagcctacctcggaagagatcactatgattgccgatcagctcaatatggaaaaaggggtgattcgtgtttggttctgtaaccgccgccagaaagaaaaaagaatcaacccaccaagcagtggtggggaccagcagctcacctattaaagcaattttccccagcccaacttcactggtggcgaccacaccaagccctgtgactagcagtgcaacaactaccctcacagtcagccctgtcctccctctgaccagtgctgctgtgacgaatctttcagttacaggcacttcagacaccacctccaacaacacagcaaccgtgatttccacagcgcctccagcttcctcagcagtcacgtccccctctctgagtccctccccttctgcctcagcctccacctccgaggcatccagtgccagtgaggaccagcacaacacaggaccacctccactcctttgtcctcccctcttgggaccagccaggtgatggtgacagcatcaggtttgcaaacagcaggcagctgctgcctttcaagggagctgcacagttgccagcaaatggccagtcttgctggccatggcagctgctgcaggactaaacccaagcctgatggcaccctcacagtttgcggctggaggtgccttactcagtctgaatccagggaccctgagcggtgctctcagcccagctctaatgagcaaaaagtacactggcaaactattcaaactcttgcttctggtggctctcttccnaaataaacatcacttgaatgcaaactgggaaccctggtaatttgcccaatgcgggaggagccccccaanatcgtgactgcccctctgttccctgaaccctcaagaacctctctctgctcacccagcaaccctgttagcttggtctctgccgccgcagcatctgcagggaactctgcacctgtagccagccttcacgccacctccacctctgctgagtccatccagaactctctcttcacagtggcctctgcccagcggggctgccgtcccacccacccacccaccgcctcccaaggcacagtgagctgggcagagctgggctgcccagaagcctttttcactctgcagtgtgattggactgccagcccaggttaataaactgaaaaatgtgattggcttcctgtcgccgtgttgtgagggcaaaggagagaagggagaaaaaaaaaaaaaaaaccacacacacccatacacaatataccagaaaaagaaagaaaggatggagacggaacatttgcctaattttgtaataaaacactgtcttttcaggattgcttcatggattggagaactttctaaccaaaaattaaaaa

SEQ ID NO: 136262 - DNA, 514 bp, Homo sapiens
gcggccgcctcatcagctggagcggctcccaaaagaccctgcgcagcccccgcctggacctgactggcagcagcgggcacagcctccaaccccagccccgagatgagctctaggtccaggtgatgactgcaaagcagtgtccaggagcaggccactactgcccagagagcagaggaggaggttgttggcagggactgcagatcctgtcagacctggccaccaccttgggcatggccactctgccctctggacctgtctttcatcgggagaaaccactcagagatggatcccattccctaaaggtctcacagcaaaggagcaggactcccaggcccctgtaccctgcctggcctgattcagggccttgtggcccccagcttctgtttcaagctgggcagaccccagcaccctcctccctggccggtgcaaagtacagggaggtaaagcaggacccttgcagacctgttgcccagcacacagtaggccctcaataaaagccatttgcaccctcgtg

SEQ ID NO: 136263 - DNA, 505 bp, Homo sapiens
aacctcggcgtagacctgctcccgggctaccaggacccttactcgggccgcactctgaccaagggcgaggtgggctgcttcctcagccattactccatctgggaagaggtggttgccaggggcctggcccgggtcctggtgtttgaggatgacgtgcgctttgagagcaacttcagggggcggctggagcgtctgatggaggatgtggaggcagagaaactgtcttgggtactcctactggacgctggcctatgccctgcgtctggcgggtgcccgcaagctgctggcctcacagcctctgcgccgcatgctgcccgtggacgagttcctgcccatcatgttcgaccagcaccccaacgagcagtacaaggcacacttctggccacgggacctggtggccttctccgcccagcccctgctcgctgcccctacccactatgccggggacgccgagtggctcagtgacacggagacatcctctccatgggatgatgacagcggccgc

SEQ ID NO: 136264 - DNA, 626 bp, Homo sapiens
tgcgcgctgcccgcgccgcgccgttgctccatttgttgctcctgctggggccgtggctggaggctgcgggcgttgcggagtcgccgctgcccgccgaggtccttgccatcctggcccgcaatgccgaacactcgctgccccactacctgggcgctctggagcggctggactacccccgggccaggatggccctctggtgtgccacggaccacaatgtggacaacaccacagagatgctgcaggagtggctggcggctgagggcgatgactatgctgctgtggtctggaggcctgagggcgagcccaggttctacccagatgaagagggtcccaagcactggaccaaagaaaggcaccagtttctgatggagctgaagcaggaagccctcacctttgccaggaactggggggccgactatatcctggagccacgctgggtctctggcaggaccactcagtgaactccttggggggctgcagcccaggcagggctggagcctgtgacgtcccctcctcaaagtttgcagacacagacaacattctgaccaacaatcagactctgcggcttctcatggggcaggggcttccagtggtggccccaatgctggactcccagaccaatgtat

SEQ ID NO: 136265 - DNA, 2541 bp, Homo sapiens
  misc_feature (1)...(2541): n = a,t,c or g
atgcgcgctgcccgcgccgcgccgctgctccagctgctgctcctgctggggccgtggctggaggctgcgggcgttgcggagtcgccgctgcccgccgtggtccttgccatcctggcccgcaatgccgaacactcgctgccccactacctgggcgctctggagcggctggactacccccgggccaggatggccctctgccttcagggcccagctcaaccccagtgggacctgtggttggctggatttgaagaggagcagacaggaacctctgaagtccactggggcccaacgtggcagggatcgaccacgctggaggcttccgggcacaggtgtgccacggaccacaatgtggacaacaccacagagatgctgcaggagtggctggcggctgtgggcgatgactatgctgctgcggtctggaggcctgagggcgagcccaggttctacccagatgaagagggtcccaagcactggaccaaagaaaggcaccagtttctgatggagctgaagcaggaagccctcacctttgccaggaactggggggccgactatatcctgtttgcagacacagacaacattctgaccaacaatcagactctgcggcttctcatggggcaggggcttccagaggtggccccaatgctggactcccagacctactactccaacttctggtgtgggatcaccccccagggctactaccgccgcacagccgagtacttccccaccaagaaccgccagcgccggggctgcttacgtgtccccatggtccactccaccttccttgcatccctgcggggctgaaggggcagaccagcttgctttctacccgccacatcccaactacacttggcctttcgacgacatcatcgtcttcgcctatgcctgccaggctgctggggtctccgtccacgtgtgcaatgagcaccgttatgggtacatgaatgtgccggtgaaatcccaccagggggctggaagacgagagggtcaacttcatccaccatgatcttagaagcactagtggacggcccccgcatgcaggcctcagctcatgtgactcggccctcttaagaggcccagcaagatagggttttgacgaggtctttgtcatcagcctgggttcgcaggcctgaccgtcgggaacgcatgctcgcctcgctctgggagatggagatctctgggagggtggtggacgctgtggatggctggatgcttcaacagcaggtgccattcaggaacctccggccgtaggacctgctccccgggctaacaaggacccttacttcgggccgcactcttgaccaagagcggaggtgggcttgctttcctcagaccattactccatctggggaagaggtggtttcccagggggcctggccccggggtcctggttgtttgaaggaatgacgttgcgcctttgagaacaaactttcaagggggcggcttggagcggctgaatggaagaatgtggaaggcaagagaaacttgtcttgggaaaaancccccttttgnattctacccctcggacgggaagcaggttgaacccttgagaagggagacgggccgtggaggggctgccgggccctggtggtggctgggtaactccctaactgggacgctggcctaatgccctgcgtctggcgggggggcccgcaagcttgctggccttacagccttttgcgccgcattgctgccccgtggaacgaatttccttgcccattcattgtttcgaccaagcaccccaacgaagcaagtacaaaggcacacttctggccacgggaccctggtggccttctccgcccaagcccctgctcgctgcccctacccactatgccgggggacgccgagtggatactgttatctcggagacatcactctccatgggatgatgacagcggccgcctcatcagctggagcggctcccaaaagaccctgcgcagcccccgcctggacctgactggcagcagcgggcacagcctccaaccccagccccgagatgagctctaggtccaggtgatgactgcaaagcagtcgtccaggagcaggccactactgcccagagagcagaggaggaggtttgttggcagggactgcagatcctgtcagacctggccaccacctttgggcatggcccactctgccctctgggacctgtctttcatcggggagaaaccacttcagagatggatcccatttccctaaaaggtctcacaggcaaagggagcaggacttccagggcccctgttaccctgcctggcctgatttcaggggccttgtggcccacagctttcttgttttcaagctggggcagaccccaggattcctttccttccttaaaggactcaggtgaagggggcccctctgcccccttctacctccacctcagcaccctcccccagcttgatgtttgggtctccccagcaccctcctccctggccggtgcaaagtacagggaggtaaagcaggacccttgcagacatgttgcccagcacacagtaggcccctcaataaaagccatttgcactttaaaaaaaaaaaaaa

SEQ ID NO: 136266 - DNA, 468 bp, Homo sapiens
  misc_feature (1)...(468): n = a,t,c or g
gagctaagtcacaacgccaaggccaaggtgatggtggcctcccacaatgaggacacatgntcttcgcactgcgcaggatggaggagctgggcctgcatcctgctgaccaccaggtgtactttggacagctgctaggcatgtgtgaccagattcagcttcccgctgggccaggccggctaccccatcctcacacagattcaccttttttcaccccacacttgcagagctgctggaggtgaggtcaggtgcctcccagccctgcccagagtatgggcactcaggtgtgggccgaacctgatacctgcctgggacagccactggaaacttttgggaactctcctcgaattgtgtgcccaaggcccccacctctgtgacccccatgtccttggacctagaggattgtccaccttctgccaaggccagcccacacagcccgagccccttggggagcagtggccgggctgggga

SEQ ID NO: 136267 - DNA, 1896 bp, Homo sapiens
atggctctgaggcgcgccctgcccgcgctgcgcccctgcattccccgcttcgtcccgctgtccacggcgccggcctcccgcgagcagcccgcagcgggcccagcggccgtgccaggaggtgggtcggccacggcagtgcggccgccggtgcccgccgtggacttcggcaacgcgcaggaggcgtaccgcagccggcgaacctgggagctggcgcggagcctgctggtgctgcgcttgtgcgcctggcccgcgctgctggcgcgccacgagcagctgctgtatgtttccaggaaacttctaggacagaggctattcaacaagctcatgaagatgaccttctatgggcattttgtagccggggaggaccaggagtccatccagcccctgcttcggcactacagggccttcggtgtcagcgccatcctggactatggagtggaggaggacctgagccccgaggaggcagagcacaaggagatggagtcctgcacctcagctgcggagagggatggcagtggcacgaataagcgggacaagcaataccaggcccactgggccttcggggaccgcaggaatggtgtcatcagtgcccgcacctacttctacgccaatgaggccaagtgcgacagccacatggagacattcttgcgctgcatcgaagcctcaggtagagtcagcgatgacggcttcatagccattaagctcacagcactggggagaccccagtttctgctgcagttctcagaggtgctggccaagtggaggtgcttctttcaccaaatggctgtggagcaagggcaggcgggcctggctgccatggacaccaagctggaggtggcggtgctgcaggaaagtgtcgcaaagttgggcatcgcatccagggctgagattgaggactggttcacggcagagaccctgggagtgtctggcaccatggacctgctggactggagcagcctcatcgacagcaggaccaagctgtccaagcacttggtagtccccaacgcacagacaggacagctggagcccctgctgtcccggttcactgaggaggaggagctacagatgaccaggatgctacagcggatggatgtcctggccaagaaagccacagagatgggcgtgcggctgatggtggatgccgagcagacctacttccagccggccatcagccgcctgacgctggagatgcagcggaagttcaatgtggagaagccgctcatcttcaacacataccagtgctacctcaaggcaagcccccgctcagcccctccctgcctgccctggggcttggagaccccacaggaggggctcctctcatctgagctccctggcatttggctggatgcctatgacaatgtgaccctggacgtggagctggctcgccgtgagggctggtgttttggggccaagctggtgcggggcgcatacctggcccaggagcgagcccgtgcggcagagatcggctatgaggaccccatcaaccccacgtacgaggccaccaacgccatgtaccacaggtgcctggactacgtgttggaggagctgaagcacaacgccaaggccaaggtgatggtggcctcccacaatgaggacacagtgcgctttgcactgcgcaggatggaggagctgggcctgcatcctgctgaccaccgggtgtactttggacagctgctaggcatgtgtgaccagatcagcttcccgctgggccaggccggctaccccgtgtacaagtacgtgccctatggccccgtgatggaggtgctgccctacttgtcccgccgtgccctggagaacagcagcctcatgaagggcacccatcgggagcggcagctgctgtggctggagctcttgaggcggctccgaactggcaacctcttccatcgccctgcctag

SEQ ID NO: 136268 - DNA, 2474 bp, Homo sapiens
  misc_feature (1)...(2474): n = a,t,c or g
taatgagagggaaaacaagtatgaagctgtgtggctgaaaccgtcttggcaagttagggaaagaaaacggaagtcactggggctgatcacagtgctaagcatgagagcactgcaagatgaggtcacggaggtgggcagggaccggcttgtgccaggccttgctggcagggtgaagagtttgccttttctctgcgtacaatggaaaggagaagaggttttaagcaagagaatggcttggtcatgtgtatgtctttgagacaccctggctagtctatgtatgatgcaaaaggtgggtggggcagggtgacaagaaaatactgttccggagcttcctgtggctgtgcctataagaggtggtggtggtggtgtggaaggaggtgtggcagtgaataaacagagatgtagaaacagcgtgtacatatattttaaggaacactgaggacgtgatgctggaatttgtgatgagagagtggaaaaaatccaggaaacttctaggacagaggctattcaacaagctcatgaagatgaccttctatgggcattttgtagccggggaggaccaggagtccatccagcccctgcttcggcactacagggccttcggtgtcagcgccatcctggactatggagtggaggaggacctgagccccgaggaggcagagcacaaggagatggagtcctgctcctcggctgcggagagggatggcagtggcacgaataagcgggacaagcaataccaggcccaccgggctttcggggaccgcaggaatggtgtcatcagtgcccgcacctacttctacgccaatgaggccaagtgcgacagccacatggagacattcttgcgctgcatcgaagcctcaggtagagtcagcgatgacggcttcatagccattaagctcacagcactggggagaccccagtttctgctgcagttctcagaggtgctggccaagtggaggtgcttctttcaccaaatggctgtggagcaagggcaggcgggcctggctgccatggacaccaagctggaggtggcggtgctgcaggaaagtgtcgcaaagttgggcatcgcatccagggctgagattgaggactggttcacggcagagaccctgggagtgtctggcaccatggacctgctggactggagcagcctcatcgacagcaggaccaagctgtccaagcactttggtaagtccccaacgcacagacaggacagctggagcccctgctgtcccggttcactgaggaggaggagctacagatgaccaggatgctacagcggatggatgtcctggccaagaaagccacagagatgggcgtgcggctgatggtggatgccgagcagacctacttccagccggccatcagccgcctgacgctggagatgcagcggaagttcaatgtggagaagccgctcatcttcaacacataccagtgctacctcaaagatgcccatgacaatgtgaacccttgaccgtggacctgtctccccgagagggctggtgttttggggccaagccggtgcggggcgcatacctggcccaggagcgagcctgtgcagcagagatcggatatgaggaccccatcaaccccatgtacgaggccaccaacaccatgtaccacaggtgcctggactacgtgctggaggagctgaagcacaacgccaaggccaaggtgatggtggcctcccacaatgaggacacagtgcgcttcgcactgcgcaggatggaggagctgggcctgcatcctgctgaccaccaggtgtactttggacagctgctaggcatgtgtgaccagatcagcttcccgctgggccacggctggctaccccgtgtacaagtacgtgccctatggccccgtgatggaggtgctgccctacttgtccccgccgtgccctggaagaacagcagcctcatgaagggcacccattcgggagcggctagttgctgtggctggaactcttgaggcggctccgaactggcaacctcttccatcgccctccttagctaatcgccagctacaccctctagccttccagcaccccccgccccctgctccaggccattcaaccaacaagctgcaagccaaaccccaatccttcaacacagattcaccttttttcaccccaccactttgcagagcttgcttggaggtgaggtcagngtgccctcccagcccttgcccagagtatgggcactcaggtgtgggccgaacctgatacctgcctgggacagccactggaaacttttgggaactctcctctgaaatgtgtgggcccaaggcccccacctgctgtgacccccatgtccttggacctagaggattgtccaccttctgccaaggccagcccacacagcccgagccccttggggagcagtggccgggctggggaggcctgcctggtcaataaaccactgttcctgcagctgagagccctttgccctcacacagggtcagctctgggcaacaaagag

SEQ ID NO: 136269 - DNA, 303 bp, Homo sapiens
ggcgcagccacggggcgctgtggacggcaggcccctgctcccccaagtcctgccgcacaggcggttggagcttgctgagcgagagcgagaagcggcccttcgtggaggaggcagagcgccttcgcgtgcagcacaagaaggaccaccccgactacaagtaccagccacggcgcaggaagagcgccaaagccggccacagcgactccgactcgggcgcggagctgggaccccaccctggcggcggtgccgtgtacaaggctgaagcagggcttggagatgggcaccaccatggcgaccacacag

SEQ ID NO: 136270 - DNA, 2892 bp, Homo sapiens
  misc_feature (1)...(2892): n = a,t,c or g
ctccctggatctaggggatgagggcccagaacgaggctggggtctggggttcagtggagcaatgaccaggaatcaggctgcgatctgtagtccaggtgtctggcgtcagacagcaccctcctgtacacggcacagctatactgcagggttagggacaggatttactgccaccaacggaagcgttgattccaagtctcagacacccgcccccaggctgggcctcccttaacggaaggtgacgctctctgggaggtccttggtgctcacctccctggctgcttggggccccagggctcctgcctagggatgttttggggctgcagaaggaccctctgcccattatcagacgagaagtgcagagagcaaatgcgtgctgttggcgccccccacccccacactgagtgtgtgagacggataggcccagccagaagcttggggacccgctcccagcctggagtgacggacgctgagcagcaggagcacagctgttcccgacacatccgtgatctgggcgtgcacctgtcactggggagagagcagtgctggtctccacgctttgggcatcgcctgctgcctgaatcctttccacatgcgaacagcctggtcaggggtcctcaccggtcagtagctactcccgccagcgcgggttcacggatcaggaggctcccagtgtgtcaggggagtgcgaggtgaagatggggagggctggtctggaatatgctcgccctccgtggaggtcgggggcatcaggaggaccaggaggacgtctgggctgcaggcagacgcctaacagatgagttccgcgggcgccccagggcatgctctgagggccacggaaggatgcggggacccccgagcggagggcagggcctccagggggaagaggcactgcagacggaggtgggtgcggtgcgctggcaggaagcggcagcacgacccccgactttgcatctggacttttctagtaacggaccagctccttctgccgaccgggccggggagaccgcgtggctcagtggctgcagcggccaccggcccgggcgtgggggctttgagggcaccggcgcgggcgcagccacggggcgctgtggacggcaggcccctgctcccccaagtcctgccgcacaggcggttggaggtgagcctcgggaagagtcccaaggagtgtgtcctgtggctcacttgctgagcgagagcgagaagcggcccttcgtggaggaggcagagcgccttcgcgtgcagcacaagaaggaccaccccgactacaagtaccagccacggcgcaggaagagcgccaaagccggccacagcgactccgactcgggcgcggagctaggaccccaccctggcggcggtgccgtgtacaaggctgaagcagggcttggagatgggcaccaccatggcgaccacacagggcagacgcacgggccgcccaccccgctcaccacccccaagacggagctgcagcaggcgggcgccaagccggagctgaagctggagggacgccggccggtggacagcgggcgccagaacatcgacttcagcaatgtggacatctcggagctcagcagcgaggtcatgggcaccatggacgccttcgacgtccacgagttcgaccagtacctgcccctgggcggccccgccccacccgagccgggccaggcctatgggggcgcctacttccacgccggggcgtcccccgtgtgggcccacaagagtgccccgtcggcctccgcgtcgcccaccgagacgggtcccccacggccgcacatcaagacggagcagccgagccccggccactacggcgaccagccccgaggctcgcccgactacggttcctgcagcggccagtccagcgccaccccggccgcccccgccggccccttcgccggctcacagggcgactatggcgacctgcaggcctccagctactatggtgcctaccctggctacgcacccggcctctaccagtacccctgcttccactcgccgcgccggccctacgcctcacccctgctcaacggcctggccctgccgcccgcccacagccccaccagtcactgggaccagccgaggagaaacggcagcacagcccaaggaccaaaggagggggtggcaggggccttgcagggcgctgtgaggtccaaggccggtcttggcgccgagaagcccctgcactcaaggccacattccctcgacaacggctgcacgggctgtccgggatccggggtgtctgtccgcagactgggatgagtctactcgagcatctccgggacctgcctgtcagatctgaggtgtctccttgctggcagagtgcgctcacgcgagggctggctgttgatgaacacatcttctcttttatttttatgtttttgataatttttattttttaaagcttaaatgtgtttcttctgaaagctgttaaagatgtatttatgttctgtgttattttatctttaattaatgaggtaattcgggcaaagagtagaatttaagacaaaacggaagctggggaagcttcccttgagggcaggcaggaggtgggagttgcagctgttggccggcatcacgttgctcgttgctcggcttatggggaggccgccctggagggcccggaggtcccaaggtccctgggaggactgggcccctcatgcctcgagcttggcaaccgaaaacccgagggaggagaagggacctgccttgagcttggcaaccgaaaacccgagggaggagaagggacctgccttgtgacatctctgatcaggttggggtgccccagcacaggtnaccagtttggggtttgggaagcaggattccgtccctgttccccgattgttgccacgtggtaggacacatagggacacagggatttctggggttctttgcccttga

SEQ ID NO: 136271 - DNA, 1762 bp, Homo sapiens
ctaagacacctccactcttggcaggtacatcagcgccccctgctgggccacagcacagttgcgtctctgggatgccccgtctgcccttctgaccacgtccagccagtgactgcgtccacgcatgtaccacagggatgctctgtcctcagcagggaggcctgggtcccggtacacaatgctcagtgtgcctgcgtaggtacgcccacgtgcaggtactgttattatcctcagacaaagaaactggggcacagagaggttgcgcagcctgccccaggtcacccagagtacgtgaacctgactgctggagccgcactgtgggggaaagtgctttaaacggcactggttcccgtgcagctgtgaagccagctgcctcatcagcagcacctcagcgctggtaacacacaggtttcctgaggttccggctgccccaggggcacaaggaagagagccttccatgccgatggggaaggggctgtgcgtggaggaagctgcatggaagctggccccatgggtctgcagtgtgtagacaagaagcaccagggggtgcacaatctggggaggcacgagtctttctccagagccaagtgggagcaattcttccccggccttggccaaatccagctcccagcgagccgggcagagccctctggcctcttccacaggaccgtgagtcttcccatccaggccaggccagcaggcctctgggcctgccaaaggcacccaggagccgagccgggccagcgaggggacgccgtgcagctgcttcccaggccgcagaccagcccccacggccctcaggatgctgctctctcctctgccccgcacccctggagacagctcaggcatcaccaggtctccaggaggcccccctccatcctttctgtgggcatcgcagcccttgtcccgtgccatggcaactgtctcccacagaccccattcaatccaggcctccagcaaggggatgggccccagcaaaccaggggcggccttctcacccacggtgtcgtggaggcggaggtgcattctgcggccacggattctatatacacagcccttgaccttcagacttgccagcatggtcttgtcgatccatccgaagcccccaaaggagacactgcgcttccggccaaacatggttgtggctgcagagcccggggtcccagcgatgtcccaacgacgtccccggggctgcacacgcttctcacatactgacaaagccccattggacacgtgcacagacatgaacgcatacacatgtgcccgcaggcactcatccacatactcagaccacatcacactgcaaggggcattcgcatgtacacacacatgggcacagagctgtacctgtcagccgccccccacccccgccgccaagtgtctagacagaggtcagagcagtggcatgcttcacgctggctgtgtggggtgggggggcggtacccatgtgcgggtggatttgtcttcccagctgaaccgcagggttcgtcctcatctctgcatgctcaggtgctggtcctcatgccacagggctagcgtgtcctgcacgcatcccagtctgcacaccacagggccagtgctcatctctgcacgcactggtgctgaccacacctggtacacagcaggcacttactaatggcagcccctcaaagggatgtggcacgtacactacaacagacactggggggagtgggcacagatagggccccaggccccaccctacccccaagcagtggagaaagggaagaaaacgtctcaaaaaaaa

SEQ ID NO: 136272 - DNA, 765 bp, Homo sapiens
atgggcaaagatttcatgacaaaaacatcaaaaacaattgcaatgaaagcaaagattgagaaatgggatctaagtaaactaaagggcttctgcacagcaaaagaaactatcatcagagtcaacaaacaacctatggaatgggagaaaatttttgcaatctatacatctgacaaaggtctaatatccagaatctacaagaaacttaaacaaatttacaagaaaaaacccaaacaaccaaacgtctttcctgtattgaatgaaatgacaattccagagacgcaaagcccagcctccaagttttacaaacctcagagtttgagctactttgacgaatcctctaaattcttgggtgtcaaaggcatgttactaaataggttgctaaaggcaccaaggaaaccaaaaaaggaaagagctctccctaaagtccaaaaatcccgccaagagagccccagagcagaggaaaatccaaagtggagagaggggaagaaagagaccagtgagtcatccgtccagaaggcggggagagcagcagcggcccaagcaggagctgcagcgagccgggtacctggactcagcggtagcaacctcgccccttgcaacaaaggcagactgagcgccagagaggacgtttccaactcaaaattgaaaatcctttcttctggaagaaaacatacggagcatgtgatcatgctcaaggcctgggggttgggcaggcaaagtctccgatgcagactctttgaccttatcccttcccataaggtatag

SEQ ID NO: 136273 - DNA, 1651 bp, Homo sapiens
  misc_feature (1)...(1651): n = a,t,c or g
cggagtgcaaataccagttccaggcctggggagaatgtgacctgaacacagccctgaagaccagaactggaagtctgaagcgagccctgcacaatgccgaatgccagaagactgtcaccatctccaagccctgtggcaaactgaccaagcccaaacctcaagtccaaaaatcccgccaagagagccccagagcagaggaaaatccaaagtggagagaggggaagaaagagaccagtgagtcatccagtccagaaggcggggagagcagcagcggcccaagcaggagctgcagcgatgccngggtacctgggacttcagcggtagcaaccttcgccccttgcaccaaaggcagacttgagcgccagagagggacgtttccaactcaaagtaagatgcaggcttcaacagtaccagcagcagcgttcgaaaattttgcagctgccttcttggcatttcatttttcattactgggcagctgtgggatacttgctgaagcaggggaagaaagagaaaccagaaaaaaaaagtgaagaagtctgactgtgggagaattggcagttggagtgtgtgtgttgccccacccagtggagactgtgggctgggccaccacgggagggccactcggacctgaagctgagtgcaagcaaaaccatgaagacccagagatgtaagatcccctgcaactgggaaggaaggcaatttgggcgcgggagtgcaaaattacccagtttccaggcctggggggaatgtgacctggacaccagccctgaagacccaaaactggaagtttgaagcgagccctgcacaaatngccgaatgcccagaagactgtcaccatctccaaagcccttgtggcaaactgaccaagccccaaaaccttcaagcagaatcttaagaagaagaaaaaggaaggcaagaaaccggaaggaagattgcgggattaaaaggatggtcacctgtggggaccataaaaagggcatcagcccaacaggatcagtttaactatgggcatttatatgtaccgtaggctttgtattcaaaaatattctatagttaagtacccattaagcaaaacaaaaaggaaaagaaaatttttgtagtagcgttttttaaatgtatacttttaggaccagtgggggcttataataaaggactgtaatcttatttaggaagttgacttatagtacatgataaatgatatacgattgaggtaagttttttgaaattatgtgacattttacattaaattttttttacattttttgggcagcaaatttaaatgttatgactatgtaaacttacttctcttgttaggtaatttttttcccccctagatttttttcccaattgcgaaaaatatatacctaaacaaaatagcaatacaaacataatcactctatttgaagaaaatatccttgttttctgcccaatagattttttaaaatggtagtcagcaaatggggggtgggggaagcagagcatgtcctagttcaatgttgacttttttttttttttttaaagaaaagcattaagacataaaattctttcactttggcagaagcatttgttttcttgatgaaattatttttccatctgaggaaaaaaaatactaggaaaataaatcaaggtgatgctgaaaaaaaaaaaaaaa

SEQ ID NO: 136274 - DNA, 2305 bp, Homo sapiens
atgaaatatattcaggacttccagagagagaaacaggagttcgagcgaaacctggcccgattcagggaggatcaccccgacctaatccagaatgccaagaaatcggacatcccagagaagcccaaaaccccccagcagctgtggtacacccacgagaagaaggtgtatctcaaagtgcggccagatgccactacgaaggaggtgaaggactccctggggaagcagtggtctcagctctcggacaaaaagaggctgaaatggattcataaggccctggagcagcggaaggagtacgaggagatcatgagagactatatccagaagcacccagagctgaacatcagtgaggagggtatcaccaagtccaccctcaccaaggccgaacgccagctcaaggacaagtttgacgggcgacccaccaagccacctccgaacagctactcgctgtactgcgcagagctcatggccaacatgaaggacgtgcccagcacagagcgcatggtgctgtgcagccagcagtggaagctgctgtcccagaaggagaaggacgcctatcacaagaagtgtgatcagaaaaagaaagattacgaggtggagctgctccgtttcctcgagagcctgcctgaggaggagcagcagcgggtcttgggggaagagaagatgctgaacatcaacaagaagcaggccaccagccccgcctccaagaagccagcccaggaagggggcaagggcggctccgagaagcccaagcggcccgtgtcggccatgttcatcttctcggaggagaaacggcggcagctgcaggaggagcggcctgagctctccgagagcgagctgacccgcctgctggcccgaatgtggaacgacctgtctgagaagaagaaggccaagtacaaggcccgagaggcggcgctcaaggctcagtcggagaggaagcccggcggggagcgcgaggaacggggcaagctgcccgagtcccccaaaagagctgaggagatctggcaacagagcgttatcggcgactacctggcccgcttcaagaatgaccgggtgaaggccttgaaagccatggaaatgacctggaataacatggaaaagaaggagaaactgatgtggattaagaaggcagccgaagaccaaaagcgatatgagagagagctgagtgagatgcgggcacctccagctgctacaaattcttccaagaagatgaaattccagggagaacccaagaagcctcccatgaacggttaccagaagttctcccaggagctgctgtccaatggggagctgaaccacctgccgctgaaggagcgcatggtggagatcggcagtcgctggcagcgcatctcccagagccagaaggagcactacaaaaagctggccgaggagcagcaaaagcagtacaaggtgcacctggacctctgggttaagagcctgtctccccaggaccgtgcagcatataaagagtacatctccaataaacgtaagagcatgaccaagctgcgaggcccaaaccccaaatccagccggactactctgcagtccaagtcggagtccgaggaggatgatgaagaggatgaggatgacgaggacgaggatgaagaagaggaagatgatgagaatggggactcctctgaagatggcggcgactcctctgagtccagcagcgaggacgagagcgaggatggggatgaggtggggcagacagggcacagtgggaggggaggggagtcctgccaggagggccacctggtgactccacatcctttctcaccccccagaatgaagaggatgacgaggacgaagacgacgacgaggatgacgatgaggatgaagataatgagtccgagggcagcagctccagctcctcctcctcaggggactcctcagactctgactccaactgaggctcagccccaccccagggcagccagggagagcccaggagctcccctccccaactgaccacctttgtttctcccccatgttctgtcccttgcccccctggcctcccccactttctttctttctttaaaaaaaaaaaaaaaaatacggtgggggtagggggctggaggagcccaggccaggactctgcagcctcagagacatcagcccttgggggtcctcctccagggacagcaactatcagactaagccagcaccggaccagcctggcccaccccacccacttctgcacttgcggttccggcatggacaatggaccggagagtgggggtggggggtcccaaagagtttgatgaggccctccacacctgcggcccaatccaaggtggggtggaagctt

SEQ ID NO: 136275 - DNA, 2492 bp, Homo sapiens
ctccgccgcgggagggagctgcggctgtgccggccgagcgggggagggcgccgccactcagagccagggagggagccgctggagcggaagcccggaggccgcgctgcgccggggtgaggtggctttgaccccgggttgcccggccagcacgaccgaggaggtggctggacagctggaggatgaacggagaagccgactgccccacagacctggaaatggccgcccccaaaggccaagaccgttggtcccaggaagacatgctgactttgctggaatgcatgaagaacaaccttccatccaatgacagctccaagttcaaaaccaccgaatcacacatggactgggaaaaagtagcatttaaagacttttctggagacatgtgcaagctcaaatgggtggagatttctaatgaggtgaggaagttccgtacattgacagaattgatcctcgatgctcaggaacatgttaaaaatccttacaaaggcaaaaaactcaagaaacacccagacttcccaaagaagcccctgaccccttatttccgcttcttcatggagaagcgggccaagtatgcgaaactccaccctgagatgagcaacctggacctaaccaagattctgtccaagaaatacaaggagcttccggagaagaagaagatgaaatatattcaggacttccagagagagaaacaggagttcgagcgaaacctggcccgattcagggaggatcaccccgacctaatccagaatgccaagaaatcggacatcccagagaagcccaaaaccccccagcagctgtggtacacccacgagaagaaggtgtatctcaaagtgcggccagatgagatcatgagagactatatccagaagcacccagagctgaacatcagtgaggagggtatcaccaagtccaccctcaccaaggccgaacgccagcctcaaggacaaagtttgaccgggcgacccaccaagccacctccgaacagctactcgctgtactgcgcagagctcatggccaacatgaaggacgtgcccagcacagagcgcatggtgctgtgcagccagcagtggaagctgctgtcccagaacgagaaggacgcctatcacaagaagtgtgatcagaaaaagaaagattacgaggtggagctgctccgtttcctcgagagcctgcctgaggaggagcagcagcgggtcttgggggaagagaagatgctgaacatcaacaagaagcaggccaccagccccgcctccaagaagccagcccaggaagggggcaagggcggctccgagaagcccaagcggcccgtgtcggccatgttcatcttctcggaggagaaacggcggcagctgcaggaggagcggcctgagctctccgagagcgagctgacccgcctgctggcccgaatgtggaacgacctgtctgagaagaagaaggccaagtacaaggcccgagaggcggcgctcaaggctcagtcggagaggaagcccggcggggagcgcgaggaacggggcaagctgcccgagtcccccaaaagagctgaggagatctggcaacagagcgttatcggcgactacctggcccgcttcaagaatgaccgggtgaaggccttgaaagccatggaaatgacctggaataacatggaaaagaaggagaaactgatgtggattaagaaggcagccgaagaccaaaagcgatatgagagagagctgagtgagatgcgggcacctccagctgctacaaattcttccaagaagatgaaattccagggagaacccaagaagcctcccatgaacggttaccagaagttctcccaggagctgctgtccaatggggagctgaaccacctgccgctgaaggagcgcatggtggagatcggcagtcgctggcagcgcatctcccagagccagaaggagcactacaaaaagctggccgaggagcagcaaaagcagtacaaggtgcacctggacctctgggttaagagcctgtctccccaggaccgtgcagcatataaagagtacatctccaataaacgtaagagcatgaccaagctgcgaggcccaaaccccaaatccagccggactactctgcagtccaagtcggagtccgaggaggatgatgaagaggatgaggatgacgaggacgaggatgaagaagaggaagatgatgagaatggggactcctctgaagatggcggcgactcctctgagtccagcagcgaggacgagagcgaggatggggatgagaatgaagaggatgacgaggacgaagacgacgacgaggatgacgatgaggatgaagataatgagtccgagggcagcagctccagctcctcctcctcaggggactcctcagactctgactccaactgaggctcagccccaccccagggcagccagggagagcccaggagctcccctccccaactgaccacctttgtttctcccccatgttctgtcccttgcccccctggcctcccccactttctttctttcttt

SEQ ID NO: 136276 - DNA, 3389 bp, Homo sapiens
ttagccgtcgctccgcttcgccatctcgggctttgtctggcgactcgctgccccggcgtcggctgcagcggagctgcggctcgactgttcggcccgccgtgctcccaggtgcccccggcctgcgctcccatccacacgctcggcggagggcgctgtgctttgtgcttttcgccgcgaggagcagcaggcagcagccacagccgccgccgccgccgccgccgccacagcagcagcagccgccgccccagcgccgccgcctcgcccggaggaggagccgctgccgccgcgggagggagctgcggctgtgcccggccgagcgggggagggcgccgccactcagagccagggagggagccgctggagcgggaagcccggaggccgcgctgcgccggcacgaccgaggaggtggctggacagctggaggatgaacggagaagccgactgccccacagacctggaaatggccgcccccaaaggccaagaccgttggtcccaggaagacatgctgactttgctggaatgcatgaagaacaaccttccatccaatgacagctccaagttcaaaaccaccgaatcacacatggactgggaaaaagtagcatttaaagacttttctggagacatgtgcaagctcaaatgggtggagatttctaatgaggtgaggaagttccgtacattgacagaattgatcctcgatgctcagttaacattttaaaaatccttacaaagggcaaaaaactcaagaaacacccagacttcccaaagaagcccctgaccccttatttccgcttcttcatggagaagcgggccaagtatgcgaaactccaccctgagatgagcaacctgggacctaaccaagattctgtccaagaaatacaaggagcttccggagagcaagaagatgaaatatattcaggacttctagagagagaaacaggagttcgagcgaaacctggccccgattcagggaggatcaccccgacttaatccagaatgccaagaaatcggacatccaagagaagcccaaaaccccccagcagctgtggtacacccacgagaagaaggtgtatctcaaagtgcggccagatgccactacgaaggaggtgaaggactccctggggaagcagtggtctcagctctcggacaaaaagaggctgaaatggattcataaggccctggagcagcggaaggagtacgaggagatcatgagagactatatccagaagcacccagagctgaacatcagtgaggagggtatcaccaagtccaccctcaccaaggccgaacgccagctcaaggacaagtttgacgggcgacccaccaagccacctccgaacagctactcgctgtactgcgcagagctcatggccaacatgaaggacgtgcccagcacagagcgcatggtgctgtgcagccagcagtggaagctgctgtcccagaaggagaaggacgcctatcacaagaagtgtgatcagaaaaagaaagattacgaggtggagctgctccgtttcctcgagagcctgcctgaggaggagcagcagcgggtcttggaggaagagaagatgctgaacatcaacaagaaagcaggccaccagcccccgcctcaagaagccagcccaggaagggggcaagggcggctccgagaagcccaagcggcccgtgtcggccatgttcatcttctcggaggagaaacggcggcagctgcaggaggagcggcctgagctctccgagagcgagctgacccgcctgctggcccgaatgtggaacgacctgtctgagaagaagaaggccaagtacaaggcccgagaggcggcgctcaaggctcagtcggagaggaatcccggcggggaagcgcaaggaacggggcaagctgcccgagtcccccaaaagagctgaggagatctggcaacagagcgttatcggcgactacctggcccgcttcaagaatgaccgggtgaaggccttgaaagccatggaaatgacctggaataacatggaaaagaaggagaaactgatgtggattaagaaagcagccgaagaccaaaagcgatatgagagagagctgagtgagatgcgggcacctccagctgctacaaattcttccaagaagatgaaattccagggagaacccaagaagcctcccatgaacggttaccagaagttctcccaggagctgctgtccaatgaggagctgaaccacctgccgctgaaggagcgcatggggtgagatcggcagtcgctggcagcgcatctcccagagccagaaggagcactacaaaaagctggccgaggagcagcaaaagcagtacaaggtgcacctggacctctgggttaagagcctgtctccccaggaccgtgcagcatataaagagtacatctccaataaacgtaagagcatgaccaagctgcggaggcccaaaccccaaatccagccggactactctgcagtccaagtcggagtccgaggaggatgatgaagaggatgaggatgacgaggacgaggatgaaagaagaggaagatgatgagaatggggactcctctgaagatggcggcgactcctcttgagtccagcagcagaggacgagagcgaggataggggatgagaataaagaggatgacgaggacgaagacgacgacgaggatgacgatgaggatgaagataatgagtccgagggcagcagctccagctcctcctcctcaggggactcctcagactctgactccaactgaggctcagccccaccccagggcagccagggagagcccaggagcttccctcccccacttgaccacctttgttcttcccccatgttcttgtcccttgcccccctggcctcccccactttctttctttctttaaaaaaaaaaaaaaaaatacggtgggggtagggggctggaggagcccaggccaggacttctgcagcctcagagacatcagcccttgggggtcctcctccagggacagcaactatcagactaagccagcaccggaccagcctggcccaccccacccacttctgcacttgcggttccggcatggacaatggaccggagagtgggggtggggggtcccaaagagtttgatgaggccctccacacctgcggcccaatccaaggtggggtggaagcttggggaagacccattccttcccagaggggcctgccacctggacccctgcattggaactggaggcagggaacatggggaggaggagggtcggtgccttcaagaaaacaggcactgccctggtggccctctcccctgccccctgcaggaaggagctgcctggacccgttcatgggggagggggcagaagtgttttttatatatgtgtatatatttttttttaagctctgagctgtcaacgagacgtttcctaccgaaaaa

SEQ ID NO: 136277 - DNA, 446 bp, Homo sapiens
  misc_feature (1)...(446): n = a,t,c or g
cgcccttctcccccaacctcgtcgatgctgggttatggggatatagtcgtccttgttcttctggggtcccggcttctgctcttcaagcttgatcccctgcattttctccagcatctcaaaganctccgacgacttcatggtgggaggtgccgtgagaggaggggagagcggccggtctgggagggtcgcatccgagctgttggcccagctcctgcttcttgaccttcagacttgccagcatggtcttgtcgatcctggagggagactcgaggtcagcccggctgaggatgcgatgctgctgcgggctgtagagccactggaaggctgtcagcgtcctctcctcgattcagaaccgcccttcctgcacgtaccagcgcaccagctgccagcgcttctcccccggcgcccggcggcccgccatgcctcgcccggccgctcccgcgaaa

SEQ ID NO: 136278 - DNA, 1506 bp, Homo sapiens
ttgaccttcagacttgccagcatggtcttgtcgatctggaaggggagacagcgccgctgaggttctatttttacccccctgcatatgccagcccttatggctggcaagaagaggcccctcctccctctccagaggcagaaaggtggacagtgttcccactgtcagtatctcctcttgtggaagggtcgtgaccaccactgtcaccagcactgccaccagcaccaatgctgcctttgcaacatcacgattcgtgtcaccatcactgtccatgtcaccacatgtcatcatcagtgtcaccatcactgtcagcttcactaaaactgccactggctccagcatgctggagaccctggaggctctttccggcacccttctctggccagcccagcgctgcctcaggcttcccacagtcacagctgtcacccaccatccgaagcccccaaaggagacactgcgcttccggccaaacatggttgtggctgcagagcccggggtcccagcgatgtcccaacgacgtccccggggctgcacacgcttctcacatactgacaaagccccattggacacgtgcacagacatgaacgcatacacatgtgcccgcaggcactcatccacatactcagaccacatcacacagccatctaatcggcagggccctgactgtgccagagtcccccaagtgcccatgcctgctgccatctgcttgctgacccagacctggcagagcgcagccagcaggcccagcatggtccaagaaggaggccagtaatcctggatctgaactccccagcacagcctgtgacgccggatggctcctccggaacgcagtaccggctcgcgccgtccatacgtgccgatgtctgtcttctgcgccgcctggcgcgcggctgcctctggacccggagcgaagggcacctcagtccccgcggtcgccccctccctcggcccagccccctcctcctcctcctcctcctcctcctcctcctccggggcggcggggtccctcgcagcagtcctggcgcccctcgccgccgccgccgcgcacgcgcagccggagcccgcgccgatccagggtccggggtcctcgtgctcccgccctcgccgcgcctccgccacccggggcgcgccctggtccctgtgccgctgcctgcggatcgcccactggctgctcatgatctcgatgccctgtgtgagtttcttcagcacgctggtcatattgggaaattctcttgtctctgcgtttacatgtttatcgtctgtctctcccactagaatgtgtggcccatggaggcagtaccctggtcttccttgagggcttcctaagtaccagctgagaggcctggagggagactcgaggtcagcccggctgaggatgcgatgctgctgcgggctgtagagccactggaaggctgtcagcgtcctctcctcgattcggaaccgcccttcctgcacgtaccagcgcaccagctgccagcgcttctcccccggcgcccggcggcccgccat

SEQ ID NO: 136279 - DNA, 5244 bp, Homo sapiens
atgtcagaggagcgtcgaacacagagatttcaggggcctcagatcccaagcaaaccgcagcaggaggcagggcaggggaggcagaaagaagcccagcagggctttcagaagacaagcctggaccgctcttatggtgtgacaacaggactccgcttttcacagcctgtacagccaagccacctagagatttctaaacaacaagggaacttagtccaagaagtcctgtggacagccagatctgatacagttgccgataagaccaagctgcctcactctactgcccttacccaggtctttccttatgacatcagagtccccaacatcatcggagaccctcctcagaaactggaagggaatccaagccccgggcgcaccacctatctaatctgcggctggatctcgaaccggggcagcagcctcgaaaccgaaagcaaagaggaagcgggatctgctacagccccaagtccggtcgcccagtcttcccctcaccgtccccatcgcccgcgccctccgcggtcggagctgccggcccctcgcggccacctctctgggcggcggaaaggcctctctgcgggcatagggggcacctaccggcccgggctacctgagggccacagaccacgtggtgtggcagacccactatgtgccagcactgtggacctgcggtcagttcatggaaacagccatcccacgacccctgctgccggggaggggagaaccggcggcagcccgggactccggcgagagcgacgcaaggtcggctgcggcggcggcccgagggcgcccgtgtgcccagtgcgcggcggggacggccgcgagctcgctggagggataaagagagaaataacacatgcgtcgcaatgctttgacaagttacaaactctactgcaaatggctccccagaataatccagaagtcgattccatcatggcagaactcaaggtggaggcgccggccagcgtagactggcagaaacgctgcctgaccctggaaactcagcttttccggttccgcctacaggccagcaagataagggagctgctggctgacaagggacatggcacctacatctcccctttctctctggccaagcagatgcaggagctggagcagaggctgctggaggcagagcagagagcagagaacgctgagacccaggtgggtgtcatggaagagaaggtaaaactatccaatctgaagaatgtggactctgaggggagcctgcaccggaaataccaagaattgctgaaagccataaagggcaaagatgagctcatcagccagctagaggctcagctggagaagcagaagcagatgagggcagaggaagcaaaaactgttcaagaaaaagctgcaaagatcaaggaatgggtgacactcaagttggcaaagatagctccttcacggaagctgctggtgcccccctacggagctgcagagcaggattctgtcccttcagagccgggaatccagcctatgggccaggacagtggctcccaggcccagggtctgaaggcagctgtgcttgcaccttccccaggtgccctgcagagcaaggactctgtttctgaagcagcaagccccttggaggattctagttccagcacggtccattctggggaaacagtagaggccaagccccttcaacctcatctgggaagagagagccctccccaccagccatgcatgaagcttcttaccttcagatgtagttcagcttcctggggtgagggtctggttactgctcagagagggatgctccctgggacaaagacctctgccagggaaggtggtcctggcagcagtctgaccctaccaaaggtgcgggctcctggcaccccgcgggacagcatccagttggccaaaaggcaccacagccagccccaggtgggccatgggcactttggccgtgtggtgaacattgagactgaggccttctcagccctccacccctctggccttcctgagctggagtcccgagctaggtcccgggaggaacgcagagaagatggagatggaggagccacccccagcagggaagaatgaggaaagagagagcccaaaggcccttggagctgagctggaggaagttagagctgggtaacaagccacctacacccccgctgcaccagttttcatcctggctaggccccaaggacccaagaatcagccaaaagaatgctcagtggagcaaacagatccagaaggtgcagggaaccctgtgggttgtttatgagcagtcagggccattaggaaaagctcctttggcctgtggcctacttcagacccaggggccccctcaggacgggcattctcccagtgtcttctgcatgggggagagccggatctatgctgtggccacatcgggcatgcggctctcagatatgtctcccagaagtaatactgcatgctgcggtgagttccaagtgaggcttggaggcaccaaacacccaagccagccaccatatctccacaacgagggcttgtggggggtcccatagccgtatgatttgtaactcacatctgcaacagtggaacactgtgcaagcctcatggaggataatttggttaaagagagctacacagatcagcaacatgccctttatggacgagtcctctgggtctgacgatgactgcagctctcaggcgagtttccgaatctcggtcccctcctctgagtccaggaagaccagcggactaggcagcccccgggccatcaagagaggcgtctccatgtcctcactgagctccgagggtgactacgccatccccccggacgcctgctcactggacagtgactactcagagcctgagcacaaactgcagcgcacctcatcctactccaccgacgggctgggcctgggcggggagtcactggagaagtcgggctacctgctgaaaatggggagccaggtgaagacgtggaagaggcgctggtttgtcctgagacagggacagattatgtactacaagtccccgagtgatgtcatccggaaacctcaaggccaagtggatctgaactcccgctgccaaattgttcgaggggagggttcacagacgtttcagctcatctctgagaagaaaacctactacctgacggccgattcacccagcctgctggaggagtggatccgagtactccagagcctgctgaaggtgcaggccaccgggcctccagctctgcttcggggtggcaccaagcccaccgtgaagggctggctgaccaaggtaaagcatggccactccaaggtggtctggtgcgctcttgttgggaaaatcttctactactatcggagccatgaggacaagcgacccctgggctgcctgcctgtgcgggatgcgcacatagaggaagtagatcgatcctgtgactcagacgaggactatgaggctggaggaaccagacggttgctttcctcccactgcaccctggtgatccaccccacagagcacagccccacctacctcctcattggcaccaagcatgaaaaggatacgtggctctaccacctcacagtggctgcaggtggcagcagtgccaaggtgggcactgcctatgagcagctcattggaaaactgatggatggtgaaggagatccagattcgccgctctggaggcaccccatgctgtgctacagcaaagacggcctatacgcctccctcaccaccctgccctctgaggccttgcagacggaggccctcaagctcttcaagtcctgccagctcttcatcaacgtgccggtggaagctgcctcggtggactaccatgtgtccctggcccagaccgcactgcaggtctgcctggttcaccccgagctgcagagtgagatctactgccaactcatgaagcagaccagctgccgcccacctcagaagtactccctcatgcaggtaggcatgccaggggtggagcagctgacagaagccattggcaagggctgccagcatcacttcctctggtatgtcaagcagcagctccaacgccatgcagatcccagaagtgaaactggccagtatgccacctactgccagcgggcagtggagcggaccctgcggaccggggagcgggaagccaggccatcgcgcatggaagtggtgtccatcctgctgcgtaaccccttccaccactccttgcccttcagcatccccgtgcactttaccaacgggacttaccatgtggttggttttgacggctcttccacggttgatgagttcctccagcggctgaaccaggagataggcatgagaaagccatcccactctggctttgccctcttcacggacgatccctcgggcagggacctggagcactgcctgcagggaagtgtcaagatctgtgatgccatctccaagtgggaacaagccatgaaggagctgcaccccggaaagtctgagggtgggacacgcgtcgtgaagctgatgtacaagaacaggctgtactttcgcagtcaagtcaaaggggagacggaccgagaacggctgctccttgcctctcaaaccagtagagagatagtggcagggaggtttcctatcaacaaggaattggctcttgagatggctgccctgatggcccaggtagaatatggggacttggagaagcctgccctgccaggccctggaggcacatcccctgccaaggctcagcatcttctccagcaggtcctagacaggttccaccccaggcgctatagacatggggcccccgctgaacagctgaggcacctggcagatatgttgaccacaaaatgggcaacattgcaaggatgctcccctcctgagtgcatccgcatctacctgaccgtggccaggaaatggcctttctttggtgctaaactttttgctgctcagcctgcccagctgtcttccaaggagaacgctctggtgtggattgctgtgaatgaggatggcgtcagcatcctggaccacaacactatgcaagtgcacatcacttacccctactcttcagtgacaacgtttggtggctgcagggatgacttcatgcttgtgattagatctatcccagacaagagctctggaaaaagccacattgagaagttgatcttccggatggctgctcccaagattgcagaagctaccttcatcatggccagctatatgaaccattgcactacaactgtgaacccccccaccaacccacccggagcctgccagctgtgggaactggatggacgacagttcttttcttctgtttcctgtgctaccaaggggccaacgttgctgtga

SEQ ID NO: 136280 - DNA, 205 bp, Homo sapiens
  misc_feature (1)...(205): n = a,t,c or g
ncggggcatctccaagaatgggcagacgcgggagcatgccttgctggcctacacgctggagccggcttacagcgagaagcgctacgacgagatcgtcaagaaagtcagcgcntacatcaagaagatcggctacaacccggccaccgtgccctttgtgcccatctccggctggcacggtgacaacatgctggagccctcccccaac

SEQ ID NO: 136281 - DNA, 6189 bp, Homo sapiens
tacatcaagaagatcggctacaacccggccaccgtgccctttgtgcccatctccggctggcacggtgacaacatgctggagccctcccccaacgagggacaccagtgtttgctgctcacctctgacagccagacaagggctgtgctcaggggcagctcggctgggcacacagtaggtgctttagcggacagcactgaggcccccagcaagaagcccatgagctcctccccctcccgcagtgccgccgacatctacatccgggagtatttccacagccacgtcagcggcggccaccccgaggccactcctctccgtgtgatgtacacggaccggccgctgagccagacggacccagtcacgctgcagtactgttgcctgaccgacgaccgccaggctttccgcccgcccacacgggcagagctggcgcggcaccgcgtggtggtcaccaccacctcccaggcccgtgagctcagggtgccggtcggcttcttctcccacattctcatcgatgaggcggcccagatgctggagtgcgaggccctcaccccgctggcctatgcctcgcacggcacccgcctcgtgctggcgggcgaccacatgcaggtcacaccccggctgttcagtgtggccagggcccgggcggccgagcacacgctgctgcaccgcctcttcctgtgctaccagcaggagactcacgaggtggcgcggcagagccgcctggtcttccacgagaactaccgctgcacggacgccattgtcagcttcatctcgcggcacttctacgtggccaagggcaaccccatccacgccaggggcaagggtccgccccacccccggcactacccgctcatgttctgccacgtggcgggcagcccagaccgggacatgtccatggcgtcctggctgaatctggctgagattgcgcaggtcgtcgagaaggtgcaggaggcctacaacacctggcccagctgctggggcggccgcgagcagaggtgcatctgtgtcgtttcccacggtgcccaggtcagtgcactgaggcaggagctgaggaggcgggacctaggccaggtgtctgtcggcagttttgagatcctgccagggcggcagttccgggtcgtggtgctcagcactgtgcacacctgccagagcctgctcagccctggggcactggcccctgagttcttcaccgacgcccgcgtgctcaacaccgtcctgacccgcgcccagtcccagctggtggtagtgggggacgccgtggccctctgctccttcggggcctgcggcaagctctgggagagcttcatccgtgagtgcgtggagcggcacagtgtctgccccgagggcctgtccatggagcaggtcgagcagggtgtggcgcagagacggcgctggcctccccgaggcacacaggctggggcagcggggaactgggaggctgccccagagccagtaggggacctggccgaggagcaggcggctgtggtgacggccatggtgaaggcagagccgggagatgaggctctgagcccagcatcccgtgacatcacggcaaccacagcgcagacggaggctgcggcagcaccagcaggagacgcagtgaaggaagacgtggtgcccggggcctgtgcggcaggagcggctgctgcagcgggcgtggagtccacggaggctgaagatgcagaggctgacttctggccgtgggacggggagctcaacgctgacgacgccatcctacgggagcttctggacgagagccagaaagtgatggtgaccgtcggggaggacgggctgctggacactgtcgccaggcccgagtccctgcatcatgcccggctgtacgataacctgcccccggctgcgctacggaagctgctgcacgcggagcccgagcggtaccgccactgctctttcgtgccatataccttcgagcgggcgtcagccatcccgctggacgatgcctcctcgggccccatccaggtcaggggccgcctggactgtgggatggccttcgccggggatgaggtgctggtgcagctcctttcgggagacaaggcgcccgaggggcggcttcggggccgcgtgctgggcgtgctgaagaggaagaggcacgagctggcgtttgtgtgccgcatggacacgtgggacccgcgcatcatggtccccatcaatggctccgtgaccaagatcttcgtggccgagctgaaggacccatcgcaggtccccatctacagcctccggaagggccggctgcagcgtgtggggcttgagaggctcaccgccgaggcccggcacagccggctcttctgggtccaaattgtcctgtggcggcaaggcttctactacccgctgggcatcgtccgggaggtgctgcctgaggccagcacctgggagcagggcctccgcatcctcggcctggagtacagcttgagggtgcccccgtcggaccaggccaccatcaccaaggtgctgcagaaataccacacggagcttggccgggttgccggccgccgagaggactgccgcgccttcttgaccttcactgtggacccccagggcgcctgcaacctcgatgatgccctcagtgtccgagacctgggtcccaggtgcgaggtggctgtgcacatcactgatgtggccagcttcgtgcccagggacggggtgctggacgtggaggcgcgaaggcagggcgctgcgttctatgcccccggcagggagccagtgcccatgctgccggccagcctctgccaggacgtcctcagcctcctgcctggccgggaccgcctggccatctccctgttcctcaccatggagaaggccagtggccagttgaagagcttgcgctttgcaccttccgtggtccagtctgtctgccagctgtcatacgaggagccggaggaggtgatcaggcagctcccgggtgccggccgtgagatgaaaaacagcttggactccgtggacgcttgcgtcgtggccgcgtgctacttctctcggctgctgcgccggcaccgcctgcggtcggactgcttctatgagcagccgcacgagcccggcaccctgggcttccgcgcggcccacatcatggtgaaggagtacatgattcagtttaataggctcgtggctgagttcctggtgggcagcgagtgcacgcggacggtcacgcctctgcggtggcagccagcaccccgcagccagcagctcaaggccctgtgtgagaagcatggggaccgggtgcccctgtcactgcacctcggccaccacctgcacggcggcgggggcagtccccccgacacgcggctgcacctcctggcctccctctggaagcaggtccagtttgctgcccgcacccaggactacgaacagatggtggacttggtcaccacggacgacatgcacccattcctggctcctgcaggccgcgacctccgcaaggccctggagcgctcggcgttcggccgctgcgcccggggccaccagcagcagggcggccactactcgctgcaggtggactggtacacgtgggccacctcgcccatccgcaggtacctggacgtggtgttgcagcggcagatcctgctggcgctgggccatgggggctctgcctactctgccagggacatcgatgggctctgccaggccttcagcctccagcacgcacttgcccagagctatcagcggcgggcgcgcagcctgcacctggccgtgcagctcaaggcccagcctctggacaagctgggcttcgtggtggacgtggaggcgggctcccgctgcttccggctgctcttccccagcaaccgggagacgctgcctgacccctgccccgtcccctacggctccctgcagctggccgagcacccccacgccctggcaggccggccgggcctgcggctcctgtggcggcgccgtgtctactcagcgcagggatccagcccgcccctgccactgcctggcactgtgccggacccacacaccctggccgtggagacggccctgtggaagcagctgctggagctggacagagcctggaatgatgcagccaatcacagagtgacttatcacctttctgtgttctatgggctggacacaaaccgtagtgtttctcggaggaaagtactcaaggctgcgactcaccagggattacctgaggttgtatccacccaggagcccaagtccctggactcctatggggcagacgcagccacagaccagggtcctcctgagaggccctctccacaggctggggagaactgtttggccccgaccctgggcccccacctttccttcctcctcacacctgccagcaggccagcccctcacactcccagcaaaatgggcaaggagaagacccacatcaacatcgtggtcatcggccacgtggactccggaaagtccaccaccacgggccacctcatctacaaatgcggaggtattgacaaaaggaccattgagaagttcgagaaggaggcggctgagatggggaagggatccttcaagtatgcctgggtgctggacaagctgaaggcggagcgtgagcgcggcatcaccatcgacatctccctctggaagttcgagaccaccaagtactacatcaccatcatcgatgcccccggccaccgcgacttcatcaagaacatgatcacgggtacatcccaggcggactgcgcagtgctgatcgtggcggcgggcgtgggcgagttcgaggcgggcatctccaagaatgggcagacgcgggagcatgccctgctggcctacacgctgggtgtgaagcagctcatcgtgggcgtgaacaaaatggactccacagagccggcctacagcgagaagcgctacgacgagatcgtcaaggaagtcagcgcctacatcaagaagatcggctacaacccggccaccgtgccctttgtgcccatctccggctggcacggtgacaacatgctggagccctcccccaaccacaccccagctagctgggggtctcctggggtcacaatcttagacaccccaaggtgcccctccttcaccttcaggaagatgctggaggaagacaccctttccatcctcctcatctccacccccacggagcctaggcaaatagtcattagctttgcctatggaccgccctgctccaccacgagccctgccctccaggaactgctgaaggggtctgtcctccacacctggggtgactgtgagccccttcccatcacaaaggctgcttgccccccaaccactgctcaggacaagcggggcagcccacagcggacactgctgttttcctaccacacctgccggcccggggcccatcagctgtccctgaatgaatgcgtggatgaacgaatgaatgaacagatagccacggacatgcgatttccaactcaaaatcctgccgttgttctggactccccagctgggggcgaggcaggctctgactccgaggccgagatcttgtcccagaagaaggacaggaaggccagccgcctcctgaggaacggctccatcccccggggtcaccacgctgggcccgagggccatgggagcccgcgagcccggaagaggaactggcagggccgggcaccacagtccaacagccgcccgtgcccacggagaagtgggggttccacggagaagcgctgctgttcagcacctgcagtggttgccaagcctgagctgcactcaggagaccacctccttctgcgctgctgccccctctggcgtagcctcctggacttctgcgaggctcagcagaccctcgtgcctgccggccagggccggtgtctccggctgcctgtgtggggaggggagggccgtgcctggtgtggtggggacaagccacagctccagagctgctccggtgtcaccaggctggccaagtccaaagtccctgaggccaccagccttgactgtcctgctggtcccacttttaaagctgctccccaggaccccctggccgctgtggactggggtccctccgcacctggcccatttgtggctgcgtccacaggggctcctgtggcctcccagagccagctcgggggtcagatggtcgcgggggctatggtcactgtgggaaaagaggttctgggcatctgtggagggaggggtggagcatggagtctccaggactgtggccccgttggtgtgctggacgggccctgccttgaagaccatgtctattcttggaccgtcatgaaataa

SEQ ID NO: 136282 - DNA, 1871 bp, Homo sapiens
tttcgtggcggtgcactgcgccgccaccgtcaataggtggaccccctcccggagataaaaccgccggcgccggcgccgacagtccctctggctgagacctcggctccggaatcactgccagcccccctcgccctgagccagagcaccccgtgtttccgccagcccctcacactcccagcaaaatgggcaaggagaagacccacatcaacatcgtggttcatcggccacgtgcgactccggaaagtccaccaccacgggccacctcatctacaaatgcggaggtattgacaaaaggaccattgagaagttcgagaaggaggcggctgagatggggaagggatccttcaagtatgcctgggtgctggacaagctgaaggcggagcgtgagcctggtcatcaccatcgacatctccctctgggaagttcgaggaccaccaagtactacatcaccatcatcgatggccccgggccaccgcgacttcatcaagaacatgatcacggggtacatcccaggcggactgcgcagtgctgatcgtggcggcgggcgtgggcgagttcgaggcgggcatctccaagaatgggcagacgcgggagcatgccctgctggcctacacgctgggtgtgaagcagctcatcgtgggcgtgaacaaaatggactccacagagccagcctacagcgagaagcgctacgacgagatcgtcaaggaagtcagcgcctacatcaagaagatcggctacaacccggccaccgtgccctttgtgcccatctccggctggcacggcgccaacatgctggagccctcccccaacatgccgtggttcaagggctggaaggtggagcgtaaggagggcaacgcaagcggcgtgtccctgctggaggcccctggacaccatactgccccccacgcgccccacggacaagcccctgcgcctgccgctgcaggacggtgtacaagatttggcggcattggcacggtgcccgtgggccgggtggagaccggcatcctgcggccgggcatggtggtgacctttgcgccagtgaacatcaccactgaggtgaagtcagtggagatgcaccacgaggctctgagcgaagctctgcccggcgacaacgtcggcttcaatgtgaagaacgtgtcggtgaaggacatccggcggggcaacgtgtgtggggacagcaagtctgacccgccgcaggaggctgctcagttcacctcccaggtcatcatcctgaaccacccggggcagattagcgccggctactccccggtcatcgactgccacacagcccacatcgcctgcaagtttgcggagctgaaggagaagattgaccggcgctctaccaagaagctggaggacaaccccaagtccctgaagtctggagacgcggccatcgtggagatggtgccgggaaagcccatgtgtgtggagagcttctcccacgtaacccgtcatcggaccactcccgtgcgcgacatgagacagacggctgcccgtaggcgtcatcaagaacgtgcagaagaagagcgtcggcgccggcaaggtcaccaagtcggcgcagaaggcgcagaaggcgggcaagtgaagcgcgggcgcccgcggcgccgaccctccccggcggcgccgcgctccgaaccccggcccggcccccgcaccgcccccgcggcgcgcgccgctccggcgccccgcacccccgccaggcgcatgtctgcacctccgctttccagaggccctcggtcagcgactggatgctcgccatcaaggtccagtggaagttcttcaagaggaaaggcgcccccgccccaggcttccgcgcccagcgctcgccacgctcagtgcccgttttaccaataaactgagcgaccccaaaa

SEQ ID NO: 136283 - DNA, 1026 bp, Homo sapiens
atggaaggggagacacttaagatacagacaccagtaggtgccaaactatggactgaactttcccctatatgtccccctccaccctcgaaactcagagatctggagggcgcagggatatcggctgggtttggggggcttggagggaaagacacagagggggcgtcagtagcacctcggacagcaccatccctgtccatggtgctgacagctcgaggcactgacagtcgcatccaagagttccggctgtcagggtggctggcccagcaggaggatgcacaccgtatcgtactctaccagacggacgcctcgctgacgccctggaccgtgcgctgcctgcgacaggccgactgcatcctcattgtgggcctgggggaccaggagcctaccctcggccaggagggcgcgggccccacgcgcaccgtggagtggctaaatatgcgcagctggtgctcggggcacctgcacctgcgctgtacgcgccgtctattttcgcgccgcagccttgccaagctgcatgagctctacgagaaggttttctccaggcgcgcggaccggcacagcgacttctcccgcttggcgagggtgctcacggggaacaccattgccctgggctgctcgcacatcggagtactaaaggcattagaggaggcgggggtccccgtggacctggtgggcggcacgtccattggctctttcatcggagcgttgtacgcggaggagcgcagcgccagccgcacgaagcagcgggcccgggagtgggccaagggcgaccgctccgactgcacttacatcgtgctcaatgggcggctgcgtagcgtgatccagcgaggcattggcaagaaggagctggtgggcgagtacgtccgcggcgacctcatcggcgtggtggaggcactgacccggcagccgcgagccacgacggtgcacgcggtgcgcgacacggagctggccaagcttcccgagggcaccttgggtcacatcaaacgccggtacccgcaggtgcggcctgttgtgggcggggcatag

SEQ ID NO: 136284 - DNA, 396 bp, Homo sapiens
atggaaggggagacacttaagatacagacaccagtaggtgccaaactatggactgaactttcccctatatgtccccctccaccctcgaaactcagagatctggagggcgcagggatatcggctgggtttggggggcttggagggaaagacacagagggggcgtcagtagcacctcggacagcaccatccctgtccatggtgctgacagctcgaggcactgacagtcgcatccaagagttccggctgtcagggtggctggcccagcaggaggatgcacaccgtatcgtactctaccagacggacgcctcgctgacgccctggaccgtgcgctgcctgcgacaggccgactgcatcctcattgtgggcctgggggaccaggagcctaccctcggccag

SEQ ID NO: 136285 - DNA, 1261 bp, Homo sapiens
acaaacgccaacaccctgtctaacaaaacacccaacgctccaacaaacgctacgccaaaacacagcagatacaggacaacagaggagaagaaccacagaaccaccaacagagaaaacaaacaaaacgacagccaaaaaaaaacagaaaaaccccaaacaaggcaacaacacggcgacgacacaacgcaacaacacagacaccagacccacagtctcatggctgtcaatcagcgaagcaggccctgctacctgcatctgccccttcaccgaactaagtttgctgccagacatggacattggccgcaattggctgcccgtgcatagctgtgtcattattcctcccctgtcactgccaatcattgttgcctggttatattccaccaccctggccatcattgtgttgccacgtcattccaggtcaccacatccttgcttcattgcattgccctgccattatgtttacatgcccaatgtccccccgaacaacccccgacctatagcaaaccccggcttggacctgcttgcccacttgtacccgggggcctatggtcctttgcattcccccgtggacattacctggcttataccaaggaacaaatggctaggttggacccctgatacttcccggtgggaacgacttgacacattgttgttcacgaacgggagcatgacttcggtgctggaacctgtgttggacctcacgtacccagtcacctccatgttcactgggtctgcctttaaccgcagcatccatcgggtcttccaggataagcagattgaggtacgccacctcatcccctggcctgcataccgcaaccaggaagagacccagaaccaacagcaatcaaaaccgggcaacgaaaaaacgcagcgtgaaaatggggagagaatgaaagaaaagtacggtgtgtttcgtagtggccacaatgaagctgttagtcattacaagttgctgcttcagcaaaacaagaaatttcaaaacttgatcaagaaaccaacaataaactaccagcagcaaatgaacgctactaccaacacctttcctctccaaataacagcaaccaccgatggtcatcattccactggtcaccaagcatctccagaatttccagctgaaaacaatccaccaccaacgaacaacattaaacaccaaccgccaccaccaccagcccacctgcaagagccattatcaccacgaacctgcaacaagaaacagccacaaccaccaccacaaccaatgacaccaacaacccagcaatga

SEQ ID NO: 136286 - DNA, 2517 bp, Homo sapiens
atgctgaggggctgctcgcacatcggagtactaaaggcattagaggaggcgggggtccccgtggacctggtgggcggcacgtccattggctctttcatcggagcgttgtacgcggaggagcgcagcgccagccgcacgaagcagcgggcccgggagtgggccaagagcatgacttcggtgctggaacctgtgttggacctcacgtacccagtcacctccatgttcactgggtctgcctttaaccgcagcatccatcgggtcttccaggataagcagattgaggtcttgccccagaagctgcgggcacatccacgcctgaaatgctggcgctcagtcctggtcaggaacccaggccacaaaggcctgagacccgtttatgaagagctcgactctgactccgaggacctagaccccaatcctgaagatctggacccggtttctgaagacccagagcctgatcctgaagacctcaacactgtcccggaagacgtggaccccagctatgaagatctggagcccgtctcggaggatctggaccccgacgccgaagctccgggctcggaaccccaagatcccgaccccatgtcttcgagtttcgacctcgatccagatgtgattggccccgtacccctgattctcgatcctaacagcgacaccctcagccccggcgatccaaaagtggaccccatctcctctggcctcactgcaaccccccagccttccgccgacagctccgggctgagccagcatcgacgcacgcacagcggcgagaagccgtaccgctgccccgactgcgggaagtccttcagccacggtgccaccctggctcagcaccgtggcatccacactggggcgcggccgtaccagtgcgcggcctgcggcaaggccttcggctggcgctccacgctgctgaaacatcgcagcagccacagcggggagaagccgcaccactgcccggtgtgtggcaaggccttcgggcacggctcgctcctggcacagcacctgcgcacgcacggcggcccgcggccccacaagtgcccggtgtgcgccaagggcttcggccagtgctctgcgctgctcaaacacctgcgcacgcacacgggcgagcggccctacccgtgtccgcagtgcggcaaggccttcgggcagagctcggcgctgctgcagcaccagcgcacacacacggccgagcgcccctaccgctgcccccactgcggcaaagccttcgggcagagctccaacttgcaacaccacctgcgcatccacacgggcgagcggccctacgcctgcccgcactgctccaaggccttcggccagagctcagcgctgctccagcacctgcacccccttggaccatccaagcgtccttgggacctgcacaacacccgtgaaacccatgggacttcttgggtgccacggtgcaacatcatggcccgggaatccacaaggcttcccaagacacacctttacccacgtgcctcccaagaagtcgccaacccaaccaagaacgcgtacattcccatgcttgtgcaaataccattaaccttggaagaccccagaaaaagaggccaatgggagcgctacacaacggccaaaaccgcgcccactaggaggactatccatgctatggaaagaaatgttcttgagccagataccaacgtggctccctccttccctaacttcctttactcgaatgtcatcctctcacgggacccacccgatcacaccctcctggacacttcctacccatgttacctgctggtgacctgtcttgttcatggctatatccgcacagcctggcagaaaacagagaatctgttttcttcctaccagcagtgtatgaaggtcctgaattgctccgtcttctcaccgaaatacgtgaacagccaatcacatcagttcctgctgacaaatcccctggctccaccccctgctgacagtgtacaagattcccccaagagctcagttgtcagagcctcatccacctgccgctggccacagccccgtcgctacacatcccaagccttcgggagcagctttggggctgacaccactctctcaaaggaactaaaggattcgggagccaagaagaaatctttgcaggagacagacaaacactggcagtggctgacttggagaaccctggaaattttcaccatgaaaggttcccggcgcccaagaagccccagtgattcctgcaccgaatccaagagcgaccacgcaggagagagcggctccagcggcacgccatcaaatgccccaaaacgccagaaagtggaggagctgggtcctcatccaggtgcagaaccagctccggtacagccagctccccagcaccctgcacagctgcccctggagctgccccagcggacaaaaagccggtcagggggacaaaggcctgcggccgcgcctgcgcgcaagcctttggggcgctcccggtaccccggcctggccccgccccctggcgcggcgcgccgacgtcgcggtgacgtcacggagttgccatggcgtcgctga

SEQ ID NO: 136287 - DNA, 2027 bp, Homo sapiens
gagaggagtcagattgtctgacagagtatgaggaggacgccggacccgactgctcgagggatgaaggggggtcccccgagggcgcaagccccagcactgcctccgagatggacgtgagcctgcacttcgtgctctggggctgcctgcacgtgtaccagcgcatgatcgacaaggcggaggacgtgtgcctgttcgtagcgcagcccggggaactggtggggcagctggcggtgctcactggcgaacctctcatcttcacactgcgagcccaacgcgactgcaccttcctgcggatctccaagtccgacttctatgagtatgacagcccgaagttggagtgtgggtggcactcggaggaccccaacccatggacttcgccatcgactggactgaacccactcttcctggagctctgccgccacatggtcttccagcggctgggccagggtgactacgtcttccggccgggccagccagatgccagcatctacgtggtgcaggacgggctgctggagctctgtctgccagggcctgacgggaaggagtgtgtggtgaaggaagtggttcctggggacagcgtcaatagccttctcagcatcctggatgtcatcaccggtcaccagcatccccagcggaccgtgtctgcccgggcggcccgggactccacggtgctgcgcctgccggtggaagcattctccgcggtcttcaccaagtcagctcggaccattacaggctgtgtgtggcgttacgtccgggccagcgcctcctactgcccctacctgcccccactgtgcgaccccaaggacgggcacctgctggtggacgggtgctacgttaacaacgtcccaggctccctgtggcggtacgtgcgcgccagcatgacgctgtcgggctacctgcccccgctgtgcgaccccaaggacgggcacctactcatggatggcggctacatcaacaatctgccaggcaagtggccgcccgcaccacccgcacacgcaagcacctcccgcaccacacacacgcacacgccggacatcgcccgcagcatgggtgccaaaacggtcatcgccattgacgtggggagccaggatgagacggacctcagcacctacggggacagcctgtccggctggtggctgctgtggaagcggctgaatccctgggctgacaaggtaaaggttccagacatggctgaaatccagtcccgcctggcctacgtgtcctgtgtgcggcagctagaggttgtcaagtccagctcctactgcgagtacctgcgcccgcccatcgactgcttcaagaccatggactttgggaagttcgaccagatctatcctccgcaccaccaggaggatgagcacggccgtgaccaccaccgccactccggccccgatcatcacgccaagcacctgagggacgaacggcactggctgcgcaccgcaaatccgtcccgccgagccttccccgggcgccaggacgtcctggaacccatccctctccgccaccttcgcccccgaggagttcgtagccagcccgtgactcgatgtccccatctgcagaatgggccagtgctgctccctccccgggggcgcgactcttccctgaggcccgtgcggcccgcagtgcatgccgggaaacgtagttccgcccgagcggactgcagcgcgttatcgccagaccacggcctaccagacgcccgcctgtccaaccccaccccggggccaaaggccgacctggtacccactgtcagcagcctgcaggcaggcttgcagggtggcccccgctccgacttcgacatggcctatgagcgtggccggatctccgtgtccctgcaggaagaggcctccggggggtccctggcagcccccgctcgggagcctcgtgagcagccggcaggcgcctgtgaatacagctactgtgaggatgagtcggccactggtggctgccctttcgggccctaccagggccgccagaccagcagcatcttcgaggcagcaaagcaggagctggccaagctgatgcggattgag

SEQ ID NO: 136288 - DNA, 1834 bp, Homo sapiens
tccggagccgggcggaacgctagcggtgttggcgcggagtttacttcggctgcggcccctgggtgtttccacaccggtagccagctgtgccctgaggtggaagaggaccggccacccaggaattttccaacaatggcgccaccatcggtcccggagtcccagtgatgctctgtgccatagagcccccataacttcactactacgtgatagtaaatccccggcaaaaaccagcagcgccttgcaagcccacgccaccccaagcatcccaggactcttctgaaacgactccgggctaccagatcggccgtccagctggaatcaaccgatggaggctccgctgcaaactggaatggtgcttggcgtgatgatcggggccggagtggcggtggtggtcacggccgtgctcatcctcctggtggtgcggaggctgcgagtgccaaaaaccccagccccggatggcccccggtatcggttccggaagagggacaaagtgctcttctatggccggaagattatgcggaaggtgtcacaatccacctcctccctcgtggatacctctgtctccgccacctcccggccacgcatgaggaagaaactgaagatgctcaacattgccaagaagatcctgcgcatccagaaagagacgcccacgctgcagcggaaggagcccccgcccgcagtgctagaagctgacctgaccgagggcgacctggctaactcccatctgccctctgaagtgctttatatgctcaagaacgtccgggtgcttgggccacttcgagaagccactcttcctggagctctgccgccacatggtcttccagcggctgggccaggtgactacgtcttccggccgggccagccagatgccagcatctacgtggtgcaggacgggctgctggagctctgtctgccagggcctgacgggaaggagtgtgtggtgaaggaagtggttcctggggacagcgtcaacagccttctcagcatcctggatgtcatcaccggtcaccagcatccccagcggaccgtgtctgcccgggcggcccgggactccacggtgctgcgcctgccggtggaagcattctccgcggtcttcaccaagtacccggagagcttggtgcgggtcgtgcagcccggcccaccatctggccctgccccttaccccgccccatcttatggccacgcccctcgagccctgcagatcatcatggtgcggctgcagcgagtcaccttcctggcactgcacaactacctgggtctgaccaatgagctcttcagccacgagatccagcccctgcgtctgttccccagccccggcctcccaactcgcaccagccctgtgcggggctccaagagaatggtcagcacctcagctacagacgagcccagggagaccccagggcggccacccgatcccaccggggccccgctgcctggacctacaggcttgcagggtggcccccgctccgacttcgacatggcctatgagcgtggccggatctccgtgtccctgcaggaagaggcctccggggggtccctggcagcccccgctcgggagcctcgtgagcagccggcaggcgcctgtgaatacagctactgtgaggatgagtcggccactggtggctgccctttcgggccctaccagggccgccagaccagcagcatcttcgaggcagcaaagcaggagctggccaagctgatgcggattgaggacccctccctcctgaacagcagagtcttgctgcaccacgccaaagctggcaccatcattgcccgccagggagaccagatggaggaagtgaaagttccagcctttgcggttattgtggattaa

SEQ ID NO: 136289 - DNA, 4430 bp, Homo sapiens
  misc_feature (1)...(4430): n = a,t,c or g
ccccacgccaccccaagcatcccaggactcttctgaaacagggcagtgacccgggaggaagtcaccaggtgcagaggaccgtgccctgtggggacctgcctgcaggctgctgacagactccgggctaccagatcggccgtccagctggaatcaaccgatggaggctccgctgcaaactggaatggtgcttggcgtgatgatcggggccggagtggcggtggtggtcacggccgtgctcatcctcctggtggtgcggaggctgcgagtgccaaaaaccccagccccggatggcccccggtatcggttccggaagagggacaaagtgctcttctatggccggaagattatgcggaaggtgtcacaatccacctcctccctcgtggatacctctgtctccgccacctcccggccacgcatgaggaagaaactgaagatgctcaacattgccaagaagatcctgcgcatccagaaagagacgcccacgctgcagcggaaggagcccccgcccgcagtgctagaagctgacctgaccgagggcgacctggctaactcccatctgccctctgaagtgctttatatgctcaagaacgtccgggtgctgggccacttcgagaagccactcttcctggagctctgccgccacatggtcttccagcggctgggccagggtgactacgtcttccggccgggccagccagatgccaagcatctacgtggtgcaggacgggctgctggagctctgtctgccagggcctgacgggaaggagtgtgtggtgaaggaagtggttcctggggacaagcgtcaacagccttctcaagcatcctggatgtcatcaccggtcaccagcatccccaagcgggaccggtgtctgcccgggcggcccgggactccacggtgctgcgcctgccggtggaaacattctccgcggtcttcaccaagtacccggagagcttggtgcgggtcctgcaaatcatcatggtgcggctgcagcgaagtcaccttcctgggcactgcaaaactacctgggtctgaccaatgagctcttcagccacgaagatcaagcccctgcgtctgttccccagccccggcctcccaactcgcaccagccctgtgcggggctccaagagaatggtcagcacctcagctacagacgagcccagggagaccccagggcggccacccgatcccaccggggccccgcagcatggacctacaggggaccctgtgaagcccacatccctggaaaccccctcggcccctctgctgagccgctgcgtctccatgccaggggacatctcaggcttgcagggtggcccccgctccgacttcgacatggcctatgagcgtggccggatctccgtgtccctgcaggaagaggcctccggggggtccctggcagcccccgctcggacccccactcaggagcctcgtgagcagccggcaggcgcctgctgaatacagctactgtgaggatgagtcggccactggtggctgccctttcgggccctaccagggccgccagaccagcagcatcttcgaggcagcaaagcaggagctggccaagctgatgcggattgaggacccctccctcctgaacagcagagtcttgctgcaccacgccaaagctggcaccatcattgcccgccagggagaccaggacgtgagcctgcacttcgtgctctggggctgcctgcacgtgtaccagcgcatgatcgacaaggcggaggacgtgtgcctgttcgtagcgcagcccggggaactggtggggcagctggcggtgctcactggcgaacctctcatcttcacactgcgagcccaacgcgactgcaccttcctgcggatctccaagtccgacttctatgagatcatgcgcgcacagccccatgtgggagctgaatgccggcgcacacggtggcaagccaggaatgtccccctttggggccgccagatggacttcgccatcgactggactgcagtggaggcgggacngcgcgctgtacaggcagggcgaccgctccgactgcacttacatcgtgctcaatgggcggctgcgtagcgtgatccagcgaggcagtggcaagaaggagctggtgggcgagtacggccgcggcgacctcatcggcgtggtggaggcactgacccggcagccgcgagccacgacggtgcacgcggtgcgcgacacggagctggccaagcttcccgagggcaccttgggtcacatcaaacgccggtacccgcaggtcgtgacccgccttatccacctactgagccagaaaattctagggaatttgcagcagctgcaaggacccttcccagcaggctctgggttgggtgtgcccccacactcggaactcaccaacccagccagcaacctggcaactgtggcaatcctgcctgtgtgtgctgaggtccccatggtggccttcacgctggagctgcagcacgccctgcaggccatcggtccgacgctactccttaacagtgacatcatccgggcacgcctgggggcctccgcactggatagcatccaagagttccggctgtcagggtggctggcccagcaggaggatgcacaccgtatcgtactctaccagacggacgcctcgctgacgccctggaccgtgcgctgcctgcgacaggccgactgcatcctcattgtgggcctgggggaccaggagcctaccctcggccagctggagcagatgctggagaacacgggctgtgcgcgcccttaagcagctagtcctgctccaccgagaggagggcgcgggccccacgcgcaccgtgggagtggctaaatatgcgcagctggtgctcggggcaccttggcacctgcgctgtccgcgccgcctcttttcgcgccgcagccctgccaagctgcatgagctctacgagaaggttttctccaggcgcgcggaccggcacagcgacttctcccgcttggcgagggtgcttcacgggggaacaccattgcccttgtgcttggcgagggtgctcacggggccaggggctgtctcgcacatcggagtactaaaggcattagaggaggcgggggtccccgtggacctggtgggcggcacgtccattggctctttcatcggagcgttgtacgcggaggagcgcagcgccagccgcacgaagcagcgggcccgggagtgggccaagagcatgacttcggtgctggaacctgtgttggacctcacggacccaggccacctccatgtttactgggttctgcctttaaccgcagcatccattcgggtctttccagggtaaagcagatttgaggacctgttgcttgccttaatttcaaacgttgacccacagatatcaccgcctcagccatgcgaggccacaaagatggctccctgtggcggtacgtgcgcgccagcatggaccgctgtcgggctacctgcccccgctgtgcgaccccaaggacgggcacctactcatggatggcggctacatcaacaatctgccagcggacatcgcccgcagcatgggtgccaaaacggtcatcgccattgacgtggggagccagggatgagacggacctcagcacctacggggaacagcctgttcggctggtggctgctgtgggaagcggctgaatccctggggcttgacaaggtaaaggtttccagacatggcttgaaatccagttcccgcctgggcctaacgtgtcctgtgtgcggcagctagaggttgtcaagtccagctcctacttgcgagtacctgcgcccgcccatcgactgcttcaagaccatggactttgggaagttcgaccagatctatgatgtgggctaccagtacgggaaggcggtgtttggaggctggagccgtggcaacgtcatttgagaaaatgctcacagaccggcggtcttacagaccttaatgagagccgccgtgcagacgtgcttgccttcccaagctctggctttcactgacttgggcagagattgtgtcccggattgagccccccacggagctatgtctcttgatgggctgtgcttgacggagagggagtcagattgtcttgacagagttttgagggagggacggccgggacccgaactgctcgaagggatgaaaggggggttcccccgaagggcgcaagccccagcactgcctccgagatggaggaggagaagtcgattctccggcaacgacgctgtctgccccaggaagcagcccggctcagcccacagatgcctgaggacctcgacagggggtcacccccctccctcccacccctggactgggctgggggtggcctcgtgggggtagctcactccccctcctgcctgctatgacctgtgacccccgcggcccacacactggactgatcctgccctgagcggggatgcagtgttgccactgatgacttgaccagcccctcccccaataaactcgacctcttggaaatggc

SEQ ID NO: 136290 - DNA, 403 bp, Homo sapiens
  misc_feature (1)...(403): n = a,t,c or g
annnnnnnnnnccctaagctactgcacactaaacagtgagagagcttttccctgcagtcttgttgaagcaccccgggttgtttgctcattgttggggggggcattttaattttttcattccctggactatgggttatgatatccatactcactgaagacaaaaagccaccttttctgcgtcttgggggcatgcatgtggctcatcatcctttcaaacttgggggggaacagggttttcttccctgtctgtgtatttggagccagcacagttaccaaaattgaacttgtctttcgcttgtgagcggttgtggtcattgtgagaaaatgaactcagaggagaattggtgaattcctatccagtgggcatcttcaaaccctggtcgacggcggaagaatatcaggt

SEQ ID NO: 136291 - DNA, 225 bp, Homo sapiens
cataatgccctcaacatccagccatgtcgtagaatgggccaatgtggctttgtgaagcagctggagattcctcagtatggctacagaaacaatgtccccacaactacgccgcgttccaacctggccaaggagctcgagaaatattccaagacctcgtttgaatacaccattaacgacaaccatacttatgggggactagggtgcatgagaccacgcttagtgtga

SEQ ID NO: 136292 - DNA, 1860 bp, Homo sapiens
atgaccgcggaactcggggaggcccggctacgtccccctcacgaaaggaacgcgggactcgggaaggcccggaaggctggactgcgtccccctcacgtaaggaacgcgggactcgggaaggcccggaaggcctggctgcgtccccctcacgtaaggaacgcgggcgtctgggaggcccggctgcgtccccctcacggaaggaacgcgggactccggaaggcccggaaggcctggctgcgtccccctcacggaaggaacgcgggcgtctgggaggcccggctgcgtccgcctcacggaaggaacgcgggactcgggaaggcccggaaggcctggctgcgtccccctcaaggaaggaacgcggacaaggaacgcgggacttgggaaggccggaaggcccggctgcgtccccctcacgtaggaacgcgggcgtctgggaggcccggctgcgtccccctcacagaaggaacgcgggactcgggaaggccggaagcccggaaggcccggctgcgtccccctcacgtaaggaacgcgggcgtctgggaggcccggctgcgtccgcctcacgtaaggaacgcgggactcgggaaggcccggaaggcccggctgcgtccccctcacgtaaggaacgcgggcgtctgggaggcccggctgcgtccgcctcacagaaggaacgcgggactcgggaaggcccggaaggcctggctgcgtccccctcacggaaggaacgcgggactcgaggaggcccggctgcgtccgcctcacagaaggaacgcgggactcgggaaggcccggaaggcctggctgcgtccccctcacagaaggaacgcgggactcgaggaggcccggctgcgtccccctcacgtgtggaggccaatcagctggaaacctcaagccaaccccaaccaccgatttaggcaggagtctctcctacaactgaagctgacggatgaggagaggcttatatcatcacaggaagagaacagagctttcctcccacagctggggaaatctgccggctctgctggagaggccgccagcccattggtgggcgtgcggtattttgtgttgtcgctctatcctttagaaaatgaactcagaggagaattggtgaattcctatccagtgggcatcttcaaaccctggtcgacggcggaagaatatcaggtcctgagatcacccacccggcgcggcaacagtgcaggtacctctgcccagcacggggctcctggtgacagagtgcaggtgcccctgcccagcacggggcttctggccacagtgcagggtgggagagcaagttggacttggttaggggaaaaaagagatctcgaggttctagcagctgaaatcctgtcctgctttgccctggagactgccatcctcagtggagtgtccgccgggacccctccagccaggccccggaaaaagccaaaagaggtgattgagagagcggaaacacaacctgcagagtgtgctcctaccacactgcccaaggagcttagagagaaaaggtctgctgttcctcacaggctgaaaagcaggtctgtcaccgtcaccccgacagccccctgcttcaccaagtattttcctgggagtctcaggagctcttcacatgtccccgtgccggctgattgctacagcaacctgcggattgtggaagtgagatgtgggcagcctaataatgcactctcgggaacttctgttccttcttctgcaaatgagggtaacaatgcgttctcagcagaatgcttgcaatgccagaatgaaacagccctggaaagaaccctgtatggcctgacaggtagtgtggccactgaaccagacatgactgaattctcctccttcagctgtgacagactttga

SEQ ID NO: 136293 - DNA, 672 bp, Homo sapiens
atgatgccgactttgaggattaagagagatactgaacctgcagtgtctgacctaacgtgtagcttctcagctggatactcggaaatgggagcagttgacatgtgtgctgctcttaccatgaagatccctgctcctctgtcaccaggaacatgtcacaaaatagaaagtgtggcttctaggcagaattgggaagacccagaaaggggagggcattccagggcgggtcatgaggaggctgtagccaaggacgaggtgtgtgcggctgttgcctggacgtttgtccaatccacgttgacatttgagggatcacagcgtgtgtgtttttctcaatggctgaaggcaggaccagggccgaaaggtcctgcgatagtaaataggccattggtgccccagcagaggaatgaggaggagcgtcaccagggaagagtccagaattgtggcagggggcaggatacagcccgctgggggcatgtggacacaaagccaggctttggattccgtggagaaggagctggagtggagagaagggagccaggggctgcaggggcacaggcaagaagctggggcaccaggggtggagatgggagacacctggacgccctggaggtgcagggccagcaggatttcctgacccagttgtcatggggtgtgagaaagaagcatcaagggtga

SEQ ID NO: 136294 - DNA, 1380 bp, Homo sapiens
atgaggactgctgtcctgggtcaggcgcccacccaggtccaaccagctgcggtccgggaggaccagaatgagattttttatttgctaaatgtcgaatattcagagagcccttttgtggccatctccctccggccagcccccatgtccctctcccacttcccacagcttcctgtcggtatagaaaatgatgaagaaatcaaacagttagatgaagaaatcaaggagctaaatgaatccaattcccagatggaagccgatatgattaaactcagaactcagaggttgaggctggggaaggttgagggcctttcccatagtcagccgggtgtggtcaacggctctgctcaacaggtggtttctacccactggacacagttttcccaaggatggagacatcctctggggctggggccccaccaagcaaccgaaagggatttccaggccccccggagaggtccagatttaaatctgataaagaacaaatccaagagaaggaaaaaggaaactccgtccaagcctttaaatttcacacctgtgccggatggggaagaccgccacgcctgtgccggatggagggagaccgccgcgcctgtgccggatggagggagaccgccgcgcctgtgccggagaagagggagaccgccgcgcctgtgccggatggagggagaccgccgcgcctgtgccggatggagggagaccgccgcgcctgtgccggagaagagggagaccgccgcgcctgtgccggatggagggagaccgccgcgcctgtgccggagaagggggagaccgccgcgcctgtgccggatggggggagaccgccgcgcctgtgccggatggggggagaccgccgcgcctgtgccggagaagggggagaccgccgcgcctgtgccggagaagggggagaccgccgcgcctgtgccggagaagggggagaccgccgcgcctgtgccggatggggggagaccgccgcgcctgtgccggatgcaggaaaggcctctcctgccactctctgcggaaggggttgcttgttacctctcaagcccaggagtgttcttactaaaacttggaaagattaccacgatggagagcaacctgaagaccatcgaagaggagaacaaagtgattgagcagcagaacgagtctctcctccacgagctggcgaacctgagccagtctctgatccacagcctggctaacatccagctgccgcacatgtttcttcgaatcttcgttgagcaagctttctggatcgtcactagggacagcgatcaggactcctgcacgtctgatttgcagatagcaggcgggcatcctgggctgctccttgccggtgacacccgatcctcctgcggccttcagcaagagtcctgtgtgctgtga

SEQ ID NO: 136295 - DNA, 2581 bp, Homo sapiens
atgcaagacacagaaaaggatgataacaataatgacgaatatgacaattacgatgaactggtggccaagtcattgttaaacctcggcaaaatcgctgaggatgcagcctaccgggccaggactgagtcagaaatgaacagcaatacctccaatagtctggaagacgatagtgacaaaaacgaaaacctgggtcggaaaagtgagttgagtttagacttagacagtgatgttgttagagaaacagtggactcccttaaactattagcccaaggacacggtgttgtgctctcagaaaacatgaatgacagaaattatgcagacagcatgtcgcagcaagacagtagaaatatgaattacgtcatgttggggaagcccatgaacaacggactcatggaaaagatggtggaggagagcgatgaggaggtgtgtctgagcagtctggagtgtttgaggaatcagtgcttcgacctggccaggaagctcagtgagaccaacccgcaggagaggaatccgcagcagaacatgaacatccgtcagcatgtccggccagaagaggacttccccggaaggacgccggacagaaactactcggacatgctgaacctcatgcggctggaggagcagttgagcccccggtcgagagtgtttgccagctgtgcgaaggaggatgggtgtcatgagcgggacgacgataccacctctgtgaactcggacaggtctgaagaggtgttcgacatgaccaaggggaacctgaccctgctggagaaagccatcgctttggaaacggaaagagcaaaggccatgagggagaagatggccatggaagctgggaggagggacaatatgaggtcatatgaggaccagtctccgagacaacttcccggggaggacagaaagcctaaatccagtgacagccatgtcaaaaagccatactatggtaaagatccctcaagaacagaaaagaaagagagcaagtgtccaacccccgggtgtgatggaaccggccacgtaactgggctgtacccacatcaccgcagcctgtccggatgcccgcacaaagatagggtccctccagaaatccttgccatgcatgaaagtgtcctcaagtgccccactccgggctgcacggggcgcgggcatgtcaacagcaacaggaactcccaccgaagagacattcaggtgtttaatctgcagaagcaggaaatgatcgataggttggagagcctctccggatgcccgatcgctgcagcagagaaactggccaaggcacaggaaaagcaccagagctgcgacgtgtccaagtccagccaggcctcggaccgcgtgctcaggccaatgtgctttgtgaagcagctggagattcctcagtatggctacagaaacaatgtccccacaactacgccgcgttccaacctggccaaggagctcgagaaatattccaagacctcgtttgaatacaacagttacgacaaccatacttatggcaagcgagccatagctcccaaggtgcaaaccagggatatatcccccaaaggatatgatgatgcgaacgggtactgcaaggaccccagccccagcagcagcagcaccagcagctacgcgcccagcagcagcagcaacctgagctgcggcgggggcagcagcgccagcagcacgtgcagcaagagcagcttcgactacacgcacgacatggaggcggcccacatggcggccaccgccatcctcaacctgtccacgcgctgccgcgagatgccgcagaacctgagcaccaagccgcaggacctgtgcgccacgcggaaccctgacatggaggtggatgagaacgggaccctggacctcagcatgaacaagcagaggccgcgggacagctgctgccccatcctgacccctctggagcccatgtccccccagcagcaggcagtgatgaacaaccggtgtttccagctgggcgagggcgactgctgggacttgcccgtagactacaccaaaatgaaaccccgggaggatagacgaggacgagtccaaagacattactccagaagacttggacccattccaggaggctctagaagaaagacggtatcccggggaggtgaccatcccaagtcccaaacccaagtaccctcagtgcaaggagagcaaaaaggacttaataactctgtctggctgccccctggcggacaaaagcattcgaagtatgctggccaccagctccccaagaactcaagtaaggatttaatgacaataattctcttttaaaaatccatgcactcagtagttcacaaaaaaaaatgatatgtcatttgcaaagaaaaatgtctgttaaaaaacatggcctgtgcaccccagtgccttgatgtagacatgggattgaatcctcggaatttcagccacttttccacacavcccattctgccttttcccctgacatacctccagcttgttcatatcatatccttcctatctggaatatcctaaagcatgggtgttttctcttcagatatgcatgcatatggaagggaaattttacagttactcaaatttttagaaaatgactgtaaataatcaaaatttaattttt

SEQ ID NO: 136296 - DNA, 4373 bp, Homo sapiens
  misc_feature (1)...(4373): n = a,t,c or g
tgcagtcttgttgaagcaccccggggttttttgctcattgttggtgggtgcattttaattttttcattccctggactatgggttatgatatccatactcactgaagacaaaaagccaccttttctgcgtcttggtggcatgcatgtgtctcatcatcctttcaaacttgtggtggaacagggttttcttccctgtctgtgtattttgagccagcacagttaccaaaattgaacttgtctttcgcttgtgagcggttgtggtcattgtgagggcgggtcatgaggaggctgtagccaaggacgaggtgtgtgcggctgttgcctggacgtttgtccaatccacgttgacatttgagggatcacagcgtgtgaaaatgaactcagaggagaattggtgaattcctatccagtgggcatcttcaaaccctggtcgacggcggaagaatatcaggtcctgagatcacccacccggcgcggcaacagtgcagagtggccacattctggtggaagaagaaaaaaatgtagtgtattgaattcaatcaagtgtttgcatctttcaagctatcaacaaaattccatcaagaaaggttccagttggtctcacagacgtatggatatccgaggagccacctaaagatggagaaatcaaggcatagagagattaagtgactttgccacagtcacaagctggagaggaccaggagtagagcttagagcgagcccctgactctgggcctgcgtcctgccaggagtcacgctgcctccgttcctaggagagaagacttcctgtaagatggaggtggacaccgaggagaagcggcatcgcacgcggtccaaaggggttcgagttcccgtggaaccagccatacaagagctgttcagctgtcccacccctggctgtgacggcagtggtcatgtcagtggcaaatatgcaagacacagaagtgtatatggttgtcccttggcgaaaaaaagaaaaacacaagataaacagccccaggaacctgctcctaaacgaaagccatttgccgtgaaagcagacagctcctcagtggatgagtgtgacgacagtgatgggactgaggacatggatgagaaggaggaggatgagggggaggagtactccgaggacaatgacgagccaggggatgaggacgaggaggacgaggagggggaccgggaggaggaggaggagatcgaggaggaggatgaggacgatgacgaggatggagaagatgtggaggatgaagaagaggaagaggaggaggaggaggaggaggaagaggaagaagaaaacgaagaccatcaaatgaattgtcacaatactcgaataatgcaagacacagattttggatgataacaataatgacgaatatgacaattacgatgaactggtggccaagtcattgttaaacctcggcaaaatcgctgaggatgcagcctaccgagccaggactgagtcagaaatgaacagcaatacctccaatagtctggaagacgatagtgacaaaaacgaaaacctgggtcggaaaggtgagttgagtttagacttagacagtgatgttgttagagaaacagtggactcccttaaactattagcccaaggacacggtgttgtgctctcagaaaacatgaatgacagaaattatgcagacagcatgtcgcagcaagacagtagaaatatgaattacgtcatgttggggaagcccatgaacaacggactcatggaatttatggtgtaggagagcgatgaggaggtgtgtcggagcagtctggagtgtttgaggaatcactgcttctacctggccaggaagctcagtgagaccaacccgcaggagaggaatccgcagcagaacatgaacatccgtcagcatgtccggccagaagaggacttcccaggaaggacgccggacagaaactactcggacatgctgaacctcatgcggctggaggagcagttgagcccccggtcgagagtgtttgccagctgtgcgaaggaggatgggtgtcatgagcgggacgacgataccacctctgtgaactcggacaggtctgaagaggtgttcgacatgaccaaggggaacctgaccctgctggagaaagccatcgctttggaaacggaaagagcaaaggccatgagggagaagatggccatggaagctgggaggagggacaatatgaggtcatatgaggaccagtctccgagacaacttcccggggaggacagaaagcctaaatccagtgacagccatgtcaaaaagccatactatggtaaagatccctcaagaacagaaaagaaagagagcaagtgtccaacccccgggtgtgatggaaccggccacgtaactgggctgtacccacatcaccgcagcctgtccggatgcccgcacaaagatagggtccctccagaaatccttgccatgcatgaaagtgtcctcaagtgccccactccgggctgcacggggcgcgggcatgtcaacagcaacaggaactcccaccgaagcctctccggatgcccgatcgctgcagcagagaaactggccaaggcacaggaaaagcaccagagctgcgacgtgtccaagtccagccaggcctcggaccgcgtgctcaggccaatgtgctttgtgaagcagctggagattcctcagtatggctacagaaacaatgtccccacaactacgccgcgttccaacctggccaaggagctcgagaaatattccaagacctcgtttgaatacaacagttacgacaaccatacttatggcaagcgagccatagctcccaaggtgcaaaccagggatatatcccccaaaggatatgatgatgcgaagcggtactgcaaggaccccagccccagcagcagcagcaccagcagctacgcgcccagcagcagcagcaacctgagctgcggcgggggcagcagcgccagcagcacgtgcagcaagagcagcttcgactacacgcacgacatggaggcggcccacatggcggccaccgccatcctcaacctgtccacgcgctgccgcgagatgccgcagaacctgagcaccaagccgcaggacctgtgcgccacgcggaaccctgacatggaggtggatgagaacgggaccctggacctcagcatgaacaagcagaggccgcgggacagctgctgccccatcctgacccctctggagcccatgtccccccagcaacaggcagtgatgaacaaccggtgtttccagctgggcgagggcgactgctgggacttgcccgtagactacaccaaaatgaaaccccggaggatagacgaggacgagtccaaagacattactccagaagacttggacccattccaggaggctctagaagaaagacggtatcccggggaggtgaccatcccaagtcccaaacccaagtaccctcagtgcaaggagagcaaaaaggacttaataactctgtctggnctgccccctggcggacaaaagcattcgaagtatgctggccaccagctcccaagaactcaagtgccccacgcctggctgtgatggttctggacatatcaccggcaattatgcttctcatcggagcctttcaggttgcccaagagcaaagaaaagtggtatcaggatagcacagagcaaagaagataaagaagatcaagaacccatcaggtgtccggtccccgggtgcgacggccagggccacatcactgggaagtacgcgtcccatcgcagcgcctccgggtgccccttggcggccaagaggcagaaagacgggtacctgaatggctcccagttctcctggaagtcggtcaagacggaaggcatgtcctgccccacgccagggtgcgacggctcaggccacgtcagcggcagcttcctcacacaccgcagcttgtcaggatgcccgagagccacgtcagcgatgaagaaggcaaagctttctggagagcagatgctgaccatcaaacagcgggccagcaacggtatagaaaatgatgaagaaatcaaacagttagatgaagaaatcaaggagctaaatgaatccaattcccagatggaagccgatatgattaaactcagaactcagattaccacgatggagagcaacctgaagaccatcgaagaggagaacaaagtgattgagcagcagaacgagtctctcctccacgagctggcgaacctgagccagtctctgatccacagcctggctaacatccagctgccgcacatggatccaatcaatgaacaaaattttgatgcttacgtgactactttgacggaaatgtatacaaatcaagatcgttatcagagtccagaaaataaagccctactggaaaatataaagcaggctgtgagaggaattcaattcaggtctgaacagctgctgtag

SEQ ID NO: 136297 - DNA, 1558 bp, Homo sapiens
ggtagaagcaggtctgaagggcttgaaggttgaccagcaagtgaagaattcaactcccttcatggcagaacacctagaagagaccttgagtgccgtaaccaacaatcgacaactgaagaaagacggagacatgactgcgttcaacaagctagtgagcacaatgaaggcaagtgggactttgccttctcagcccaaagtcagccgaaaccttgaaagccatttgatgtcccctgctgagattccaggccagcctgtccctaagaacatactgcaggaacttctgggtcaaccagttcagagacctgcttcttccaatcttctgagtggccttatggggagcttggagcctacaacatctttactgggccaaagagcaccctctcctcccttgtcacaggtgtttcaaactcgagcagcctcagctgactaccttcgcccaagaataccatcaccaattggtttcacaccagggaccacagcagctactcggagatccattccaaggcatgcgcaaacccatgagccccatcacagcccagcagatgagccagctggagttgcaacaggcagctttagaagggctggccttgccacatgaccttgctgtacaggcagcaaacttctaccagcctgggttttggcaaaccacaggtgggacagaaccagagatgggattcagaaacagggcaacagcgagtgaccaagttcaccaggcacccgtgcattcgaggggaattcctcttcccctgcccctgctgcctccatcacaagcatgctttctccttcctttacccctacctcagtgattcgtaagatgtacgagagcaaagagaaaagcaaggaggagccagcatctggaaaagcagctcttggtgacagtaaagaggatactcagaaggccagtgaagaaaacctcctgtcatccagctctgtacccagcgccgaccgagactacttctcccactacaaattccaaactgtcaggcattacagagggtcttcgtgttccaccccacttgtcccaggggcaaccgtttacacccaaagaacaagattattcggaccttaaaggcaactgggggaggaaaaacacccactttgggcattccccagtttccttacaacactttttcttccgccctgttccaccaagttcccctttgtcccccatggtccctaatggttaaggcctgctcaccaagcttcacccagggtttggtacagaggatgctggcccagggagtacatccacagcatcttccaagtttgctccaaactggtgtgcttcctcctgggatggacttgagtcatttacagggaatatctggccccatcctgggtcagcccttttaccctttaactagtcgctagttcaccctctcttaaaccctcgtcctgggaacacctctgcatctggcaatggtgcaacagcagctaacagcgctcagttcttgcatcctccaggctctggtttcccatggcagcagctgttcagcgtttcaggacaacccctcagaaacgtgcccagccggtcaggcctgcccacatgcacttccag

SEQ ID NO: 136298 - DNA, 2769 bp, Homo sapiens
tttttttttcattcacacacttagtcatatgcaattttaatcaaccaaaagaaaatcccaaatgtacaagtgaaaaaaatccaaactgttgacacaggcctaactaatatcagctacttttatgtacagctgtatagttcaaaaaagctatccttatatgtatatacaaaagttcgtttataccccaggtctgtacataagggtctatacattttatttcctcagaacccttaaggtgccacctcttggtgaggacaccaacacttcatttcacatatcttacaaaaaagaaagaccatttccaggattgggcaacattggtgcatcctgtattcagacaatggtacactccactccgactgggttaaggatccttccatcataaatgcgggaccacaccaggatggcatgggggttccaccaaaacagctttcacacagagtggctccaaagtaaaagcccataaaccaacccgaggatgaaggcagggtcctgcccagtgtgccaccacaggtccggggcttaggttgaggtttgcctgccctggttcactgtcggtattccaattcatcttacactggataactttgggcggggcatgggaggggcaggggtttgctgtagcacattttgaggccaaaccttttggcaaggcccacaggggagctgctcctctggctggggcgatgctccacctgggagtgcatgtggggcaggcctgaccggctgggcacgttctgaggggttgtctgaacgctgacagctgctgcatgggaaccagagcctggaggatgcagaactgagcgctgtagctgctgttgcaccattgccagatgcagaggtgttccaggacgagggtttaagagagggtgactagcagcaggtaaagggtaaaagggctgacccaggatggggccagatattccctgtaaatgactcaagtccatcccaggaggaagcacactgtcacacagaaccttctcactgacacagaaccatagtccagagaagctagtggtcttgcccagggctttgtatagaatatcaggctggtcagcgctcaggcccatgttttctccatcacatactttcttgagcagtgcccttaacagctctgcagtaccttcactggccttctgagtatcctctttactgtcaccaagagctgcttttccagatgctggctcctccttgcttttctctttgctctcgtacatcttacgaatcactgaggtaggggtaaaggaaggagaaagcatgcttgtgatggaggcagcaggggcaggggaagaggaattccctcgatgcacgggtgctggtgacttggtcactcgctgttgcctgtttctgaatccatctctggttctgtccacctgtggtttgccaaaaccgaggctggtagaagtttgctgcctgtacagcaaggtcatgtggcaaggccagcccttctaaagctgcctgttgcaactccagctggctcatctggctgactttgggctgagaaggcaaagtcccacttgccttcattgtgctcactagcttgttgaacgcagtcatgtctccgtctttcttcagttgtcgattgttggttacggcactcaaggtctcttctaggtgttctgccatgaagggagttgaattcttcacttgctggtcaaccttcaagcccttcagacctgcttctacctcctccactgaaagcacaacccctgaatgtgagctttctttaagtttttctttatttgcagaaaggctggaaagaagaggtttcaaatccactttggctttctgtagcatttctaaaatatccactttattttcagcatggtcttccaatggtataggagcaaagtaattccccgagttctgtccaggagacaggatggcttgctccagacctgcaagtctctctagctcttcatgtggtgttgacccaagactgctggatcggcttcctgatctgctcgggttagagaaccacctactgaaccgactggcagagactgacccttctcccaaaacatcttctatcatcgaagccaagcatggcaccttatcaaggttaaagaactcattaaagtcaaagtctcctggggactgctcaggcaagacagcatcccttggcacttcctgatcagccgcaggctcctgtgcaaggatgacctccacttcatcctcttcggccactcctccattgcactctactataccttccttcacagaggctgtccgtcgccttgttctttttctccctttgtgatcttcttctagtatcttatcatcaaagccagtcagttcgatggtttcagactgacttgtgggtccagcagagaaccactctggttcttcttctgtgtaagaatcatttcttctacgctcaccaaagacacgcttactatctccaaactctctcctgaaacgcttgtccttgaagtccctctctcggtctctgtctctcaagtcccgcaggtccttatcgctaagacggtgatccttctcaaaggtccgggcagagattatcctcccactgccaatcctacgtccaccaagcagacgaagcccatcactatctttctctaatggacttcctgagcgccgggagctaacagcggctgtcacgtggcagccccctccaaagctccgtctctgagggctgagaacaacatctaagtcatcttctttcacacgctctcgtggatcttgtgatctgcccgccctggcctcccaaagtgctgggattacaggtgtgagccactgcacctggcccat

SEQ ID NO: 136299 - DNA, 443 bp, Homo sapiens
tccccctagactggggggccctgtaggctgctgttgaaggactgggtagagacattggagggaagggaagggcttttctccacacaagggcagagagtccgtctagatttcttgctgtcctgccagctctgcccatgcctgaggtggtcctacctctcacgggcaccctagctgctgacagcatccctgcctcttgtcacaaactgccccagcaagaatttgaggttctgacaacagtacccatcccccacagtaccccttcagctcagtttctagaaagctcccttttctttgaaatctgcatgttgaattgaactttgtgattttattttttgtttcaaaaaagtttaagaaaatggaaatgggcaacagtgagtgaagacatattttagcactgaatagaatatttttaaaattaaactatttgaaatatgaaaaaaaaa

SEQ ID NO: 136300 - DNA, 274 bp, Homo sapiens
ccattcttggctgtgacctggtccagctgggccctgaatgaatgtttgcttctcaggccagtattctcccctcctcaccaagccacctccacacagctctaaggaagctcccccaggtccaggcctcaggggagccctgccctcaggccgaccctactgccttttcagagccctccctgccctcctcggaagttgctgatgaacctcctaccctcaccaaggaagaaccagttccactagagacacaggtaagcaatcactttgagttttccag

SEQ ID NO: 136301 - DNA, 1753 bp, Homo sapiens
atgtgtgcagggaacctgtgcagctgggaggagcgctgggctgtggacgagaaggaagctacagacaagaaacctcacgtgggaggatttggacaaggtgccccggcccccgccgctcccgccgccgccatgtcgggccggtcggtccgggcggtgacccgcagccgtttttaggacgacatcaagaaggtgatggcggccatcgagaaagtgcggaaatgggagaagaagtgggtgactgtgggtgacacgtccctgaggatatttaagtgggttcctgtgacagacagcaaggagaaagaaaagtcaaaatcgaacagttcagcagcccgagaacctaatggctttccttctgatgcctcagccaattcctctctccttcttgaattccaggacgaaaacagcaaaccagagtttccgtgtctgacgtctatcagcttaaggtggacagcagcaccaactcaagccccaagccccccaagcagagtgagtccctgagcccagcacacacctccgacttccgcacggactgactcccagcccccaacgctgggccagggagatcctgggaggagccctcccttgcccttcctcggaagttgctgatgaacctcctactctcaccaagggaagaaccagtttccacttagagacacaggtcgttgaggaacgaggaagactcaggtgccccgcccctgaagcgcttctgtgtgggaccaacccacagtgccgcagacgggttcagaaaagctagcaccatcccggccctccgctttctgggccctgcctctatttattgcattctggttctggccgcgccgcgtttgctgggggtaaagggcaagcactggggtcaagagcctgcacacatgagccttccgggctggaagggtggcgtaggacttggggctgtagcatcatcttcctgaccctggcacctgtgtctacttgctcccgagaagaggaaccgctcatgtcttttttggcaccccaagttgggctgggagcatcggccaccccaagattcatctgtgacctccaggcagcagtctcttgctccagaatctctggacggagcttgctgggcagtttcttgcgagaagagagagatgttggaagggcacctttttaggaagagagcgtgcctcaggttacttgaacttgaacggagatttaagattcccggatttttcccctaggactgggggccctgtaggctgctgttggaggactgggtagagacattggagggaagggaagggcttttctccacacaagggcagagagtccgtctagatttcttgctgtcctgccagctctgccccatgccctgaggtggtcctaacctctcaaggggcaacccctaactggctggacaagcccttttgtgggccgccgttcccccatcccctgccctcagcacacacatctggcacacacggcagcttttggttctcacctctacctgtcattccagcatccctgcctcttgtcacaaactgccccccagccaagaatttgaggttctgacaacaggtacccatccccccacagtaccccctcaggctcagtttctagaaagctcccttttctttgaaatctgcatgttgaattgaactttgtgattttatttttttgtttcaaaaaagtttaagaaaatggaaatgggcaacagtgagtgaagacatattttagcactgaatagaatatttttaaaattaaactatttgcaaatatgaaaaaaaaaaaaaaa

SEQ ID NO: 136302 - DNA, 524 bp, Homo sapiens
gtccttcccaaagctttagaggcagaaggaagtatcactatggagcctgggtaggttggcacagagaggtgggaacgcggtgcggagggctggggtgtcccctagttgctaagggatcctcatggtccttccaccccacccccaccccaggatcccccatccctgactgcttggccgcccacctgctcggccttcagggtaagttcgataaagatttgctgcagcttctcattgcacgaagttgatgcaaaactgctcgaagccatttttctggaagatctcgaagccgtaaatgtccagcacaccgatgctgtactcttcctggggtttctgcatagcacggttgatggcctccacgaggaagtcgaagaggcgggcatagagcccttggccagggcatcacgggtgtaggctgcctgctccacgttgagggtcacattgatggactcgctgcgcccgcaccagcgcatgtccatcttgcggctggtcagcttctcctgcagtcgcccgctgtcaatgcccaa

SEQ ID NO: 136303 - DNA, 727 bp, Homo sapiens
cccctgggctccttcgcctgctgcagctggtgtctacctgcgtggccttctcgctggggctagcgtgggcgcctggacggggtccatgggcaactggtccatgttccctggtgcttctgcttctccgtgaccctgatcatcctcatcgtggagcttgcgggctccaggcccgcttccccctgtcttggcgcaacttccccatcacttcgcctgctatgcggccctcttctgcctctcggcctccatcatctacccaccacctatgtccagttcctgtcccacggccgttcgcgggaccacgcatcgccgccaccttcttctcctgcatcgcgtgtgtggcttacgccaccgagtggcctggacccgggcccggcccggcgagatcactggctatatggccccgtacccgggctgctgaaggtgctggagaccttcgttgcctgcatcatttcgcgttcatcagcgaccccaacctgtaccagcaccagccggccctgggtggtgcgtggcgcttcctgtcggggctggccttgctgtctgtcctcctctatgccaccgccttgttctctggcccctctaccagttcgatgagaagtatggcggccagctcggcgctcgagagatgtaagctgcagccgcagccatgcctactacgttgtgcctgggaccgccgactggctgtggccatcctgacggccatcaaccactggcgtatgtggctgacctg

SEQ ID NO: 136304 - DNA, 354 bp, Homo sapiens
cttcctgtcggggctggccttgctgtctgtcctcctctatgccaccgccttgttctctggcccctctaccagttcgatgagaagtatggcggccagctcggcgctcgagagatgtaagctgcagccgcagccatgcctactacgttgtgcctgggaccgccgactggctgtggccatcctgacggccatcaaccactggcgtatgtggctgacctgtcacctggaggtggctggaaggccagtggactccacatttagggagagtgttacaagaggactcggattcccccaccttcccttcggctttgggaatccaggaaacccgccccgaacccctgaaaagtcccagagaag

SEQ ID NO: 136305 - DNA, 1180 bp, Homo sapiens
atgggtaccaacgatggaaagatcaaagactttaagactttcactatttcttctaccgctatctactacgaacttcaaagacgaaccagaagccccactctgtgcctcggctcttcgtttgtggtgctgaacgtcatctacgtcatctacgccatctacgtaatcaacacaataaagacgcctgccgggaacgcggcccttcggctgaatcccttcggtggttccaaggccactgccagaggatgcggacgggaaccacgcttgaggggcggcagtctgcccgcgcgagacgcccccgcggactacaccgcggcggcaaagccaaacgcaaaaactacctcaccgcgcgcaggcgcctcccccaggaccaacatggccacgacgcaaggcctcgacctgaggggcgtggcctggccgccgccagccaacgggtgtgcgcgcctggccgcagccaataggaaggcagcgcgggctcgggcgcagggagccgccgccggggctgtaggcgccaaggccatgtccgactcgtgggtcccgaactccgcctcgggccaggacccagggggccgccggagggcctgggccgagctgctggcgggaagggtcaagagggaaaaatataatcctgaaagggcacagaaattaaaggaatcagctgtgcgcctcctgcgaagccatcaggacctgaatgcccttttgcttgaggtagaaggtccactgtgtaaaaaattgtctctcagcaaagtgattgactgtgacagttctgaggcctatgctaatcattctagttcatttataggttgcccaccgtttctcactttattgaatgcagaccagtggctggttgctcaggagaatggtggctgcctgcaggctgttagtgaggttccacttggtggcctgcggactgagcacagctgtgactgcacctgcccaccaggtgcatggcagaatgttgggaaatccctgcctaattttatcacaaccatcaatagttctttgttgcttgaagcggtgtggcatcttcacgtacaaggcattgtgagcctgcaagagctgctggaaagccatcccgacatgcatgctgtgggatcgtggctcttcaggaatctgtgctgcctttgtgaacagatggaagcatcctgccagcatgctgacgtcgccagggccatgctttctg

SEQ ID NO: 136306 - DNA, 912 bp, Homo sapiens
atggaaaacttccagctgcggaagggcctccaggagccaaggcagtacctggccctcagaacaccggactactattatactctcgccgtatcgtacactgaccaggtggacggcacggacgacagaacgacttcgctgcccctggaggcaggttggaggccaggattcacggcacagtttctgccccgttgtaccacagagtgctatgcaggttattgggatcccgcccagcatcagcagctggtcctgcagctcgtggcggggatcttgcacctggggaacacagtttctgtgaagacgggaattacgcccgagtggagagtgtggaccgtagtgccatcaaccgtgctatgcaaaaccccaggaagagtacagcatcggtgtgctggacatttacggcttcggatcttccagcccagggtgtccacaagaacttccagcaccaggacattgagggaagacccttttcctccttctgcagaaaaatggcttcgagcagttttgcatcacttcgtcaatgagaagctgcagcaaatctttatcgaacttaccctgaagccgagcaggaggagtatgtcaggaaggcatccgctggactccaatccagtacttcaacaacaaggtcgctgtgacctcatcgaaaacaagctgagccccccaggcatcatgagcgtcttggacgacgtgtgcccaccatgcacgccacgggcgggggagcagaccagacactgctgcagaactgcaggcggctgtggggacccacgagcatttcaacagctggagcgccgcttcgtcatccaccactacgctggcaagactcacagacctcttcctggcttgacccccacaggcaactctactaatgcccgaaacattgtcatggacacgcagcagcgaacaggcaacaactag

SEQ ID NO: 136307 - DNA, 443 bp, Homo sapiens
tttcgttgagaagtatggcggccagcctcggcgctcgagagatgtaagctgcagccgcagccatgcctactacgtgtgtgcctgggaccgccgactggctgtggccatcctgacggccatcaacctactggcgtatgtggctgacctggtgcactctgcccacctggtttttgtcaaggtctaagactctcccaagaggctcccgttccctctccaacctctttgttcttcttgcccgagttttctttatggagtacttctttcctccgcctttcctctgttttcctcttcctgtctcccctccctcccacctttttctttccttcccaattccttgcactctaaccagttcttggatgcatcttcttccttccctttcctcttgctgattccttcctgtgttgttttgttagaaacacatcctgttttcaccccaatgtatt

SEQ ID NO: 136308 - DNA, 1615 bp, Homo sapiens
ttacatgacgggcacaggcactgggctggtggggctgcgggcatccgggtgcacgaagtcggggttcacgtaggtgaagccctggaaatcggcctggtcgatgctggccaggactaggcggtctggaggggtcagcgctggcgccgcccgcgtgaagaacttgtcaaagttctcgccgctgcggccacacgggcggggtctgaaaggaggcgggatctccaatcgttccagccgctcccagtcaatccagcggaaaaagccatgtgcacggatggtaggttccccatcaggccctgagcccaggcgcttccctgggtgcttggtcaggaaccccttgcagatggccacggcttcccgggaaagcgacttggggtaggtgacagtttgttccatgatggcctgaaacagctcctcctcgtcctccccatcgaaagggaggctgtcctgccaacatctcatacagcagaactccaaaggaccaccaatcgacagacttcccatagggctggtaggcaatgatctccggggctatgtagtccggggttcccgcagaaggtgcgggttgtcgtcccggggaagacgttctccttacacatgccaaagtcagtgatcttgatgtgtccctcagcatccagcatcacattgtccagcttcaggtccctgtagatgatgccctgattgtgaaggaagaagaggccgatagcgatttctgccgcgtagaacgctgcatggggctccttaaacttgcccagctgttgaatgtggtacatcaagtctcccccggtgacgtactccatcacgaaatacaggcggtccggggtctggaaggtggagtggagctgggtgaggaagtggggccggccgccaggaccccggccccccagcgccagcacacgtttctccaccagcgtgcagtccacatcgtcgtcctggacgatcacgtcctttttcaagatcttgatggcgtagagctcatcagagcccctgcgctcggccagcatcaccttcccaaaactgccttttcctagaaccatgaggaagctgaagtcggagatgtgcaggcgtcctggactcgccccgaagaagcagcgcttggggtcggtgggactaggggaaggggaggggatgggagaggaagaggggcccatccgcacccgctcatacaattccagggggtagttacaagcctcaaacttctggaggaggctgcagttgtcagcatcggccaccggcacattgtaatactcgccctcctcctggttcagtaacttgtaccagccatccacgggcgccttgagcagctccgagacgccaaaggacatggcccccatgaagtcgttgcgggaggtccggtcccagtcccacacctccacgctgagccggcgctccacatcccctggcttcaggttgaacacaaaggtctcattccacacagggtttagcgtggctttcaccgttcgggtcttctgtttcgtcaggttccgagggtctgggatgagcttcagtttcacatagggatcagagagaccattggggtccataggaattaggttacgggcctcgccaacagttacgtggatctcatctgctgtgggagcccggatctccagctgca

SEQ ID NO: 136309 - DNA, 2567 bp, Homo sapiens
  misc_feature (1)...(2567): n = a,t,c or g
ggacctgaagctggacaatgtgatgctggatgctgagggaccatcaagatcactgactttggcatgtgtaaggagaacgtcttccccgggcgacaacccgcaccttctgcgggaccccggactacatagccccggagcctcctcagttgtcggccctggaagtgcccagcggcggcagcgccagacgcgccccgttagctcagcgtcgctagcatccgcagccgccaccaggccccgcccagcggccgcagccagccagccgcgcccgggacgactgcagagcgcgccctccaaccccacccagccctcagacccttcagctgccgctgtcgtctttgcttcagccgcagtcagccactggctgccgaggcgttcgatccctagagggaggagcctgtccaaacggacgctaacggcctacctccccttcagggtgctcttacagcctgttccaaagtgtggcttaatccgtctccaccaccagatctttctccgtggattcctctgctaagaccgctgccatgccagtgacggtaacccgcaccacccatcacaaccacccggacgtcatattcggggcctggggtcccccatgatcgtggggtcccctctgggccctgacacagcccctgggtctccttcngcctgctgcagctgggtgtctacctgcgtggccttctcgctggtggctagcgtgggcgcctggacggggtccatgggcaactggtccatgttcacctggtgcttctgcttctccgtgaccctgatcatcctcatcgtggagctgtgcggggctccaggcccttttcccccctggtcttggcgcaaatttccccatcaaccttcgcctgctatgcggccctcttctgcctctcggcctccatcatctaccccaccacctatgtccagttcctgtcccacggccgtttcgcgggaccacgccatcgccgccaccttcttctcctgcatcgcgtgtggttgttaacgccaccgaagtggcctggacccgggcccggcccggcgagatcactggctatatggccaccgtacccgggctgctgaaggtgctggagaccttcgttgcctgcatcatcttcgcgttcatcagcgaccccaacctgtaccagcactcagccggccctggagtggtgcgtggcggtgtacgccatctgcttcatcctagcggccatcgccatcctgctgaacctgggggagtgcaccaacgtgctacccatccccttccccagcttcctgtcggcgctggccttgctgtctgtcctcctctatgccaccgcccttgttctctggcccctctaccagttcgatgagaagtatggcggccagcctcggcgctcgagagatgtaagctgcagccgcaggcatgcctactacgtgggtgcctgggaccgccgactggctgaggccatcctgacggccatcaacctactggcgccatcaaccgtgctatgcagaaccccaggaagagtacagcatcggtgtgctggacatttacggcttcgagtcttccagggtggccacaagaacttccagcaccaggacattgagggaagacccttttcctccttctgcagaaaaatggcttcgagcagttttgcatcacttcgtcaatgagaagctgcagcaaatctttatcgaacttaccctgaagccgagcaggtgggcggccaagcagtcagggatgggggatcctgggatcaaagactttaagactttcactatttcttctaccgctatctactacaaacttcaaagaggaaccaggaggacaagaggagcatgaaagtgaaggagagtgtcacctggaggtggctggaaggccagtggactccacatttaggagagtggttacaagaggactcggattcccccaccttcccttcggctttgggaatcccaggaaacccgccccgaacccctgaaaagtcccagagaagaaaggcaggatccggtccctgctacgtttctggggccatggctggtctgggccccggcgtagcgattcagaggggggaccccggcccctgttttgcagaaagggggctctgggcagaaggtggtccacgaagtcaagagccacaagttcaccgctcgcttcttcaagcagcccaccttctgcagccactgcaccgacttcatctggggtatcgaaagcagggcctgcaatgtcaagaaagtttcgggttccattcggttctcccaccgaccccgcgtgggtctcagcagctcgggcggcgggaggagccgcagccgccaggcagccagcttcgccaaggctctcggcagccgcggcccgcagacagccggcacgcgccctctccgccaccaggatgcccaagaggcagatggagctgctcaccctgtgggcctcaaatgtggagcactattcgatgtccaagtggaaagtgctgcgacatttgagcgtcaccggtgacgccatatcaacggatgccgtggagctcggtcttctgcaggaactaaagagccgtggtttcgattcccagccggaaactgtcttgggtacaggtcccttacacgtctggctgtaa

SEQ ID NO: 136310 - DNA, 446 bp, Homo sapiens
  misc_feature (1)...(446): n = a,t,c or g
ncaggaagtagtacaagcaggggcggcttgccagactgagtgggatacttggttttctggctctccgtaaacagtggctgggacagcaggagcctgatgcaccagggtgagtgtggcagaaaaaacaagcgtttgtctctttgggttgtattgggagtcattgagcatctctagcagctgtgagagctcagcaaaatggcctttctcaaccatccggtcagcctcatccactaccaggcacctgagctgccgaaggttcctcaaatgataatgcttttctttaattaattcccacagccggcctggagtagcaaccacaatctcaggacgacggttcagcatcctctgctgtttctgcgtggacattccaccaaccaaaatagcagttttaattcctgtaaacctggccacagannnnnnnnaagaatggcgtagcaagggcaaat

SEQ ID NO: 136311 - DNA, 256 bp, Homo sapiens
gagaagacgacagaagggaggaaaagctgaccagcaagaagaacgtcggagacaaaagcagatgaaggttctgaagaaggagctgcgccacctgctgtcccagccactgtttacggagagccagaaaaccaagtatcccactcagtctggcaagccgcccctgcttgtgtctgccccaagtaagagcgagtctgctttgagctgtctcttccactcacacccatagcgggagagacctcatgcagatttgcatttg

SEQ ID NO: 136312 - DNA, 1632 bp, Homo sapiens
ctgggtgttctcgtatttcaggtatctaatcagcctgcctgggagcggcaaggtgtctaggagttttatacggtatttcccaatggcctttcgaacccgcagtcggcaaaggtgagccagaggtcttggaggttctgccttctccttgatgacggcccagtcctcaaagctgtcgatgtgttccttcagccgcgagcagagctgcacgttgcccacgtagtccaggaggacatcgatgatgggccccgcccagcggctcacctctggggcagatacgaactcacagaactgcaccacgctgggctccttgtcggccgcgggcgcgtcgttgaacctgctggagggctgcggggccggcgggtgcgggccgttgccgtagagtgagaagcagggctcgccgtcgcagcccaggtccatgaggaacttgagcagcgacaggcacttcatggcgaacatgatggtggcggggaaggcggtggggtgcgtggcgatataggcgtcgatgttcgcgccgtggtccagcagcagctgcattgtgcgcaggcagccgtggcggatggccacgagcaaggggctgatgacgtcgcggttggggtcggcgccgtgttgcagcagcagctcggtggcgtacacgttgttgttgaccaccgcgaagtacagcgcggagctgcgccggtcttcgtagaggcgcgcgcgctcgggcgccagcggcgtgttcacgtcgaagcgcgcgctcagcagcgcctccagcacctcgtcgtggttgcgctcggccgccaggtgcagcggactgacgccgctacggcgtatgcgcgtgcggctggtcaccggcagcagcatctgcacgatcctgtagttgcccttcttggaggcgatgtgcagcgggagcaagccgtccttgttggtcttgttggcgtcggcaccctgtgacagcagaaactccaccacctcctcatgctcattcttgcaggcctcgtagagggcagacgcgttgtcgctggcctgcgtgttgatgtcagcaccgtacttggctaagaacctcaaggcctccaactgtccactctgggcggccacgaacaagggtgtgccgtaggcattcttggattccaccttggctcctccgctcaccaggatctgcatgacctccaggtcattgcgagacacagactcgtgcagagcggtccagccgcggttgcagcggtggttggtgtctgcgttgtgctgcaccagaatcttcacggcctccgcgttcttgcgctcacaggctttgtagagcggtgtctctcgggatttgttggagatgtccggctctgcccctgcttggagcagtgacaggagacagtccaggtggcccctgcacgttgccaagtaaacggctgtttcctcctgcagggtgcgctggtcgatggtccctgggtacgctcgctgcaggactttcaggcagcccacctggccatagtatgcggcctcgtgcagcggcagccagccctccttgttgggctctgcgagattcttcccttccttgatcatggtcttcaaggcctcttcatcgccatccttgatggcctttatcaaggggtccgcaggcgccagctgggaggtcttgaacaagctgctgctgtatttctgcat

SEQ ID NO: 136313 - DNA, 2016 bp, Homo sapiens
ttactgggtgttctcgtatttcaggtatctaatcagcctgcctgggagcggcaaggtgtctaggagttttatacggtatttcccaatggcctttcgaacccgcagtcggcaaaggtgagccagaggtcttggaggttctgccttctccttgatgacggcccagtcctcaaagctgtcgatgtgttccttcagccgcgagcagagctgcacgttgcccacgtagtccaggaggacatcgatgatgggccccgcccagcggctcacctctggggcagatacgaactcacagaactgcaccacgctgggctccttgtcggccgcgggcgcgtcgttgaacctgctggagggctgcggggccggcgggtgcgggccgttgccgtagaggcatgagaagcagggctcgccgtcgcagcccaggtccatgaggaacttgagcagcgacaggcacttcatggcgaacatgatggtggcggggaaggcggtggggtgcgtggcgatataggcgtcgatgttcgcgccgtggtccagcagcagctgcattgtgcgcaggcagccgtggcggatggccacgagcaaggggcaccgcgaagtacagcgcggagtgcgccggtcttcgtagaggcgcgcgcgctcgggggccagcggcgtgttcacgtcgaagcgcgcgctcagcagcgcctccagcacctcgtcgtggttgcgctcggccgccaggtgcagcggactgacgccgctacggcgtatgcgcgtgcggctggtcaccggcagcagcatctgcacgatccttggcttccttctctgtaaaaccagggcctgaattagatcaatggtccctgcagctatagacaggctgtatctgatttgctcagggagcttttcaaagagacagtggggctccttctctcctggagattctgattcaccggatctgtagttgcccttcttggaggcgatgtgcagcgggagcaagccgtccttgttggtcttgttggcgtcggcaccctgtgacagcagaaactccaccacctcctcatgctcattcttgcaggcctcgtagagggcagacgcgttgtcgctggcctgcgtgttgatgtcagcaccgtacttggctaagaacctcaaggcctccaactgtccactctgggcggccacgaacaagggggtgatgccgtaggcgttcttggattccaccttggctcctccgctcaccaggatctgcatgacctccaggtcattgcgagacacagactcgtgcagagcggtccagccgcggttgcagcggtggttggtgtctgcattgtgctgcaccagaatcttcacggcctccgcgttcttgcgctcgcaggctgtgctcagggggaagcagggatggtcagcagggcctttgtagagcggtgtctctcgggatttgttggagatgtccggctctgcccctgcttggagcagtgacaggagacagtccaggtggcccctgcacgttgccaagtaaacggctgtttcctcctgcagggtgcgctggtcgatggtccctgggtacgctcgctgcaggactttcaggcagcccacctggccatagtatgcggcctcgtgcagcggcagccagccctccttgttgggctctgcgagattcttcccttccttgatcatggtcttcaaggcctcttcatcgccatccttgatggcctttatcaaggggtccgcaggcgccagctgggaggtcttgaacaagctgctgctgtatttctgcatgaccccttggaacaagcccattggggcccgggccggcgaactctcaggaggtgcagtggacctggtccatgggtagaaatgggcaggttggcggttggtacatgcagacgcggtggcctcagcagtggttgggccccttgtcttgtccgctaggctctgctcgatggccatctgcaccagttcatcctcgctcaggctgctgtacaggctgtactcctcctgcccaatggtacactggctgccccgagtgctgatctgcgtggccat

SEQ ID NO: 136314 - DNA, 890 bp, Homo sapiens
attcggcaccatgggagcggtcgggtgtattctccgccgcccccacgccctcgaggtccccgccaccgaaccagcggcggacgcgccgcgcctcccgcggcattcccgcaaccggatcgctcctcgctggggcgggacctggcctggcggctctggtcactatgagtgaaacatctttcaacctaatatcagaaaaatgtgacattctatccattcttcagtggaccatcctgaaaacaggatttaccggaggaaaatcgaggaactcagcaaaaggttcaccgccatccgcaagaccaaaggggatgggaactgcttctacagggccttgggctattccatacctggagtccctgctggggaagagcagggagatcttcaagttcaaagaacgcgtactgcagaccccaaatgaccttctggctgctggctttgaggagcacaagttcagaaacttcttcaatgctctgagggccgggcgggcgcagttttacagtgtggtggaactggtagagaaggatggctcagtgtccagcctgctgaaggtgttcaacgaccagagtgcctcggaccacatcgtgcagttcctgcgcctgctcacgtcggccttcatcaggaaccgagcagacttcttccggcacttcattgatgaggagatggacatcaaagacttctgcactcacgaagtagagcccatggccacggagtgtgaccacatccagatcacggcgttgtcgcaggccctgagcattgccctgcaagtggagtacgtggacgagatggataccgccctgaaccaccacgtgttccctgaggccgccaccccttccgtttacctgctctataaaacatcccactacaacatcctttatgcagccgataaacattga

SEQ ID NO: 136315 - DNA, 4116 bp, Homo sapiens
tcaatgccctgtctccggggtggcccgggggcgctggggcgctgggggtccgaggggacgggggcggcttccgtggggggcttcggggcttccgggtgggggaatcggttggtcccggtctctgtttttgggggaccgtggggggagtcggctggggggctcgcctgccgtccgggtgggtgtcgtggggcttggtgtggggggctctgtgcgtgccgggcctctcgggcgggtggtcattcgtgatgtgcaggctgcgggtgtagggcgggcccggtgccggtgcgtaccgtcgatcggctgacgcgttgggggcgagcaggtctcagggcggcgcccccgttccgaggtccgcgtgggatttcggcgacgccgatcggcggcgggccacgcgatcccgggcgggtgtactgtgggtcgtagggggatgccgcggaatatgggggatggcggcccggtgttgagcacgagcttgagcgggcgagaaaagtcgcgcgctcggggacattggatacgctccggctgggcagctcggttgaggacgttgtgccacgcccaggccccggtggcggggtcatcagtgcgatcccccgccaggcgacgtgtgcgtggcgtggagggagatgcagctgcgaaataaaaaacgccgccgttgacctgggcaatctgattaaaccgctttcttaccgccccgaattcgctgcccgacccgtggtgctgaccacggaagaggccgtaattttctgttgtaacgttctggcgcaacaaatttttggtttgcgctggagatgatgaatgagcagccgctggaaggcgcggtacgcgaaaaagcgttgcacaccatgcgcgagcagacccagcggatggaaggactggtgaagcaattgtgacgctgtcgaaaatagaagccgcaccgacgcatttgctcaatgaaaaggttgatgtgccgatgatctgcgcgttgttgagcgcgaggctcagactctggtctataacgccgtgaatcatacgccggaaggcacgcatatcaccgtacgctggcagcgagtgccgcacggtgccgaatttagcgttgaagagtaaagcgagggctggccagtcccagtgcccaaaccacacagagccgttgttggtgcaaatgcccacatttctttctgtccccctcaggaactcagcaaaaggttcaccgccatccgcaagaccaaaggggatgggaactgcttctacagggccttgggctattcctacctggagtccctgctcccagatgctttccagcctctgcttccaccacaggcctgggtcagcccaggtgagtcgcagggagcaggtattcgtgacccactctggccagtcccagtgcccaaaccacacagagccgttgttggtgcaaatgcccacatttctttctgtccccctcaggaactcagcaaaaggttcaccgccatccgcaagaccaaaggggatgggaactgcttctacagggccttgggctattcctacctggagtccctgctcccagatgctttccagcctctgcttccaccacaggcctgggtcagcccaggtgagtcgcagggagcaggtactcgtgacccactttggctgtggctgttccggctgtggctccttcggcttctttgtcttcttcttcttctgcttggagagacagctcaaagcagactcgctcttacttggggcagacacaagcaggggcggcttgccagactgagtgggatacttggttttctggctctccgtaaacagtggctgggacagcaggtggcgcagctccttcttcagaaccttcatctgcttttgctccgatgggcaggtttgggtgttatcgtatttcaggtatctaatcagcctgcctgggagagaacaggtgtctaggagttttatacggtatttcccaatggcctttcgaacccgcagtcggcaaaggtgagccagaggtcttggaggttcctggatggcggccacggccaacaaatgctctgctaacagctgtaacgattgatggttgaggttgagggtggataatgttttggggggttggggtaaacgcaggtggttaggggatcgggggaaagcgctttccaccagcgtttttggttgggccaaaacccaggaaggcaaattgccgcaaaaaaagggaatcaagggcgaccacgaaatggttgaatccccatactctcgggactcaaggcgcagcgcgtgcgggctgagcagcgcggttcgtgcagacagcccagcctcggagcgaacgacgtacagcgcacctgaggtacctacagcgtgaggcttcacagttctatggtgcgatgttgtcgcgtcgcgggctgtttttgcgtgctgttgtgctcgccgtctgtctggcttgccttgcgtgcgctccgtgtctcccgtgggggttgcttgtgtgtggtgctccgtgtgcttttgtgcatgccggtgtgctggtgcttccctttccctccgtgcgcgggggttgtcctgtgccgctcctcggcggcgctgtttttcctgtggtggtttcggcgtttgtttgccgtcgtgtgtgtttctctggggttccgcgtttggggccgcgcttttgttcctggggcatgtcctctcccgtgtgtgctctcgtgtgctcttggctgccgcttcttgtgccggcgtggtctggcctttccgtcgtgacttctgtcgtctgttcgtgtccagctcgtgtctcgctgggacttctttcggcgcgtcttgcggttccgttccgtgtcgttcgggtgtcgcgccgttcctgttgctgtttggtcgctgtgttcttcgctgcacactcttctctgtcgtgttcttgtgcggcgtcggctggcgtgcatctttttgttggcttttggttgccgccctggtcggtgccgcgtgagggttcttttgccgtgttgttcccccgtggtttacgctgggtggttgcttgcctttgcgctgcgcctggttggggatggctgttggttcggccggtaatacggcctggccccaggttttggctggctttccctgttggcgtgtccggttggcctgccgttgtgttggttgggaatcggcgtgttgctgcgttttggttcgcccgttgggtcttgcgggctgcgcggcgcgcgtggtgtttggcgcgtgtgcgttcgcctttctgcgcgcctgtgctgggtcggtgccccggtttggctcctgggctgggtgtccgttgtctcgggtgatgcgtctgtgtgggcacgtgttggacgtcgattcgcgtgcggctgactctatgctccctgtcgcgtgataatgtgtctgtgcctttcctggacttggccgtgtacgcgttggccgcttgtcagtgtctgctctgcgcatacgctgctgtgctgtgttgtgactgcgcgtggctgtgctgctgtcacctactggatgcgtatcgtgtcgcggcgaggtcttgtcgtgtgcactagtgagactcgatgcagactggaccgtgttcgtcgtcgtgagcgtgtcgtccgttcggccggcacagcgtccacaatgctgtgtgtctcctccgtctgcgcctgcagccaccttgtccatgctgcatggttggatctccagagggcgatagtcgtagagtcgatagtcacaaagattgtgactgggcgacgcatacacatgaggacgaatcatgaccaccatgcgcacaaacatcatcagcgctgatgacgacacagatgagccgcacacaatgacgctgacagcgatgataactgttctcacgtcgatgacgagactgacaactacaatgccgatgctgctacgcgcagactgagacacgatgatcttgagacacactgagcctgtaatatgcacacataagatgatacgatctacgatgagaacacaagcggttccagcattgatgacttcatgggatgcactccgtctgggacgtcggcggctgatggagcgtaaagtgagatcgacaacgcgtcgtgatgctagcttggtgtcgtagtcgagtcgtccattccctcttgatttcacgccctcggccgaaggacacgcgatcgcgacactcgtcagtcccagggcaagttgctgtacttcattgtaatgcat

SEQ ID NO: 136316 - DNA, 2492 bp, Homo sapiens
atgacatcagaaaacctggtccaaactgctccaaaaaagaagaaaaataaagggaaaaaagggttggagccttctcagagcactgctgccaaggtgcccaaaaaagcgaagacatggattcctgaagttcatgatcagaaagcagatgtgtcagcttggaaggacctgtttgttcccaggccggttctccgagcactcagctttctaggcttctctgcacccacaccaatccaagccctgaccttggcacctgccatccgtgacaaactggacatccttggggctgctgagacaggaagtgggaaaactcttgcctttgccatcccaatgattcatgcggtgttgcagtggcagaagaggaatgctgcccctcctccaagtaacaccgaagcaccacctggagagaccagaactgaggccggagctgagactagatcaccaggcaaggctgaagctgagtctgatgcattgcctgacgatactgtaattgagagtgaagcactgcccagtgatattgcagccgaggccagagccaagactggaggcactgtctcagaccaggcgttgctctttggtgacgatgatgctggtgaagggccttcttccctgatcagggagaaacctgttcccaaacagaatgagaatgaggaggaaaatcttgataaagagcagactggaaatctaaaacaggagttggatgacaaaagcgccacctgtaaggcatatccaaagcgtcctctgcttggactggttctgactcccactcgagagctggccgtccaggtcaaacagcacattgatgctgtggccaggtttacaggaattaaaactgctattttggttggtggaatgtccacgcagaaacagcagaggatgctgaaccgtcgtcctgagattgtggttgctactccaggccggctgtgggaattaattaaagaaaagcattatcatttgaggaaccttcggcagctcaggtgcctggtagtggatgaggctgaccggatggttgagaaaggccattttgctgagctctcacagctgctagagatgctcaatgactcccaatacaacccaaagagacaaacgcttgttttttctgccacactcaccctggtgcatcaggctcctgctcgaatccttcataagaagcacaccaagaaaatggataaaacagccaaacttgacctccttatgcagaaaattggcatgaggggcaagcccaaggtcattgacctcacaaggaatgaggccacggtggagacgctaacagagaccaagatccattgtgagactgatgagaaagacttctacttgtactacttcctgatgcagtatccaggccgcagcttagtgtttgccaacagtatctcctgcatcaaacgcctctctgggctcctcaaagtccttgatatcatgcccttgaccctgcatgcctgtatgcaccagaagcagaggctcagaaacctggagcagtttgcccgtctggaagactgtgttctcttggcaacagatgtggcagctcggggtctggatattcctaaagtccagcatgtcatccattaccaggtcccacgtacctcggagatttatgtccaccgaagtggtcgaactgctcgggttaccaatgaggccttcagtctgatgctcattgggcctgaggatgtgatcaactttaagaagatttccaaaccgctcaagaaagatgaggatatcccactgttcccccgtgcagacataaatacatggatgtggtcaaggagcgaatccgtttagcccgacagattgagaaatgtgagtatcggaactttcaggggcttgcctgcacaactcttggattgagcagggcagcagctgccctggagattgagctggaagaagccatgtataagggaggaaaagctgacccagccaagaagaacgtcggagacaaaaggcaggatgaaggttctgaagaaggagttgcgccaccttgctgtcccagccacttgtttaccggagagccggaaaacccaagtatccccactcagtcttggcaagccgccccctgctttgtgtctgccccccaagttaagagcgagtcctgcctttgagcttttctctccaaagcagaagaagaagaagacaaagaagcccgaaggaggccacagccgggaacagcccacagcccaagttacaagtgcaatttaactgccgtggttcaagtgtgtcagtgactgcacattggtttctgttctctggctaatttgcaaaacctttccccacccttgtgtttcactcccccaccaaccccaggtaaaaaagtctcctttttttccactcacacccatagcgggagagacctcatgcaaatttgcattgttttggagtaagaattcaatgcagcagcttaatttttttgtattgcagtgtttataggcttcttgtgtgttaaacttgatttcataaattaaaaacaatggtcagagccattgtgtcatcctgaaaaaaaaaaa

SEQ ID NO: 136317 - DNA, 470 bp, Homo sapiens; identical to SEQ ID NO: 136224

SEQ ID NO: 136318 - DNA, 477 bp, Homo sapiens
atggcagttaaacataatgtcatgattttacagtttgacaaacagcagcagctgggaaggttttttaaggtagttgatgagttagataaccaaatgagagaaggtggagttattgttgattaccatggttgtgatttcttccctgaacgctggtttcatatagtttttgtgctgagaacagataccaatgtattgtacgaaagacttgaaacaagattgaaaatggaagccctgactgacagggaacatggaatgatagaccctgacagcggagatgaagcccagcttaatggaggacattctgcagaggaatctctgggtgaacccactcaagccactgtgccggaaacctggtctcttcctttgagtcagaatagtgccagtgaactgcctgctagccagccccagcccttttcagcccaaggagacatggaagaaaacataataatagaagactacgagagtgatgggacatag

SEQ ID NO: 136319 - DNA, 1495 bp, Homo sapiens
gtaaaataccatgaattcacttgctcctttaaaaagcagataactgtccctgaagatgcgaggttactgaaatgagatgtcagaggtagaccttcaagactattcctagccgacccaccaccaccccacacagtgaacagggaatactaagctcaaatattcgtccaacgtaatcctgtaatcagtggggtgccgggttgagctcgcaaatccccgctgcaggacagggctctgcaccctcaatcttctcatccccagatgggatgggcgggtcgggaggaggagcgacgagagcccaggaaagcttgaaggcagagatagactcgcgtctctaagacatatacataatatagccgcaaccgcggcggccttactttcccggagctgcatccccttttgggcgaagagcggaggcgaccaggaactaccctaggtgaaagggcagccacctggccctacccgggctcaacgccgagcctctcggaggtacggcctcccgggggaccttccagactggtcggcgcaagcgaagggcggggaccaccgaaggagtgtgtgacttacgcatccagcgcactgcctgacccgaagtaccgacccgagttatgcccaccctccaacttttgcgacggaaaatgggtattgaaaaggcaggacccccagggggtgggaaaaaccccccttaggccaagaacttgcgtcaaaatcaggactgaaatacagttaatgtgggtgatttagctcgagaagagcaattgtatgatggctatgatgaagagtatgactgtcccattttagatgaagacagagtagttgatgagttagataaccaaatgagagaaggtggagttattgttgattaccatggttgtgatttcttccgtgaacgctggtttcatatagtttttgtgctgagaacagataccaatgtattgtaccgaaagactttaaaccagggggttataatgagaagaaactaacagacaatattcagtgtgagatttttcaagttctttatgaagaagccacagcatcctacaaggaagaaatccgtgcatcagctgccccagtaataaacccagaagagctagaaaataatgtagatcagatcttgaaatggattggagccagtgggatccaaagatcataactcttgacttataaggctagctacttaataatcgactcttgttgatatctctgccgacatcatagaaattgttcaagtgtcagtaacactttattaaaatcatgttgcagaaccagcaggtggatagtatataggtttatgcctgtgtttctttttctccatgagaaagctaaacatgaaatataatgaatatagtattattaaggattgagacaaaaactgtgattttaatacttaaattgctaaagaataaataaatctgacaaaatgggtggatatcttttaagtttattacagaaaaaaatgcagatgatctcttaaaataaaactaaagataaagcaaca

SEQ ID NO: 136320 - DNA, 3118 bp, Homo sapiens
  misc_feature (1)...(3118): n = a,t,c or g
ggaggccgtacctccgagaggctcggcgttgagccgggtagggccaggtggctgccctttcacctagggtagtccctggtcgcctccgctcttcgcccaaaaggggatgcagctccgggaaacaagtgaattcatggtattttacttttttgggaaatactggaaatgaagacctgcaactgtaatttgaaataaggaaaactttaattttcagtataaaaattgctcaaatagaattgcctgattttaatgacaaaaggtgaattatagtttaatgtactgcaagtcctaaactacggatgggaactattacagtttataatgtcaaaaacttttcttagaccaaaggtatcttccacaaagtatatgggagtccacatttatgtaagaaatgaaactataaaatgtataaataatttgcaaatcagaattgctgtcgaaagttttactataatgaaagatattttcatactctcaaaaatatagaggaaaggggccaagattatagtaccagtcacaatcttttgatgaggacgaaatgaatcaggtaacagactgggttgacccatcatttgatgattttctagagtgtagtggcgtctctactattacctgccacatcattaggtgtgaataactcaagtcatagaagaaaaaatgggccttctacattaagaaagcagcagatttccagcgagaaaaaagaggaaatctatcttccttagaacagatttatggtttagaaaattcaaaagaatatctgtctgaaaatgaaccatgggtggataaatataaacccagaaactcagcatgaacttgctgtgcataaaaagaaaattgaaggaagtcgaaacctggttaaaagctcaagttttaggaaggcaaccaaaacagggtggatctattttattaataacaggtcctcctggatgtggaaagacaacgaccttaaaaatactatcaaaggagcatggtattcaagtacaagagtggattaatccagttttaccagacttccaaaaagatgatttcaaggggatgtttaatactgaatcaagcttccatatgtttccctatcagtctcagatagcagttttcaaagagtttctactaagagcgacaaagtataacaagttacaaatgcttggagatgatctgagaactgataagaagataattctggttgaagatttacctaaccagttttatcgggattctcatactttacatgaagttctaaggaagtatgtgaggattggtcgatgtcctcttatatttataatctcggacagtctcagtggagataataatcaaaggttattggttcccaaagaaattcaggaagagtggtctatctcaaatattaggtttaacccttgggcaccaacaattatgatgaaatttcttaatcgaatagtgactatagaagctaacaagaatggaggaaaaattactgtccctgacaaaacttctctagagttgctctgtcagggatgttctggtgatatcagaagtgcaataaacagcctccagttttcttcttcaaaaggagaaaacaacttacggccaaggaaaaaaggaatgtctttaaaatcagatgctgtgctgtcaaaatcaaaacgaagaaaaaaacctgatagggtttttgaaaatcaagaggtccaagctattggtggcaaagatgtttctctgtttctcttcagagctttggggaaaattctatattgtaaaagagcatctttaacagaattagactcacctcggttgccctctcatttatcagaatatgaacgggatacattacttgttgaacctgaggaggtagtagaaatgtcacacatgcctggagacttatttaatttatatcttcaccaaaactacatagatttcttcatggaaattgatgatattgtgagagccagtgaatttctgagttttgcagatatcctcagtggtgactggaatacacgctctttactcagggaatatagcacatctatagctacgagaggtgtgatgcattccaacaaagcccgaggatatgctcattgccaaggaggaggatcaagttttcgacccttgcacaaacctcagtggtttctaataaataaaaagtatcgggaaaattgcctggcagcaaaagcactttttcctgacttctgcctaccagctttatgccgccaaactcagctattgccataccttgctctactaaccattccaatgaggaaatcaagcttcagattttctttttattccaaggatattggggaagggctcccttntggaaggcggacactttggggaaggattggaaaatgggaaggccctggactggacaggggaacatgggatgattagacccctgacagcggagatgaagccccagcttaatgggaggacattctgcagaggaatctctgggtgaacccactcaagccactgtgccggaaacctggtctcttcctttgagtcagaatagtgccagtgaactgcctgctagccagccccagcccttttcagcccaaggagacatggaagaaaacataataatacgaagactacgagagtgatggggacatagaagccagcctgctaatcagattgctacttcacagctttcatttttgttttcatttcagtggtacttcagcagagttaatatgcttttctgatgaattacacaacagtttgttaattcttcattcttgtagtatttcatcacaagaaacctactcttctgtcatcttgaagtaaatagaagatcaagccctccaaacccccttaaattttttcgggtatttattaaacccggtgagtggtttaaggagcggtcagtgtgtataaagtgtgtttgaacattatgcccaaatatcaagatgtgaaggactaattcaggatgcaaaaacgttattggggggttgtaaatatcaactattcaacagtttaggatgcaattacgagtgtaaactgtgtgccttatttacactttattgtctcccgcttctcagatagttttgatgtgttgtacagtggaatatcttagatactttttggaaagtatttacataagttatatcacaattaaaatgttgaatttaaaaaaaaaaaaaaaaaa

SEQ ID NO: 136321 - DNA, 412 bp, Homo sapiens
  misc_feature (1)...(412): n = a,t,c or g
gctgcgagaagacgacagaagaggggaagctgacagagatacctacagacggagtgctgtgccacctggtgccgacaagaaagccgaggctggggctgggtcagcaaccgaattccagtttagaggcggatttggtcgtggacgtggtcagccacctcagtaaaattggagaggattcttttgcattgaataaacttacagcccnnnnnnnnnnnnnngaaaacnnnnnnnnnncnnnnnnnnnnnnngggnnnnnnnnnnnnncgggggcgcttttaaaaaaaaacattttttttnnnnnnnnnnnnnnnagaggnnnnnnnnnnnnngggcccacaaatattttttttggtgggcggtttaaaaaaacgggggaggggaaaaacccttgggctaaccaattatattgtgn

SEQ ID NO: 136322 - DNA, 833 bp, Homo sapiens
  misc_feature (1)...(833): n = a,t,c or g
gtcacgaggctttttttccagcccgggtacgggaccctgcagccgcagagactgttgatgcctaagaagaaccgctattgccatttatgaaactcctttttaagggagggagtcatggtgcccaagaaggaatgtccccatccctaagcacccggagctggcagaacagaaatgtgcccaaccttcatgtcatgaagcccatgcaagtctctcaagtccccgaggctacgtgaaaggaacagtttgcctgggagacatttctactggtaccttaccaaatgagggtaccaaggggtttnaatttcctnccgtgattaccttgcatctgcccccaggagattgtgccttgccacccctacggccgtagcccgtccagaagactggcaaggccttcgggctaaaaggttttggaggggtgagcgaacctgcgaggacttcacaagaacggggaagctgacaagagattacctaccagacgggagtgcctgtgccaccctggtgcctgacaagaaagccgaggctgggggcttgggtcaagcaacccgaatttccagtttagaggcggatttggtcgtggacgtggtcaagccacctcagtaaaatttggagaggattctttttgcattggaataaacttacagccnnnnnnnnnnnnngggggggggcccgttttaaagattccttggggggcccaaacttaacccgggctggaaaggtaatatttttttccttatggggggccaattaaaaacctagttggggatttttgggagggaccttaattttgggggggggacatattggcccaacctccttacaaaaattaaagcttt

SEQ ID NO: 136323 - DNA, 396 bp, Homo sapiens
aagcacccggagctggcagacaagaatgtgcccaaccttcatgtcatgaaggccatgcagtctctcaagtcccgaggctacgtgaaggaacgattaccttcatctgcccccggagattgtgcctgccaccctacgccgtagccgtccagagactggcagcctcggcctaaaggtctggagggtgagcgacctgcgagactcacaagaggggaagctgacagagatacctacagacggagtgctgtgccacctggtgccgacaagaaagccgaggctggggctgggtcagcaaccgaattccagtttagaggcggatttggtcgtggacgtggtcagccacctcagtaaaattggagaggattcttttgcattgaataaacttacagccaaaaaaca

SEQ ID NO: 136324 - DNA, 412 bp, Homo sapiens; identical to SEQ ID NO: 136321
  misc_feature (1)...(412): n = a,t,c or g

SEQ ID NO: 136325 - DNA, 875 bp, Homo sapiens
  misc_feature (1)...(875): n = a,t,c or g
gcgtcgaccgcagcaccgcgcatgctccttctttttcagccccggtaccggaccctgcagccgcagaagatgtttgatgcctaagaagaaccgctattgccatttatgaaactcctttttaaggaagggagtcatggtggccaagaaggatgtccacatgccctaagcacccggagcatggcagaccaagaatggtgccccaacctttcatgtcatgaaaggccatgcaggtctctcaaagtccccgagggctaccgtgaaaggaaccagttttgcctggggagacattttttactgggtacctttaccaattgagggtaccaaggggtttnaatttcctnccgtgattacctttcatcttgcccccgggagatttgttgccttgccaccgctaccgcccgtagcccgtccaagagacttggcaaggccttcgggctaaaaaggtcttgggaggggttgaggcgacctggcgaggatttcacaagaggggggaagtttgacagaggttaccttacaggacggattgctgttgccaccctggtggccgacaagaaagccgaggctgggggcttgggtcaagcaacccgaatttccagtttagaggcggatttggtcgtggacgtggtcaagccacctcagtaaaatttggagaggattctttttgcattggaataaacttacagccnnnnnnnnnnnnngggggggggcccgttttaaagattccttggggggcccaaacttaacccgggctggaaaggtaatatttttttccttatggggggccaattaaaaacctagttggggatttttgggagggaccttaattttgggggggggacatattggcccaacctccttacaaaaattaaagcttt

SEQ ID NO: 136326 - DNA, 2622 bp, Homo sapiens
atgtttaactcagtcccggtgcaaaacgaggatggatcgttcaacttcgaaggggtaaaggctgaattcaggccgggaactcagacgcaggaatacatcaagggaatggaagatagcgctagtgaggtaactgtaaatcgtgaggttactaccgataacccatacacgatctcagtaaccaacaaaacgctgtcggcaatccgtatcaaaatgttcatgcctcgcggcgtacgaattgaaagtaacggtgataaaaatggcgttcgagttgagtacgaggtgcagcaagcggttgatggcggttcgtttgagactgttcttactgacgtaatcgaaggtaaaacaatgtcaggttatgatcgaagccgtcgcgtaaacctgcctaacttcaacaatcaggtaatattcagagttgttcgaaagacgcctgattccaatgactcgaatgtcgttgatgcaatccaggtaagaagctatgctgaggtcattgatgccaagttccgatatcctctgactggtcttcttttcgtagagttcgattcgaagatgttccccaaccagttacctacgatctcaattcgtaagcgctggaagattgtaaacgttccgtcgaactacgatccagaatcgcgaacatacaacggcaattgggatggcactttcaaaaaagcatggactaataatccggcatgggttctttatgacctgatgattaatcagcgttatggtctggatcagaaagagcttggaatctccgtagacaaatgggcgctctatgaggcggcgcaatattgcgaccagatggtccctgacggcaaaggcggcacggaacctcgctacctttgtgacgtgataatccagtctcagactgatgcgccgcgtgaacctgcgtacatcttcactaacgacaacgtagttaatggtgacttctcatatactttcgcaagcgagaagagcatgtacacgacgtgcaacgtgatgtttgatgatgagcaaaacatgtatcaacaggacgttgagccagtattcgatcgtgaggccactctacggttcgggaacaacgtaacgagcattacagcgatcgggtgcacacgtcgaagcgaggccaaccgacgcgggagatggattctgaaaaccaacctccgcagcactacggtaaacttcgctaccggactggaagggatgattccgacaatcggagacgtggtggcaatatctgataacttctggtcaagtaacttgacgatgaacctgtcagggcgattgctcgaagtgtcaggtagtcagattttcctgccgttccgcgttgatgcgcgcgcaggtgactttattatcgtaaataagccagatggcaagcccgtgaagcgcacaatctcaagtgttagtgcggatggtaagaccatagagattaacatcggctttggctttcctgtgaagcctaacacggtattcgcaatcgaccgcaccgaccttgcgttgcagcagtacgtagttacaaaaatcgacaagggcgatgatgatgaggaatttacctacaaaatcacggcggtggagtacgatcctaataagtacgatgaaattgattacggggttaacatcgacgaccgaccgacaagcatcgttgagccagatcagatccctaagcctgaaaacgtgaaagtgtcctcagagtcgagaatcgtccaggggatgagcgtagaaacgatgattgttagctgggataaagtgccgtacgcagttttctatgacgtacagtggagaaaggataacggcaactggcaaaacgttccgcagacagcaaacaaagaggtttatgttgaagggatttacgctggcaactatcagggtgaaccgggccgaccgattaacctcacagctacggatgatgttgtttttggtatccgtacaaaatgggggttctctgatggttctggagatacagcctatacagagttgcaacagtcaccggatggaacagtggataacgcaagtttgctttcattgattccgtatccgcagcatgagtattatcactcaccgatgccgggaggtaatattgtgtggtatcgggtaaggacggttgacaggatcggtaacgtatctcagtggactgattttgtcagaggcatggcatcaacaaacgttgacgatatcatcggggagatttctgtcgatatcgaaaactcgccgggttacgagtggcttgttgataacgcaaccgacaacgcgtcgcagaacgcagctaatgcagaggcagcaattgagaacgcactagctaatgacaaagacgcgatctacatgaagaaggagaacggaaaacgaaaagcagacacctacatgcaaccaaatggctaccttatgaattttgttcccaccgcaacttctcaatatcacatcatatcacccttgcagaatagttctttgggcctaatggtggaaccatctactttcacaacaaaatattttgaggtgttagtcaataagtctccttattctaacctgctacaagaaagcaacctgtggtgccaagagcctgtgatagctgatacatcagctgcctcttattccaggtcagctcatcaacaatcttcactagggaaacatcaccctaattacaactga

SEQ ID NO: 136327 - DNA, 2763 bp, Homo sapiens
atggaggacaatctaatctcaatcaacaaaatcaagatcctgttatctgtatctgatggtgaaattgacgaaacattcagcctaaagcagttgatgtttaactcagtcccggtgcaaaacgaggatggatcgttcaacttcgaaggggtaaaggctgaattcaggccgggaactcagacgcaggaatacatcaagggaatggaagatagctctagtgaggtaactgtaaatcgtgaggttactaccgataacccatacacgatctcagtaaccaacaaaacgctgtcggcaatccgtatcaaaatgttcatgcctcgcggcgtacgaattgaaagtaacggtgataaaaatggcgttcgagttgagtacgaggtgcagcaagcggttgatggcggttcgtttgagactgttcttactgacgtaatcgaaggtaaaacaatgtcaggttatgatcgaagccgtcgcgtaaacctgcctaacttcaacaatcaggtaatattcagagttgttcgaaagacgcctgattccaatgactcgaatgtcgttgatgcaatccaggtaagaagctatgctgaggtcattgatgccaagttccgatatcctctgactgttcttcttttcgtagagttcgattcgaagatgttccccaaccagttacctacgatctcaattcgtaagcgctggaagattgtaaacgttccgtcgaactacgatccagaatcgcgaacatacaacggcaattgggatggcactttcaaaaaagcatggactaataatccggcatgggttctttatgacctgatgattaatcagcgttatggtctggatcagaaagagcttggaatctccgtagacaaatgggcgctctatgaggcggcgcaatattgcgaccagatggtccctgacggcaaaggcggcacggaacctcgctacctttgtgacgtgataatccagtctcagactgatgcgtacaaggtggttcgagatatttgctcaatcttccgtggaatgagtttttggaatgggccgcgtgaacctgcgtacatcttcactaacgacaacgtagttaatggtgacttctcatatactttcgcaagcgagaagagcatgtacacgacgtgcaacgtgatgtttgatgatgagcaaaacatgtatcaacaggacgttgagccagtattcgatcgtgaggccactctacggttcgggaacaacgtaacgagcattacagcgatcgggtgcacacgtcgaagcgaggccaaccgacgcgggagatggattctgaaaaccaacctccgcagcactacggtaaacttcgctaccggactggaagggatgattccgacaatcggagacgtggtggcaatatctgataacttctggtcaagtaacttgacgatgaacctgtcagggcgattgctcgaagtgtcaggtagtcagattttcctgccgttccgcgttgatgcgcgcgcaggtgactttattatcgtaaataagccagatggcaagcccgtgaagcgcacaatctcaagtgttagtgcggatggtaagaccatagagattaacatcggctttggctttcctgtgaagcctaacacggtattcgcaatcgaccgcaccgaccttgcgttgcagcagtacgtagttacaaaaatcgacaagggcgatgatgatgaggaatttacctacaaaatcacggcggtggagtacgatcctaataagtacgatgaaattgattacggggttaacatcgacgaccgaccgacaagcatcgttgagccagatcagatccctaagcctgaaaacgtgaaagtgtcctcagagtcgagaatcgtccaggggatgagcgtagaaacgatgattgttagctgggataaagtgccgtacgcagttttctatgacgtacagtggagaaaggataacggcaactggcaaaacgttccgcagacagcaaacaaagaggtttatgttgaagggatttacgctggcaactatcaggttcgcgtgcgctccgtcgctggttcgggcacgacttcaggctggtcaaatatcgtcgcggcaacgttgacgggtaaacagggtgaaccgggccgaccgattaacctcacagctacggatgatgttgtttttggtatccgtacaaaatgggggttctctgatggttctggagatacagcctatacagagttgcaacagtcaccggatggaacagtggataacgcaagtttgctttcattgattccgtatccgcagcatcgctattaccctcaggttatgccgctcgaaccctttaagatcaacgttcttgagcagatcacgaagcatatcgaaaaactgcagtgcggaggtgtagtcaaacaactcagcaggcgtgggaacaatcagcacatcagcagcacatacgacattaatcgtgccgatacccaggttaggcgcgctgtcaataactatgacatcatagtcatgagcaacagtttcaatggccagtcggagcatcaggtgtggatcgatagaaaggcaggagagtgtcttctgcatgaatatgaagatctggtacccatccgtgatacattgaggctgttccctgggggtcgttaccttccacgagcaaaacacgtagccccttcagagccagatcctgagcaagatgaacagaaactgaggttttgtaaacgccacctttatgggcagcaaccccgatcaccggtggaaatacgtcttcagcacgtcgcaatcgcgtaccaaacacatcacgcatatgattaa

SEQ ID NO: 136328 - DNA, 1452 bp, Homo sapiens
atggaggacaatctaatctcaatcaacaaaatcaagatcctgttagctgtatctgatggtgaaattgacgaaacattcagcctaaagcagttgatgtttaactcagtcccggtgcaaaacgaggatggatcgttcaacttcgaaggggtaaaggctgaattcaggccgggaactcagacgcaggaatacatcaagggaatggaagatagctctagtgaggtaactgtaaatcgtgaggttactaccgataacccatacacgatctcagtaaccaacaaaacgctgtcggcaatccgtatcaaaatgttcatgcctcgcggcgtacgaattgaaagtaacggtgataaaaatggcgttcgagttgagtacgaggtgcagcaagcggttgatggcggttcgtttgagactgttcttactgacgtaatcgaaggtaaaacaatgtcaggttatgatcgaagccgtcgcgtaaacctgcctaacttcaacaatcaggtaatattcagagttgttcgaaagacgcctgattccaatgactcgaatgtcgttgatgcaatccaggtaagaagctatgctgaggtcattgatgccaagttccgatatcctctgactggtcttcttttcgtagagttcgattcgaagatgttccccaaccagttacctacgatctcaattcgtaagcgctggaagattgtaaacgttccgtcgaactacgatccagaatcgcgaacatacaacggcaattgggatggcactttcaaaaaagcatggactaataatccggcatgggttctttatgacctgatgattaatcagcgttatggtctggatcagaaagagcttggaatctccgtagacaaatgggcgctctatgaggcggcgcaatattgcgaccagatggtccctgacggcaaaggcggcacggaacctcgctacctttgtgacgtgataatccagtctcagactgatgcgtacaaggtggttcgagatatttgctcaatcttccgtggaatgagttttttgcaatggccgcgtgaacctgcgtacatcttcactaacgacaacgtagttaatggtgacttctcatatacttttcgcagcgagaagagcatgtacacgacgtgccacgtgatgtttgatgatgagcaaacatgtattcacaagacgttgagccattttcgatccgatggtggaaagccaggtcttgctgactggtatcgcgaagcgtttcaggttggtcgggtaatttcagtatcttgcgaaacgttgaagatctcatcccgtgagcataacggaacgacttataattcattgcaggctgctgatttccctaagttggtatttagtcagcgaggacaaagcaatcaacaacgagcaccgcagcaacaacagcgaacgcaatcacagccacagccaaatcctcaatcaactttcgatgatgatatcccgttctaa

SEQ ID NO: 136329 - DNA, 1902 bp, Homo sapiens
  misc_feature (1)...(1902): n = a,t,c or g
atgattcaaaaagtgataagcggatctaaaggtgggtcacagaagcctcataacccggttgagatggaggacaatctaatctcattcaacaaaatcaagatcctgttagctgtatctgatggtgaaattgacgaaacattcagcctaaagcagttgatgtttaactcagtcccggtgcaaaacgaggatggatcgttcaacttcgaaggggtaaaggctgaattcaggccgggaactcagacgcaggaatacatcaagggaatggaagatagctctagtgaggtaactgtaaatcgtgaggttactaccgataacccatacacgatctcagtaaccaacaaaacgctgtcggcaatccgtatcaaaatgttcatgcctcgcggcgtacgaattgaaagtaacggtgataaaaatggcgttcgagttgagtacgaggtgcagcaagcggttgatggcggttcgtttgagactgttcttactgacgtaatcgaaggtaaaacaatgtcaggttatgatcgaagccgtcgcgtaaacctgcctaacttcaacaatcaggtaatattcagagttgttcgaaagacgcctgattccaatgactcgaatgtcgttgatgcaatccaggtaagaagctatgctgaggtcattgatgccaagttccgatatcctctgactggtcttcttttcgtagagttcgattcgaagatgttccccaaccagttacctacgatctcaattcgtaagcgctggaagaatgtaaacgntccgtcgaactacgatccagaatcgcgaacatacaacggcaattgggatggcactttcaaaaaagcatggactaataatccggcatgggttctttatgacctgatgattaatcagcgttatggtctggatcagaaagagcttggattctccgtagacaaatgggcgctctatgaggcggcgcaatattgcgaccagatggtccctgacggcaaaggcggcacggaacctcgctacctttgtgacgtgataatccagtctcagactgatgcgccgcgtgaacctgcgtacatcttcactaacgacaacgtagttaatggtgacttctcatatactttcgcaagcgagaagagcatgtacacgacgtgcaacgtgatgtttgatgatgagcaaaacatgtatcaacaggacgttgagccagtattcgatcgtgaggccactctacggttcgggaacaacgtaacgagcattacagcgatcgggtgcacacgtcgaagcgaggccaaccgacgcgggagatggattctgaaaaccaacctccgcagcactacggtaaacttcgctaccggactggaagggatgattccgacaatcggagacgtggtggcaatatctgataacttctggtcaagtaacttgacgatgaacctgtcagggcgattgctcgaagtgtcaggtagtcagattttcctgccgttccgcgttgatgcgcgcgcaggtgactttattatcgtaaataagccagatggcaagcccgtgaagcgcacaatctcaagtgttagtgcggatggtaagaccatagagattaacatcggctttggctttcctgtgaagcctaacacggtattcgcaatcgaccgcaccgaccttgcgttgcagcagtacgtagttacaaaaatcgacaagggcgatgatgatgaggaatttacctacaaaatcacggcggtggagtacgatcctaataagtacgatgaaattgattacggggttaacatcgacgaccgaccgacaagcatcggaagtgaagcctgtgaattttaccagcagcagacaccaggcacagccagaagtgggactaatcccacctcctctgtggccacaaggcaagggaataatagctcagaccagcaagtcatcagctga

SEQ ID NO: 136330 - DNA, 678 bp, Homo sapiens
atggaagatagctctagtgaggtaactgtaaatcgtgaggttactaccgataacccatacacgatctcagtaaccaacaaaacgctgtcggcaatccgtatcaaaatgttcatcgtcgcggcgtacgaattgaaagtaacggtgataaaaatggcgttcgagttgagtacgaggtgcagcaagcggttgatggcggtaaaaacatgtccaggttatgatcgaagccgtcgcgtaaacctgcctaacttcaacaatcaggtaatattcagagttgttcgaaagacgcctgattccaatgactcgaatgtcgttgatgcaatccagggaaagaaaattggagaccgtgtccattttgagcacgtctcccagaataattgtgccgtgacacacggggagcgcaaacggaaaacaggaagccaagctgcaagggctcgtttgaaactggcaaactttgcagtcaagtcttcagccagaaaatccacagatggcagccatttcccacaccacttccctccacatctggttccaaatggaggctgccataggtctgatctgtctcctgtggtgggggtgatgaccttccccatcagccccaagaccaagttcaatgcatttgctgctggcttcacatgggcaatgctggaagcagcagcccctgaccaccctcaactgctgtga

SEQ ID NO: 136331 - DNA, 1806 bp, Homo sapiens
atgcgcgccaacgtcgacagcgcgagggcccggcggcgcacactgggtttgggggaatcggggctcggtgacatctttcctgctcggggtctccgacgaagacggctcctaggcaatgctcggccgggcgcgtccgacggcaaggtgctgatagtcaggggtcctcgtggggcacgcgctgactgcgcgtcagccatcgtccggcagacgccttgtggtcgaccactcggccaaccgacgcgggagatggattctgaaaaccaacctctgcagcactacggtaaacttcgctaccggactggaagggatgattccgacaatcggagacgtgactttattatcgtaaataagccagatggcaagcccgtgaagcgcacaatctcaagtgttagtgcggatggtaagaccatagagattaacatcggctttggctttcctgtgaagcctaacacggtattcgcaatcgaccgcaccgaccttgcgttgcagcagtacgtagttacaaaaatcgacaagggcgatgatgatgaggaatttacctacaaaatcacggcggtggagtacgatcctaataagtacgatgaaattgattacggggttaacatcgacgaccgaccgacaagcatcgttgagccagatcagatccctaagcctgaaaacgtgaaagtgtcctcagagtcgagaatcgtccaggggatgagcgtagaaacgatgattgttagctgggataaagtgccgtacgcagttttctatgacgtacagtggagaaaggataacggcaactggcaaaacgttccgcagacagcaaacaaagaggtttatgttgaagggatttacgctggcaactatcaggtgcgcgtgcgctccgtcgctggttcgggcacgacttcaggctggtcaaatatcgtcgcggcaacgttgacgggtaaacagggtgaaccgggccgaccgattaacctcacagctacggatgatgttgtttttggtatccgtacaaaatgggggttctctgatggttctggagatacagcctatacagagttgcaacagtcaccggatggaacagtggataacgcaagtttgctttcattgattccgtatccgcagcatgagtattatcactcaccgatgccgggagataatattgtgtggtatcggagcatggcatcaacaaacgttgacgatatcatcggggagatctctgtcgatttcgaaaactcgccgggttacgagtggcttgttgataacgcaaccgacaacgcgtcgcagaacgcagctaatgcagaggcagcaattgagaacgcactagctaatgacaaagacgcgatctacatgaagaaggagaacggaaaacgaaaagcagagtacaccaaatcactgaagctaattgctgatgagactgaggcgcgagtaacagcagttgagcagttaagggcaagttttggtgatcagattagcgcaagcaatagcgaattgcgtgaagttatcgcaactgaaaccggagcgctatcgcgtgaaattgaccaactcaaggcagagattggtgatgatattcaggcaagtttgactgatatcagagaggctatagcaaacgagactgaggcgagaacgcaagctgacttgtcattaagcgcgaggcttgggaataatgaggcagcactttctcaaaaacttgattcgtggagcaatgcggattcgactggtgcaatgtacggcgtcaagctgggtctgaagtataacggccaagaatacaatgccggtatggctatgtctctgattggttcaggcgcagcagaatccttttaa

SEQ ID NO: 136332 - DNA, 6250 bp, Homo sapiens
atggaggacaatctaatctcaatcaacaaaatcaagatcctgttagctgtatctgatggtgaaattgacgaaacattcagcctaaagcagttgatgtttaactcagtcccggtgcaaaacgaggatggatcgttcaacttcgaaggggtaaaggctgaattcaggccgggaactcagacgcaggaatacatcaagggaatggaagatagctctagtgaggtaactgtaaatcgtgaggttactaccgataacccatacacgatctcagtaaccaacaaaacgctgtcggcaatccgtatcaaaatgttcatgcctcgcggcgtacgaattgaaagtaacggtgataaaaatggcgttcgagttgagtacgaggtgcagcaagcggttgatggcggttcgtttgagactgttcttactgacgtaatcgaaggtaaaacaatgtcaggttatgatcgaagccgtcgcgtaaacctgcctaacttcaacaatcaggtaatattcagagttgttcgaaagacgcctgattccaatgactcgaatgtcgttgatgcaatccaggtaagaagctatgctgaggtcattgatgccaagttccgatatcctctgactggtcttcttttcgtagagttcgattcgaagatgttccccaaccagttacctacgatctcacattcgtaagcgctggaagattgtaaacgttccgtcgaactacgatccagaatcgcgaacatacaacggcaattgggatggcactttcaaaaaagcatggactaataatccggcatgggttctttatgacctgatgattaatcagcgttatggtctggatcagaaagagcttggaatctccgtagacaaatgggcgctctatgaggcggcgcaatattgcgaccagatggtccctgacggcaaaggcggcacggaacctcgctacctttgtgacgtgataatccagtctcagactgatgcgtacaaggtggttctgagatatttgctcaatcttccgtggaatgagtttttggaatggtgaaagcatttctgtaatcatcgacaggccgcgtgaacctgcgtacatcttcactaacgacaacgtagttaatggtgacttctcatatactttcgcaagcgagaagagcatgtacacgacgtgcaacgtgatgtttgatgatgagcaaaacatgtatcaacaggacgttgagccagtattcgatcgtgaggccactctacggttcgggaacaacgtaacgagcattacagcgatcgggtgcacacgtcgaagcgaggccaaccgactgcgggagatggattctgaaaaccaacctccgcagcactacggtaaacttcgctaccggactggaagggatgattccgacaatcggagacgtggtggcaatatctgataacttctggtcaagtaacttgacgatgaacctgtcagggcgattgcaagaagtgtcaggtagtcagattttcctgccgttccgcgttgatgcgcgcgcaggtgactttaatatcgtaaataagccagatgcaaagcccgtgaagcgcacaatctcaagtgttagtgcggatggtaagaccatagagattaacatcggctttggctttcctgtgaagcctaacacggtattcgcaatcgaccgcaccgaccttgcgttgcagcagtacgtagttacaaaaatcgacaagggcgatgatgatgaggaatttacctacaaaatcacggcggtggagtacgatcctaataagtacgatgaaattgattacggggttaacatcgacgaccgaccgacaagcatcgttgagccagatcagatccctaagcctgaaaacgtgaaagtgtcctcagagtcgagaatcgtccaggggatgagcgtagaaacgatgattgttagctgggataaagtgccgtacgcagttttctatgacgtacagtggagaaaggataacggcaactggcaaaacgttccgcagacagcaaacaaagaggtttatgttgaagggatttacgctggcaactatcaggttcgcgtgcgctccgtcgctggttcgggcacgacttcaggctggtcaaatatcgtcgcggcaacgttgacgggtaaacagggtgaaccgggccgaccgattaacctcacagctacggatgatgttgtttttggtatccgtacaaaatgggggttctctgatggttctggagatacagcctatacagagttgcaacagtcaccggatggaacagtggataacgcaagtttgctttcattgattccgtatccgcagcatgagtattatcactcacagatgacgggaggtaatattgtgtggtatcgggtaaggacggttgacaggatcggtaacgtatctcagtggactgattttgtcagaggcatggcatcaacaaacgttgacgatatcatcggggagatttctgtcgatatcgaaaactcgccgggttacgagtggcttgttgataacgcaaccgacaacgcgtcgcagaacgcagctaatgcagaggcagcaattgagaacgcactagctaatgacaaagacgcgatctacatgaagaaggagaacggaaaacgaaaagcagagtacaccaaatcactgaagctaattgctgatgagactgaggcgcgagtaacagcagttgagcagttaagggcaagttttggtgatcagattagcgcaagcaatagcgaattgcgtgaagttatcgcaactgaaaccggagcgctatcgcgtgaaattgaccaactcaaggcagagattggtgatgatattcaggcaagtttgactgatatcagagaggctatagcaaacgagactgaggcgagaacgcaagctgacttgtcattaagcgcgaggcttgggaataatgaggcagcactttctcaaaaacttgattcgtggagcaatgcggattcgactggtgcaattccagggtggtaatttcaaagagctatacaagaaaaaattcggcactgtactagcgaaaaaccgcgcgatgacgccagaacaactattcgatctgtcggtgaagtatttcgaatgggccgaggacaacgcgataaaggcgtcagaatcagccagctttcagggtggcgtttatgaatcgcttgttcataagccgcgcgtcttcacctggaccggataccgactatttatcggtgcaagcgaggccgcaatcattaagtggaagcgtgaggaagaatacagtgaggttatggagttcgtggaatccgtaatcaacgagcaaaaatttcagcttgccgcaaacggcgttattaacgcctcatttatcggcaaggatctcggaatcgacaagccagcttcaataaacatcgaaaactcggcagcttcagcgtcgaccgctgtcgccactactgaggaagcaatgaaagaggctaagttggcgatcaagaaaatgagcgaggccaatttcgaaaaaatgattcggatctggtttcagcttatgcaggctcagcagttccagcctaactggcatcacctttacctatgtcacgaagtggaggaaattattgcaggccgacgcggtaacactatctttaacgtcacgccaggctccggtaaaactgaagtgttctcaattcaccttccggtgtacgcaatgctcaagtgtaaaaaggtgcgaaaccttaacgtatcgtttgccgacagcttagttaagcgcaacagtaagcgcgtccgtgagattatcagcagcaacgaatttcaagagctatggccctgcaaatttggcacatcgaaagacgaagagatgcaggttcttaacgaagacggaaaggtttggtttgagctaatctccgcagcggctggtggtcgtattactggttcgcgtggtggctacatgactccgggattctccggcatggtaatgctcgacgatatcgacaagcctgatgatatgttctcaaaggttaagcgtgagcgtacgcacatgctattgaaaaacaccattcgatcccgtcgtatgcataacgagacgcctattattgcaattcagcaacgactacatgctcaggattcaacatggttcatgatgaatggcggcatgggtatcgagttcgaccaaatatcaatcccggcgcttgttactgaagaatacggaaagacgcttcctgactggttgcagccttactttgagcgagacgttttgtcgtctgagtatgttgaattggacggtgttaagcattattccttttggcccagcaaggaaagtgtgcacgacctgctagctttacgagaagcagatcagtatacctttgattctcagtatcagcagaagccgatcgcgctgggtggctccgtgtttaactcagagtggtggacttattacggcaacagccttgacgctgatgagccagatcctggtaaatatgattaccgattcatcactgccgataccgctcagaagacaggcgagctaaacgactacacggtattttgtttgtggggcaagaagaatgataaggtttactttatcgacggcattcgcggtaagtgggaagcgccggatatggagaggcaatttacagctttcgtcaatcaggcatggaggcacaataaatcaatgggggtacttcgtaaaatctatgtggaagataaggcgagcggtacgggcttaatccagaacctaaggaaaaagactccgatatccatcactccattgcagcgtaacaaagataaagttacccgagctatggatgctcagccagttattaaagccgggcgtgtggttctgccagaagagcaccctatgcttgctgaaattatcgctgagcacagcgcctttacttacgatgacacccatccgcatgatgatatcgtcgataacttcatggatgcggcgaacatagaattgctgaccattgatgatcctatcgagagaatgaagcgactcgccgggatgggctgtcaattgacggccctttttattggaggaaacatgaaaattgttaagcatgatggatataacgatatttttaacggcggtgcagacggatcgcctaagccattctttatgtctgatgcatcatatcacgtcggatctttctacaacgacaacgcaaccgcgaagcgaattgtggatgttatcccggaagagatggtgacggctggatttaaaatgtcaggcgtcaaggatgaaaaagagttcaagtctctgtgggatagttacaaaattgattctagcttggttgacgttctttgctggtcgagactatacggtggggctgctattgtggcaatcatcaaagacaacagaatgctaaccagccccgttaaacctggagctaaacttgagggcgtgcgtgtttacgatcgatttgcaatcaccgttgaaaagagagtaaccaatgctcgatcgcctcgctatggtgagcctgagatatacaatgtatctcctggcgataatcttcaaccttacttaatccaccacacaagaatttttattgctgatggtgagcgagtaacccctcagattcgcaaacagaatcaaggatggggagcgtcggtattgaacaaatcactgattgatgcaatctgtgactatgattactgtgaatctctggccactcagatcttgcgacgtaagcaacaggctgtatggaaggtcaaaggtcttgccgaaatgtgtgatgatgatgatgctcagtatgccgcgcgcctgcgacttgctcaggttgatgataactccggcgtaggtcgtgcgatcggtatcgatgctgagactgaggaatatgacgttctcaactctgatatcagcggagttcctgagttcttatcaagcaagatggaccgcattgtctccctatccgggattcatgagattatcatcaagaataagaacgtaggcggcgtatcagcgagccaaaacacagcgcttgagactttctataagctagtcgatcgcaagcgcgaggaagattacaggccacttcttgagttcttgttgccgttcattgttgatgaggaggagtggtcgatcgagtttgagcctttgtctgttcctagtaagaaagaggaatcagagatcacgaagaataacgttgagtcagtcacgaaggctatcactgagcaaatcatcgatctggaagaagctcgagacacgctgcgatccattgcccctgagttcaaactcaaggatggtaataacatcaacattcgcgaaccggaagaaacaaccgaaccggaaccgggattaggggagaagttagaagatgaaaattaa

SEQ ID NO: 136333 - DNA, 6303 bp, Homo sapiens
gctggtggagtctgcagtgggccagctgccctggaggaagatcaaggacaaggaacaggtagggaatgatcaaggaaaagaatagggacgagtgtctacttaagcacatgcggtcagagttacacctcttaatggacctcattgacagcctgggttacttctccaaggccgactaccagttgatcatgtcagtgtttgagaacagcatgaaggagaggggcattgccgagaatgaggcctttgactgggagaaggcaggcaccgatgccctcctgtccacgagcacctctaccccgccccagcagaacacccggcagacggcagccatgtttggggtggtcaatgtgacgccagtgcctggggacctgctccgggagaacaccgaggatgtgctacagggagagcacctgagtgaccaggagaatgcacccccaattctgcccgggaggccctctgaggggctgggccccagtccccaccttgtcccccaccccgggggtcctgaggctgaagtctgggaggagacagatgtcaaccggaacaaactccggatcaacatcggcaaagtaactgccgccagggcgaagggcagcccctgtgtggaggaggaacagagccgaggcatgggggtccccagctccccagtgcgtgcccccccagactcccccacaaccccagtccgttctctgcgctaccggagggtgaacagccctgagtcagaaaggctgtccacggcggacgggcgagtggagctacctgagaggaggtcacggatggatctgcctggctcgccctcgcgccaggcctgctcctctcagccagcccagatgctgtcagtggacacaggccacgctgaccgacaggccagtggccgcatggacgtgtcagcctctgtggagcaggaggccctgagcaacgccttccgctcggtgccgctggctgaggaggaggatttcgacagcaaagagtgggtcatcatcgacaaggagacggagctcaaggacttccctccaggggctgagcccagcacatcgggcaccacggatgaggagcccgaggagctgcggccactgcccgaggagggcgaagagcggcggcggctgggggcagagcccaccgtccggccccggggacgcagcatgcaggcgctggcggaggaggacctgcagcatttgccgccccagcccctgccaccccagctgagccagggcgatggccgttccgagacgtcacagccccccacgcctggcagcccttcccactcacccctgcactcgggaccccgccctcgacggagagagtcggaccccacaggcccacagagacagttggaggaggacagactctcggggcactccctcccgcggtacagccccctgcgacgactggcgtcctccgtgttctcctcctccacgctggagacggagcattaccctcaccccggcggcggcggctcctcgggctcctccggttccctcattcagcgcagccgctcggctgagagcagccctgtgcgggcgccccaccggcgccacgcgcccctcgctgctggcaaccacagactcatgccctcggtgctccgcatctcgcggtcccagctgcagcaggtgtggcatccaggcttttctggggttggggagggggccaatgacctccaaaccaaggtgttctccgtggcgcccccatttgaggtgaatggcctcccacgagctgtgcctctgagtctgccctaccaggacttcaaaagagacctctccgattaccgagaacgggcgcggttgctcaacagggtccggagggtgggcttctcgcacatgctgctcaccaccccccaggtcccactggctcctgttcagcctcaggctaatgggaaggaggaagaggaggaggaggaggaagatgaggaagaggaagaagaggatgaggaagaagaagaggaggaagaggaagaggaggaggaagaagaggaggaggaggaagaggaggaggaggctgcagcggcagttgccttgggggaggtgctggggcctcgtagtggctccagcagtgaggggagtgagaggagcactgaccggagccaggagggtgccccgtccacgctgctggcagacgatcagaaggagtccaggggccgggcctccatggccgatggggacctggagcctgaggagggctccaaaacgctggtgcttgtctctcctggcgacatgaagaagtcgcccgtcactgccgaactggcccccgaccccgacctgggcaccctggctgccctcactcctcagcatgagcggccccagcccacgggcagccagctggacgtatctgagccaggcaccctgtcctctgtcctcaagtctgagcccaagcccccggggcctggggcagggctgggggccgggacagtgaccacaggggtcgggggcgtggcagtcacctcctcacccttcaccaaagttgagaggacctttgtgcacattgcggagaaaacccacctcaacgtcatgtcttccggtggacaagccttgcggtctgaggagttcagcgctgggggcgagctgggtctggagctggcctctgatgggggcgctgtggaggagggggcccgagcgcccctggagaacggcctcgccctgtcagggctgaatggggctgagatagagggctctgccctgtctggggccccccgggaaaccccctcagagatggccacaaactcactgcccaatggcccggcccttgcagacgggccagccccggtgtccccgctggagccaagccctgagaaagtggccaccatctcccccagacgccatgctatgccaggctctcgccccaggagccgtatccctgtcctgctctctgaggaggacacgggctcggagccctcaggctcactgtcggccaaagagcggtggagcaagcgggctcggccgcagcaggacctggcgcggctggtgatggagaagaggcagggccgcctgctgttgcggctggcctcaggggcctcgtcctcctccagtgaggagcagcgccgtgcctctgagaccctctcaggcacgggctctgaggaggacacgcccgcctctgagccggcagcggccttgcccaggaagagcgggagggcagccgccaccaggagccggattccccgccccattggcctccgcatgcccatgcctgttgcagcccagcagcccgccagcagatcccatggcgcggccccagcattggacacagccatcaccagcagaccagctgaggggaggactcctgggtggacagcctttgacgtccaccccacgctgatgcagaagctcccagaacactcaggaaacttctccggacagagccctccttgtcaacttgaggccctcccaaggccctctacttgccctctgggttccagcagagggagtgggagggaagggccactgcctcccacctaggagctttttccgaatggacaatcagctcgtgccagctgtatctgatggtgaaattgacgaaacattcagcctaaagcagttgatgtttaactcagtcccggtgcaaaacgaggatggatcgttcaacttcgaaggggtaaaggctgaattcaggccgggaactcagacgcaggaatacatcaagggaatggaagatagctctagtgaggtaactgtaaatcgtgaggttactaccgataacccatacacgatctcagtaaccaacaaaacgctgtcggcaatccgtatcaaaatgttcatgcctcgcggcgtacgaattgaaagtaacggtgataaaaatggcgttcgagttgagtacgaggtgcagcaagcggttgatggcggttcgtttgagactgttcttactgacgtaatcgaaggtaaaacaatgtcaggttatgatcgaagccgtcgcgtaaacctgcctaacttcaacaatcaggtaatattcagagttgttcgaaagacgcctgattccaatgactcgaatgtcgttgatgcaatccaggtaagaagctatgctgaggtcattgatgccaagttccgatatcctctgactggtcttcttttcgtagagttcgattcgaagatgttccccaaccagttacctacgatctcaattcgtaagcgctggaagattgtaaacgttccgtcgaactacgatccagaatcgcgaacatacaacggcaattgggatggcactttcaaaaaagcatggactaataatccggcatgggttctttatgacctcatgattaatcagcgttatggtctggatcagaaagagcttggaatctccgtagacaaatgggcgctctatgaggcggcgcaatattgcgaccagatggtccctgacggcaaaggcggcacggaacctcgctacctttgtgacgtgataatccagtctcagactgatgcgtacaaggtggttcgagatatttgctcaatcttccgtggaatgagtttttggaatggtgaaagcatttctgtaatcatcgacaggccgcgtgaacctgcgtacatcttcactaacgacaacgtagttaatggtgacttctcatatactttcgcaagcgagaagagcatgtacacgacgtgcaacgtgatgtttgatgatgagcaaaacatgtatcaacaggacgttgagccagtattcgatcgtgaggccactctacggttcgggaacaacgtaacgagcattacagcgatcgggtgcacacgtcgaagcgaggccaaccgacgcgggagatggattctgaaaaccaacctccgcagcactacggtaaacttcgctaccggactggaagggatgattccgacaatcggagacgtggtggcaatatctgataacttctggtcaagtaacttgacgatgaacctgtcagggcgattgctcgaagtgtcaggtagtcagattttcctgccgttccgcgttgatgcgcgcgcaggtgactttattatcgtaaataagccagatggcaagcccgtgaagcgcacaatctcaagtgttagtgcggatggtaagaccatagagattaacatcggctttggctttcctgtgaagcctaacacggtattcgcaatcgaccgcaccgaccttgcgttgcagcagtacgtagttacaaaaatcgacaagggcgatgatgatgaggaatttacctacaaaatcacggcggtggagtacgatcctaataagtacgatgaaattgattacggggttaacatcgacgaccgaccgacaagcatcgttgagccagatcagatccctaagcctgaaaacgtgaaagtgtcctcagagtcgagaatcgtccaggggatgagcgtagaaacgatgattgttagctgggataaagtgccgtacgcagttttctatgacgtacagtggagaaaggataacggcaactggcaaaacgttccgcagacagcaaacaaagagctgaaaaagatcgggggcgggggctttggtgagatctacgaggccatggacctgctgaccagggagaatgtggccctcaaggtggagtcagcccagcagcccaagcaggtcctcaagatggaggtggccgtgctcaagaagttgcaaggttcgggcctcgggcagggggatgggaaggaagagatgatgaagccaggggctaagagagggaaggaccatgtgtgcaggttcattggctgtggcaggaacgagaagtttaactatgtagtgatgcagctccagggccggaacctggccgacctgcgccgtagccagccgcgaggcaccttcacgctgagcaccacattgcggctgggcaagcagatcttggagtccatcgaggccatccactctgtgggcttcctgcaccgtgacatcaagccttcaaactttgccatgggcaggctgccctccacctacaggaagtgctatatgctggacttcgggctggcccggcagtacaccaacaccacgggggatgtgcggccccctcggaatgtggccgggtttcgaggaacggttcgctatgcctcagtcaatgcccacaagaaccgggagatgggccgccacgacgacctgtggtccctcttctacatgctggtggagtttgcagtgggccagctgccctggaggaagatcaaggacaaggaacaggtagggatgatcaaggagaagtatgagcaccggatgctgctgaagcacatgccgtcagagttccacctcttcctggaccacattgccagcctcgactacttcaccaagcccgactaccaggaaccctcaggctacacagagctcctctgcccacaccaccctaccagccagcacttctgtctggagtaa

SEQ ID NO: 136334 - DNA, 412 bp, Homo sapiens
ctccagcagctgttgcataagtgaagactgaaccagaaacacctggaccgagttgcctctctcaggagggtcagacagcgagtgaaaacagaagaaagttctgagctgggaaactatgtcattaagatagaccatttagaaactatccagcaactcctaactgcagtagtaaagaagattccattaatcactgcaaaaatggcaaagagcaatgacaatgcgaaaagtcttacaagaaatcctggagaagaatccgagatttcaccacctgactcccctcaaaaccaagcacatcgctcactggtgccgctgtcatggctacaccccaccggaccctgagagcctgaggaatgacggggactccatcgaggacgtgctgacccagatcgacagcgagcccgagtgcccatca

SEQ ID NO: 136335 - DNA, 516 bp, Homo sapiens
gattttcgcctgctggggcaaacaagcgtggcccgcttgctgcaactctctcaggggccaggcggtgaagggcaatcagctgttgccggtctcactggtgaaaagaaaaaccaccctggcgcccaatacgcaaaccgcctctccccgcgcgttggccgattcattaatgcagctggcacgacaggtttcccgactggaaagcgggcaaaaagggaacccgagaatgaggaggaggtggacatcctcagcctctccgagccagtgaagataaacatcaagaaggagcaggaagagaaacaagaggaagtcaagttctacctgccaccaaccccagggtctgaatttattggggatgtcacacagaagaggttggaagaagtggattccaccttcggggatgacttagttcaaggcttcagcggaggaattagccgcaggtatggtgaaaaaccaggagtccaagatttagaagtagagcctgacagtgtgactgaaatgctgcagttttatgattaa

SEQ ID NO: 136336 - DNA, 1197 bp, Homo sapiens
atggcgtggccctgtatcagccgcctgtgctgcctggcgcggcgttggaaccagctggaccgctccgacgtggcggtgccgctcactctgcacggctactcggacctcgacagcgaggagccgggcacgggcggcgccgcctcgcgcaggggccagcctcccgcgggcgcccgggattccggccgggacgtgccgctcactcagtaccagcgggacttcggcttgtggaccacgcccgccgggcccaaggatccgccgccggggcgcggaccgggggcgggcggccgcaggggcaaatcctccgcgcagtcctccgcgccacctgcgcccggcgcccgcggggtctacgtgctgcccatcggcgacgcggacgcggctgcagcagtgaccacgtcgtacaggtatgggctgggtagggaccgcaacgagtccccaccctgtggtgggaggacgcggaggcccggagccagagggatggggtgggcggcagagcggaggcgcctggagcccggatcccacgcgacctcggagctgccggcggcctcagaggtcacccccgtttggtccgtgggcactgcaggcggcgccttcgctgctccatgcccggaaacagtgctcgagcacccccgtgccgggagcgcaccgctgccctcgcagccgccctcctgggggcagccgtcagaatggcctgccttcagccgagttggaaccggcctccctttaactcccaccgccgggcctagccgtgcgaggggtgcgcgcaggccatgtcccccagctctccccggtcactgcctactggatagaacttatactggcttgcagactcttggagcagagacgcttttggctgttgttaatagtgctgctatgaacgtaggtgtacaggtagtggatgttgaactccatcgccattctctcggagaagactgtatctatcctcagtcctcggagtctgacatctctgatgcccctccatctttgcctttgaccattccagccccagtgaaagcttcttcaccaataaagcagtcacatgagccagtacccgatacctctgtggagaaaggcagtcaccgggtcctgcccattccatctttaaggtcccctctcccatctgggctccagccccgggttcctcctctggcggccgccaggattgctgtcgtctgtggctctggtggcttcctgctctga

SEQ ID NO: 136337 - DNA, 831 bp, Homo sapiens
atggataaggatgcagagcatgaaacatacatcctctgcctcctttgtacctctgttgctgctcagtaccgggagcacgcagtatccattttattttcccaatttgttacctttgtcctggtggcactgaccttcttccttgtcctcgacatcttcttacgttccccaatatcaactccaagcccatcaccattgcctcgaaccccgacttccactccagtccacgtgaagcaaggcactgccggctctgttattaataatccttatgttatcatggacaagcagccggggcaggtgattggagccaccactcccagtacaggaagtcctacaaacaagatctccacggcttctcagatctcccaaggaacaggttcccctgttcctaaaattcatggaagtagttttgtaacatctactgtcaaggtgatcatcaaacaggaacctggtgaagcccctcacgtgcccgcaacaggagctgccagccagtcaccactcccgcagtatgtgactgtgaaagggggtcacatgatagctgtgtcccctcaaaaacaggtcataactcctggagaagggattgcccagtcagcaaaggttcagccctccaaggtccttgacagattggatgatgtctgcccacgttggcgagggcggatcttctttactctgtctgctaatccaaatgctggtctcttgcagaaatattttaccaggtatctgggcatccctcagcccactcaagttgacataaaattaaccatcacaacagtacttgatattaaaacctatggaaacaacccaaaccaggctcaagaaaattcaaagctttaa

SEQ ID NO: 136338 - DNA, 5752 bp, Homo sapiens
gactgttaaagattcactccagtcagtccagtccgcagcaggccgtcctgacgattcccagccagctcaaaccactcagcgtaaacacatctggaggggtgcagacgatcctgatgcctgtgaataaagtggttcagtcattttctaccagcaagccacctgccattctgcctgtagctgccccaactccagttgtccccagctctgctccagcagctgttgcaaaaggtgaagatgccagctgcttttctgcaaagtctgtggagcagtactatggctggaacattggaaaaaggagagccgctgagtggcaaagagcaatgacaatgcgaaaagtcttacaagaaatcctggagaagaatccgagatttcaccacctgactcccctcaaaaccaagcacatcgctcactggtgccgctgtcatggctacaccccaccggaccctgagagcctgaggaatgacggggactccatcgaggacgtgctgacccagatcgacagcgagcccgaccatgggtctcttggagacggaaagtcctcttccgttggccccacagctgttgtaacactgcttgcctgtcatttagagtgcccatcatcattctcctctgctgacaacctctgccgcaaactggaggacctgcaacagttccagaaaagggaacccgagaatgaggaggaggtggacatcctcagcctctccgagccagtgaagataaacatcaagaaggagcaggaagagaaacaagaggaagtcaagttctacctgccaccaaccccagggtctgaatttattggggatgtcacacagaagggaggtatgcttgtttggagagaggctgtttctaaagcagcgatacgaacaaacggctttcttctgcttttccagattgggatcaccctgcagcccgtggcactccacaggaacgtgtatgcgtccgtggtggaggacatgatcctgaaggctacagaacagctggtgaatgatatcctgagacaggctttggcagttggataccagacagcttctcacaacaggtattactatctctgcagtctgtggtgtgaggcttacacctctttcctaacagttgaattgcccatgaaggtgttttatacttacatcaatccagtaggagatggaggatcaaagacatgtgatacaatggtttttaatcatcctgctatcaagaaatttttggaatcaccatctaggtcatcatctcctgccaatcagagagcagaaacaccatcagccaatcattcagaaagtgattctttatctcagcacaatgacttcttatctgacaaagataataacagcaatatggatatagaggaaagactctcaaacaacatggagcagagaccaagccgaaatactggaagggatacttctagaattactggctcccataaaacagaacagcggaatgctgatctcacagatgagacttcacgactttttgtaaagaaaacaatagtagtgggcaatgtgtccaagtatatacctccggataagagggaagaaaatgaccagtcaactcataagtggatggtatatgtccgagggtcccgtagagaacccagcattaatcattttgtcaagaaggtttggttcttccttcatcctagctataaaccaaatgaccttgtggaagttagagagcctccttttcacctgaccagaagaggctggggtgagtttcccgtcagagttcaagttcattttaaggacagccagaacaagcggatagatatcatacataatctgaagctggatagaacttatactggcttgcagactcttggagcagagacggtagtggatgttgaactccatcgccattctctcggagaagactgtatctatcctcagtcctcggagtctgacatctctgatgcccctccatctttgcctttgaccattccagccccagtgaaagcttcttcaccaataaagcagtcacatgagccagtacccgatacctctgtggagaaaggattcccagctagcactgaagctgaacgacacactccgttttatgctttgccatcttcattggaaagaacacccaccaaaatgactacatcccagaaagttaccttttgttcccatggcaattcagctttccagccaatagcatcaagctgcaaaattgttccacaaagtcaggttcctaatcctgagtcacctggaaaatccttccagcccatcaccatgagctgcaagattgtgtcaggttccccaatatcaactccaagcccatcaccattgcctcgaaccccgacttccactccagtccacgtgaagcaaggcactgccggctctgttattaataatccttatgttatcatggacaagcagccggggcaggtgattggagccaccactcccagtacaggaagtcctacaaacaagatctccacggcttctcatgatctcccaaggaacaggttcccctgttcctaaaattcatggaagtagttttgtaacatctactgtcaagcaggaggattctttgtttgcatctatgccacctctttgcccaattgggagtcaccctaaggttcaaagccccaaacctataacaggaggacttggagctttcacaaaagtgatcatcaaacaggaacctggtgaagcccctcacgtgcccgcaacaggagctgccagccagtcaccactcccgcagtatgtgactgtgaaagggggtcacatgatagctgtgtcccctcaaaaacaggtcataactcctggagaagggattgcccagtcagcaaaggttcagccctccaaggttgccggggtaccagttgggtctgctttaccttcaacagtgaagcaggctgtggcgatcagtggtggccagatcctggtagccaaggccagctcttctgtctccaaagcagttgggccaaagcaagttgtaacccaaggagttgccaaagcaattgtgagtggaggtggaggaaccattgttgctcagccagtgcagaccttaaccaaggcccaggttactgccgctggtcctcagaagagtggatcccagggttcagtaatggcaacgttgcagctaccagccactaatttggccaacttggcaaatttgcctcctggcactaaactctacctaactacaaacagcaagaaccccttcaggaaaaggaaacctgctgttgttccctcaagaacccatcatgtgagttacgagcaatgctaatttccagtatggctcacctaccagtggtggaagtggtctcggagcagcaggaggagaaggaggaggaggcggcagtggcagcggtggaggcgtcagcacaggaggaggaggaggaacagcaggaggaggaactcaaagtattgctggccctggagggatatctcagcacctgacttacacatcttacatcttcaagcaaactccccagggcacttttttagttggccagccatcaccccagacttctggaaaacaactcacctctgggtcagtggtccaaggaacactgggagtatactcatcttctgcacaaggacaacaaacgctaaaagtcatctctggacagaaaaccacattgtttacacaggcagcccatggaggacaggcatctctaatgaaaatatccgatagcaccttgaagactgtgccagccacctcacagctctcgaagcctggaaccacaatgctgagagtagcaggaggggttatcacaactgccacttcccctgccgtggccctctcagcaaacggtcctgcacaacagtctgaaggagtggctcccgtggtcttcatcttacggttcagttctgtaacgaaaacttcttgggcagcagcaagtgttgtgtgagccaggccaccgtgggaacctgcaaggctgccacccccaccgtcgtcagcgccacgtccctcgtgcctacaccaaaccccatctctgggaaagccacagtatccggactgttaaagattcactccagtcagtccagtccgcagcaggccgtcctgacgattcccagccagctcaaaccactcagcgtaaacacatctggaggggtgcagacgatcctgatgcctgtgaataaagtggttcagtcattttctaccagcaagccacctgccattctgcctgtagctgccccaactccagttgtccccagctctgctccagcagctgttgcaaaagtgaagactgaaccagaaacacctggaccgagttgcctctctcaggagggtcagacagcagtgaaaacagaagaaagttctgagctgggaaactatgtcattaagatagaccatttagaaactatccagcaactcctaactgcagtagtaaagaagattccattaatcactgcaaaaagtgaagatgccagctgcttttctgcaaagtctgtggagcagtactatggctggaacattggaaaaaggagagccgctgagtggcaaagagcaatgacaatgcgaaaagtcttacaagaaatcctggagaagaatccgagatttcaccacctgactcccctcaaaaccaagcacatcgctcactggtgccgctgtcatggctacaccccaccggaccctgagagcctgaggaatgacggggactctatcgaggacgtgctgacccagatcgacagcgagcccgagtgcccatcatcattctcctctgctgacaacctctgccgcaaactggaggacctgcaacagttccagaaaagggaacccgagaatgaggaggaggtggacatcctcagcctctccgagccagtgaagataaacatcaagaaggagcaggaagagaaacaagaggaagtcaagttctacctgccaccaaccccagggtctgaatttattggggatgtcacacagaagattgggatcaccctgcagcccgtggcactccacaggaacgtgtatgcgtccgtggtggaggacatgatcctgaaggctacagaacagctggtgaatgatatcctgagacaggctttggcagttggataccagacagcttctcacaacaggattcccaaagaaattacagtgagtaatattcaccaggccatttgcaacattccttttctggacttcctcacaaacaaacacatgggaatattgaatgaggaccagtgagcggagtgaggtgccctggagaagcaggctttgaaggcacagcgaagctgtaactgaggaccctgctgcttgggaaggaggtggtttccagtgtgactcggcatgtcatggctacccaacctttgccgctgcctgttcccacgtgtcaccagcacgctgcactccagatgaaatcctcctaggacaggagtttgtttcctgagtgtggagtgaggctggcagtggatccgtgctttgtcggccagcgtttctgcagtctttgtaaaggccccacgagagcgggccaggccgtgtgcctcaggcccttctccctgggtgtgcttaagggggctccttgggcccgcctccccaggaggtagaaaatgagtggcaggctagagatttcacccattttgtgggctggagttaccagtagctccagcagttaccctgaagagagattgggcttcagccttcagcaggtggttctctcccatgcctggccttggtgtggaggggctgtactctgagcccaagtgagtcagctataggaagaggccatacctagagccaagaaccatgaaggcctgagagacggcagactgagcaaaattccttttttgagcacgagagcattactaga

SEQ ID NO: 136339 - DNA, 1100 bp, Homo sapiens
  misc_feature (1)...(1100): n = a,t,c or g
tctagtgtggtggaattcgccgccgccgcgcgcgcgntacgctctccaacgccagcccagcgccgcctctcgctcgccgagctccagccgaaggagaaggggggtaagtaaggaggtctctgtaccatggctcgtacaaaagcagactggcccgcaaatcggaccggtggtaaagccccccaggaagcaactggcttacaaaaagccggcttcgcaagagtgcggccctctaactggaggggtgaagaaacctcatcgttacagggcctggtactgtcggcggctccgtgaaatttagacggttatcagaagtccactcgaacttctgattcgcaaacttcccttccaagccgtctggtgcgagaaattgctcaaggactttaaaacaagatcttgcgcttccagagcgcagctatcgggtgctttgcaggaaggcaagtggaggcctaatctggtttggccttttttgaaggacaccaacctggtgtgctaatccatggccaaacgtgtaacaattattgccaaaaagacattccagctagcaccgccgcataccgtggagaaccgtgctttaaggatccactcatggatggggaaacatttcatttctcaaaaaaaaaaaaaaaatttctcttcttcctgttattggtagttctgaacgttagatattttttttccatggggtcaaaaggtacctaagtatatgattgcgagtggaaaaataggggacagaaatcaggtattggcagtttttccattttcatttgtgtgtgaatttttaatataaatgcggagacgtaaagcattaatgcaagttaaaatgtttcagtgaacaagtttcagcggttcaactttataataattataaataaacctgttaaatttttctggacaatgccagcatttggatttctttaaaacaagtaaatttcttattgatggcaactaaatggtgtttgtagcatttttatcatacagtagattccatccattcactatacttttctaactgagttgtcctacatgcaagtacatgtttttaatgttgtctgtcttctgtgctgttcctgtaagtttgctattaaaatacattaaactat

SEQ ID NO: 136340 - DNA, 570 bp, Homo sapiens
attaaaattggcattctttctctagagactcaagtcctggcagagctggtgatcctatcacacgattctgtcataaccacaatggacactgccagccatagccttgttcttctccagcagctgaacatgcagcgagaatttggttttctgtgtgattgcacagttgcaattggagatgtttacttcaaagcccacagagcagtgcttgctgctttttctaactatttcaagatgatatttattcaccaaacaagacagcaaatcacccaccttgaggtcataaaggagctggaagctgctgggtgcttgtgctgctctctggacggcctgagccagggctaaggcacccttgcccccttttgcccagtgagtgcacttcacggcatcaaaagccccatgttctctggaaaggcggctgatgaggtccagctcagactctgtatccgtcctataaaggaagcatttcatatcaaagcatggaaaatggctggagagacagaattgtcttctttttgccattaaacctcatgtgaattacccactgataaacgaacactaaccaagaaaaaa

SEQ ID NO: 136341 - DNA, 1460 bp, Homo sapiens
tgagcccgcccctcctgcacggaggagtctgtctgccgccgcggcggcatctggaaccactgtggacactgccagccatagccttgttttttctcagcagtttgaacatgcagcgagaaattggttttcgtgtgaattgcacggttgcaatgtgagatgtttacttcaaagcccacagagcagtgcttgctgctttttccaactatttcaagatgatatttattcaccaaacaagtgaatgcataaaaatacaaccaactgacatccaacctgacatattcagctatttgttgcacattatgtacacggggaaagggccaaaacagattgtggatcatagtcgtttggaggaagggattcgatttcttcacgccgactacctttctcacattgcaactgaaatgaatcaagtgttctcaccagagactgtgcagtcctcaaatttatatggcattcagatctcaacaacccaaaaaacagttgtcaaacaaggactggaggtcaaagaagctccttccagtaacagtggaaacagagctgctgtccagggtgacctcccccagttgcagttgtctcttgctattggtctggatgatggcactgcagaccagcagagggcctgtcctgccacccaggccctggaggagcaccagaagcccccagtttccatcaagcaggagagatgtgacccagaatctgtgatctcccagagccacccctcaccctcatcagaagtgacaggccccacttttactgaaaacagtgtcaaaatacacttatgccattactgtggggaacgttttgattcccgtagtaacctaaggcaacatctccatacacatgtgtctggatccctgccattcggtgtccctgcttccattctggaaagtaatgaccttggtgaagtgcatccccttaatgaaaacagcgaggcccttgaatgccgcaggctcagctccttcattgttaaggagaatgaacagcagccagaccacaccaaccggggtaccacagagcctttgcagatcagtcaagtatctttgatctccaaagacacagagccagtagaattaaactgtaatttttctttttcaaggaaaagaaaaatgagctgtaccatctgtggtcataaattccctcgaaagagccaattgttggaacacatgtatacacacaaaggtaaatcttacagatataaccgatgccaaaggtttggtaatgcattggcccagagatttcagccatactgtgacagctggtctgatgtctccctgaaaagttctcgcttgtcacaagaacacttagacttgccttgtgccttagagtcagagctcacacaagaaaatgtggatactatcctagttgagtagcagcttctctttcagaatttttataccaattctgaaaaagaaaatttgcgtggcatttttaattcataaattattttcctcctcaagttt

SEQ ID NO: 136342 - DNA, 1675 bp, Homo sapiens
  misc_feature (1)...(1675): n = a,t,c or g
atgaggcctgcagccatcataccagctgctgtgggtctgggaatggcctctgagaacaaggtctgcagatggagatggtatctcagtttggacatgaagagaagaccgctcctgtgtccacgcatggagaagaaccgctggccctccctggtcgtctgtccactagggcatctgcctctgcgttcttgtgccctggtttctgagtgcagaaccactaaaatcctggcttctttcctcagcatcctggcgaggtcaaacacaaactccttcaatttaggatttatggtccttaacaatcgccagctggagcccttgggctttggacagtttttcagaattaagacagggaaacctttctctagtccacagcaaggcgggggaaaagccgcagccgtcctgccgtcgctctccaacgccagcccagcgccgcctctcgctcgccgagctccagccgaaggagaaggggggtaagtaaggaggtctctgtaccattggctcgtacaaagcagactgcccgcaaatcgaccaattggtaaagtcacccaggaagcaacttgcctacaaaaagcctgctcgcaagagtgcgcacgtctactggaggggtgaagaaacctcatcgttacaggcctgggtactgtgggcgctccgtgaaatttagacggttatcagaagtcccactgagacttctgatttcgcaaacttcccttccaagccgtctgggtgcgagaaaatttgctcaaggacttttaaaaacagatcttgcggtttccagagccgcagctatcgggtggctttgcagggagggcaagttgaggccctatctggggttggccttttttgaaagacaaccaacctgttgtgctaatccatgcccaaacgtgttaacaattattgccaaaaagacattccagctaagcacgcccgcataccgtggagaaccgtgctttaagcaatccactcatggatggggaaacattttcatttctcaaaaaaaaaaaaaaaaaatttctcttcttcctgtttattggggagttctgaacgtaggatatttttttccccatggggtccaaaaggttaccctaagtattatggatttgccgaagtggaaaaaatagggggaccagaaaatcagggtattggcaggttttccccattttccattggtgtgtgaatttttaatattaaatgcgggagaccgtaaagcattaatgcaagttcaaaatgtttcaggggaacaagttttcagcgggttcaacttttataataattataaataaacctgttaaatttttctgggacaatgccgagcatttgggattttttttaaaacaagtaaatttcttaattgatggcgaactaaatggtgtttgtagcatttttatcatacagtagattccatccattcactatacttttctaactgagttgtcctacatgcaagtacatgtttttaatgttgtctgtcttctgtgctgttcctgtaagtttgctattaaaatacgattaaactataaaaaaaaaaaaaaaaaaaaaaaaaaaaaaaaaaaaaaaaaaaaaaaagaaaaaaaaaaaaaaaaaaaaaaaaaaaaattaanaaggggggcccccttaaaaaaaaaaaaaaaaaaaacacggggggggggaaaattttttttttttttaggggccccccatt

SEQ ID NO: 136343 - DNA, 281 bp, Homo sapiens
cggcacgaggacattgaacagttctctacggtcaagggcgtggagctggagcctaccgaccaggacttccactgccccggccggcccagataggtctgcctctgccttccagctcccacagcctggtccctgatactgggctctgtcctgcagacacctctttcagaaacgcccaagcccagcccctaggagggggtggggcatccctggtcaaccctcaaacattccggactcccctcataacaatagacacatgtgcccagcaaaaaaaaaaaaaaaaa

SEQ ID NO: 136344 - DNA, 221 bp, Homo sapiens
ctgtacacgatgcgtcccggtgcaggtcctccaggccacagcagatctcggcggcgtagaagaggcccgcgcttcggggaagccagcctggcccatgtggtagatgtggaactgaggtcgcccccgttcatcagtgtcagcaccaggcacagcgcgtcctccccaaagccacctttgccaggactcggtattgcctgaaggtgtttttggtcactggctgc

SEQ ID NO: 136345 - DNA, 261 bp, Homo sapiens
ggacctgaagcccgagaacatcttgctggatgaccacgtgtgtaagggtgcctgggctccggaggtggtgaagatgaacggtacacgttcagccctgactggtgggcgctcggctgcctccttacgagatgatcgcaggccagtcgcccttccagcagaggaagaagaagacaagcgggaggaggtggagcggctggtgaaggaggtccccgaggagtatccgagcgcttttccccgcaggcccgctcactttgctcacag

SEQ ID NO: 136346 - DNA, 2947 bp, Homo sapiens
  misc_feature (1)...(2947): n = a,t,c or g
gcgcggtcactgcgagccgagccgagccgcgccgagccgcgccgatcgccatccggcctcggcactcgcgcgcgatcccggccggcggcgcggcccggcgggccaggcggcgccacagcccatggagcccgagaacatcgtagcgaacacggtgctactcaaggcccgggaaggtggcggtggaaatcgcaaaggcaaaagcaagaaatggcggcagatgctccagttccctcacatcagccagtgcgaagagctgcggctcagcctcgagcgtgactatcacagcctgtgcgagcggcagcccattgggcgcctgcatgttctgagagttctgtgccaccaggccggagctgagccgttgcatcgccttccaggatgggatggccgagtatgaagcgaccccggatgagaagcggaaggcatgtgggcggcggctaatgcagaattttcttgagccacacgggtcctgacctcatccctgaggtccccccggcagctggtgacgaactgcacccagcggctggagcaggggccctgcaaagaactctcccaggaactcacccgggtgacccacgagtacctgagcgtggccccttttgccgactacctcgacagcatctacttcaaccgtttcctgtcagggaaaggggttggaaagggaagcaattgaccaaaaacacccttaggcaataccgagtcctgggcaaaggtggctttggggaggtgtgcgcctgccaggtgcgggccacaggtaagatgtatgcctgcaagaagctagagaaaaagcggatcaagaagcggaaaggggaggctcatgtcgctgaacgagaagcagatcctggagaaagtgaacaagtaggtttgtagtgagcttggcctacggctagtgagaccaaggaccgcgctgtgcctggtgctgacactgatgaacgggggcgacctcaagttccacatctaccacatgggccaggctggcttccccgaagcgcgggccgtcttctacgccgccgagatctgctgtggcctgggaggacctgcaccgggagcgcatcgtgtacagggacctgaagcccgagaacatcttgctggatgaccacggccacatccgcatctctgacctggggattagctgtgcatgtgcccgagggccagaccatcaaagggcgtgtggggcaccgtgggttacatggctccggagtgtttgaagaatgaacggtacacgttcagccctgactggtgggcgctcggctgcctcctgtacgagatgatcgcaggccagtcgcccttccagcagaggaagaagaagatcaagcgggaggcaggtggagcggctggtgaaggaggtccccgaggagtattccgagcgcttttccccgcaggcccgctcactttgctcacagctcctctgcaaggaccctgccgaacgcctggggtgtcgtgggggcagtgcccgcgaggtgaaggagcaccccctctttaagaagctgaacttcaagcggctgggagctggcatgctggagccgccgtttcaagcctgacccccaggccatttactgcaaggatgttctggacattgaacagttctctacggtcaagggcgtggagctggagcctaccgaccagactttctaccagaagtttgccacaaggcagtgtccccatccctggcaagaacgagcagatggtggagaccgagtgcttccaggagctgaatgtctttgggctggatggctcagttcccccagacctggactggaagggccagccacctgcacctcctaaaaagggactgctgcagagactcttcagctcgccaaaggattgctgtggaaacctgcagcgacagcgaggaagagctcccctacccgcctctagcccccagcccgaggcccccaccagcagttgggcggtagcagctactccgagcgccgtttacagttttgcacagtgatcttccccattgtccactcaagtcgtggcctggggaacacagacggagctgtccccagtgtcctccgtccctcagcccctggcctggctgagtttggcagggcctgggccatccctgggacaaaggtgcgtcccttcagctcttctccgtggagctcggggctttctgtatttatgtatttgtacgaatgtatataagcgacaagagaattcttaattcccgccgcagacctggcgcccccgccttggctcctgggggcaagccagccctggctgggagagcgggagctgggcagaggagccactgccaaactcaaggctcctctggcccagcttggatggctgagggtggtcacacccctgagccttcagcactgtgctggccaccccggcctctgagtaagactcgtgcctccccctgctgccctgggctaaaggctgctaccctctggggcccaaagctgtcccttctcagtgcttgtcagcgctgggtctggggcctctgtatgccctaggcctgtgccaaagtggccagagattgggctgcctgtgatacccaatcagcccaactgccccggccggcccagataggtctgcctctgccttccagctcccacagcctggtccctgatactgggctctgtcctgcagacacctctttcagaaacgcccaagcccagcccctaggagggggtggggcaaatcncctggtcaaccctcaaacattccggactcccctcataacaatagacacatgtgcccagcaataatccgccccttcctgtgtgcgcctgtggggtgcgtgcgcgcgcgtgtgtacctgtgtgggtgaaggggatagggcgaggctgtgcctgtgccccaggtcccagccctggcccttcccagactgtgatggccatcctggtcccagtgttagggtagcatgggattacagggccctgttttttccatatttaaagccaatttttattactcgttttgtccaacgtaaaag

SEQ ID NO: 136347 - DNA, 403 bp, Homo sapiens
tttcgtgcccgtaagatgctctgacctttgatcctgccgttcagctctagggcccgtgcaggccacaccatgaacacctccccaggcgcggtgggcagtgacccggtcatcctggccactgcaggctacgaccacaccgtgcgcttctggcaggcccacagcggcatctgcacccggacggtgcagcaccaggactcccaggtgaatgccttggaggtcacaccggaccgcagcatgattgctgctgcagctacgacggcgtcaacaagaacatcgcgtctgtgggcttccacgaagacggccgctggatgtacacgggcggcgaggactgcacagccaggatctgggacctcaggtcccggaacctgcagtgccagcggatcttccaggtgaacgcacccat

SEQ ID NO: 136348 - DNA, 1560 bp, Homo sapiens
tcagtctgggaggtaataaaagcagaccgacacgcagatgttgctcgggaagcagatgtcgatgcagagataaatcagccgctgtctccggggccctgtggcgagggtgccgtgaatctccaagggctccgcccccagctcctcaaaccatcccgagggcctggccttcccccacagcggtcctgactcaccctctgctcgccgggcccagtagatgggggtcctcatgcacaggcgctgcaccaaagcccccgcctgggcggggtccacttcgaggctcccctgcactgccagcagctcctgggtgtggtgggtgtcctggctggggacccaagcctcttggaccttggaggtatccaccagcagccgcagggtctcccgatcactgtcctccatcaggcggaggaagcagacctggtgctcctcagggcggtaacagatgcagccgctctgcccgtcgaacagcaccgcccagctgtggttgctctgaggtggggtcactgtgatggtcgccgcgttccgggccacgtccaccaggatggtttggttgggccggggcatgtgggggctcgggagggtcattcgcagcgtctgcagccttggcttgggagggccctgagcagagccaagaagccctccagccacaatccccacagcggccagcaccagcagcagcagcagcaggagcaggcccacggctctccagcccccgcaggagggcttggtcttcacctggatgacaggcattccttggccaacacatgcttcagccgcgctgccggctgcagggcacagaggctccttcagtggaattttgccttgaagggcaggcaaaaggtcggctatgctgtcaacatagaagtcagggaccattttcttcttagacacgcagtcactttcctgattattcttcacatcccctagagtggagactccggtgagggtcaggatggtcttcaggccacaggtggcgcctaggaggatgtctgtgtccaggcggtctcccaccatgacggtgcgctcggggttgatgccgtattcctgggacacgcagtcgaaaatgaagcggctgggcttcccgatgatgtcggcctggcgctgggcggccatctccacggctcggaccagacacccggtacgtcgggctccagcggcgcgtgcagccagtcgccgggaccctcgcccctgcagtggctcgggccccacgcccacgctggcgacgcccacggcctccagctccgcggccagggctgggctgcccagcacgtaggccttgggcgcgggggcgccggccaggcgctggcgcaggtagagcgcggtgcagtaggccgtgccgaagacctccaggctggcgccgggccccgcggggccgccgaagcccaggcgccgcagcttctcggcgtaggcagcgcgggtcttgctgctgttgttggtgatgaagcccaggcggccgtcgcagtcgaacagcagcgtgtccacgtcggccagcagcgcctgtgcccgctcggcgctcagccgcacgcagcgggcgtcgtcgccaccggcctccgccgccgccat

SEQ ID NO: 136349 - DNA, 2205 bp, Homo sapiens
atggctggttcgtgttacctccaaggaaccgggaacgcgtttttgcaaaggactgaggcgcgtactcacgcctgccggggaaggagccccgggctggctcgcgggactggccggctgaccactcgcttccaatgggtgagcggcccgcggcagcccgggaacagcggccttgcgcctgcgctgctctcccctctgccgcatttccgcagcgagcgcttcactccgaatgccggttggagccctgccagccaatcaccggggcgtcccaaggccgcccgcgggaggcgggggcggattggcgaaggtgcaggccaatgggcggcgggcgcgaggcgctgggccaatgagcgcgccgggggcggggagggcgccgcggcgggcggctgcgaggagcggccggcgggcggcggcggccggcgggcggcgatggcggcggcggaggccggtggcgacgacgcccgctgcgtgcggctgagcgccgagcgggcacaggcgctgctggccgacgtggacacgctgctgttcgactgcgacggcgtgctgtggcgcggggagaccgccgtgcctggcgcgcccgaggccctgcgggcgctgcgagcccgcggcaagcgcctgggcttcatcaccaacaacagcagcaagacccgcgctgcctacgccgagaagctgcggcgcctgggcttcggcggccccgcggggcccggcgccagcctggaggtcttcggcacggcctactgcaccgcgctctacctgcgccagcgcctggccggcgcccccgcgcccaaggcctacgtgctgggcagcccagccctggccgcggagctggaggccgtgggcgtcgccagcgtgggcgtggggcccgagccactgcagggcgagggtcccggcgactggctgcacgcgccgctggagcccgacgtgcgcgcggtggtggtgggctttgacccgcacttcagctacatgaagctcaccaaggccctgcgctacctgcagcagcccggctgcctgctcgtgggcaccaacatggacaaccggcttccgcttgagaacggccgcttcatcgcgggtaccgggtgtctggtccgagccgtggagatggccgcccagcgccaggccgacatcatcgggaagcccagccgcttcattttcgactgcgtgtcccaggaatacggcatcaaccccgagcgcaccgtcatggtgggagaccgcctggacacagacatcctcctaggcgccacctgtggcctgaagaccatcctgaccctcaccggagtctccactctaggggatgtgaagaataatcaggaaagtgactgcgtgtctaagaagaaaatggtccctgacttctatgttgacagcatagccgaccttttgcctgcccttcaaggcaaaattccactgaaggagcctctgtgccctgcagccggcagcgcggctgaagcatgtgttggccaaggaatgcctgtcatccaggtgaagaccaagccctcctgcgggggctggagagccgtgggcctgctcctgctgctgctgctgctggtgctggccgctgtgggggttgtggctggagggcttcttggctctgctcagggccctcccaagccaaggctgcagacgctgcgaatgaccctcccgagcccccacatgccccggcccaaccaaaccatcctggtggacgtggcccggaacgcggcgaccatcacagtgaccccacctcagagcaaccacagctgggcggtgctgttcgacgggcagagcggctgcatctgttaccgccctgaggagcaccaggtctgcttcctccgcctgatggaggacagtgatcgggagaccctgcggctgctggtggatacctccaaggtccaagaggcttgggtccccagccaggacacccaccacacccaggagctgctggcagtgcaggggagcctcgaagtggaccccgcccaggcgggggctttggtgcagcgcctgtgcatgaggacccccatctactgggcccggcgagcagagggtgagtcaggaccgctgtgggggaaggccaggccctcgggatggtttgaggagctgggggcggagcccttggagattcacggcaccctcgccacagggccccggagacagcggctgatttatctctgcatcgacatctgcttcccgagcaacatctgcgtgtcggtctgcttttattacctcccagactga

SEQ ID NO: 136350 - DNA, 3121 bp, Homo sapiens
atgcggaaaaatccacgacgtcggagtctcctaggagtgcctaacagtgagaccggcgaacccggacaacgaccaagaatagaacggaggacaggaagaggagaaaagacacgaacaagagagcaaggaaggaagacagacgaacagctaaaggcagaaagggaaagagagcacagaaacagcaagaagaagcgcaagaacaaagaagggaacagagaaaagaggcaaaaaacaagccaaaaccgagaaacccgcacagcgcacccgaaagaagaggaaaaagacagacgacgaaggagagagccagacacagcgccagaaaaagaagaagcaaagggcgaagaacaggcaaagaagacaagaaaagcacagaaacaacagagagacaagaaaacgagcgcacgacacaaaaaaaaaagaaagagacgagaagaacaaaaaaaaaacaaaggacagagaaacggagacaagaagaacgagagcggagaacgcaggaaaagaggaaaaaaggaagaagagagacgagagaaaacgaaacaagggaggagcaagaaaaacaaacaacgaaggaaaaaaagaaaaagagaaaaaggaacaaggaaaagacacagagagaaacgacagaaacgaagcgaagcaaagacgaaaaagaacaacaaaaggaaccacaacaccacacaaagaaaagacagcagaaaccaacagaagaagaaaaaaggaaacaccagaaaaggacacaccgaagagcgcggcgcgcacgaggagaaagggcgacccagagcgagcacggagagagcaggaccacgggcccgggcgcgcggcgggcgcggggcgggggcgcggcacctggcgccgcctcccggacgccggggtccgctcccgggccgccgacctccgggctccctggtggtcccccaagcccccaaagctctgggagccatcgataactctacgctcggcctcgatcgactcgctccggctcccctcgccgtcctggacacggcggagtgcggagccgcccgtaagggcctgccgctggcctgctacgcatgcgcagccgcagcgctcggctttccccggcccatccgccgccttgcgcacgcgcagcccgcccctgcggcagagtggcgcccgcgcgtgactcccccctgccggctgcggagggcccgtgcaggccacaccatgaacacctccccaggcacggtgggcagtgacccggtcatcctggccactgcaggctacgaccacaccgtgcgcttctggcaggcccacagcggcatctgcacccggacggtgcagcaccagggactcccaggtgaatgccttggaggtcacaccgggaccgcagcatgattgctgcttgcagttcagcctgtgtccctaggttaccagcacatccgcatgtattgatcttcaactccaattaaccctaaaccccatcattcagcttacggacgggcgtcaacaaggaacattgggttttgttggggttttccacggaagacggccgctgggatgtttacacggggcggcgaggaattgcacagccaggatctgggacctcaggtcccggaacctgcagtgccagcggatcttccaggtgaacgcacccattaactgcgtgtgcctgcaccccaacccaggcagagctcatcgtgggtgaccagagcggggctatccacatctgggacttgaaaacagaccacaacgagcagctgatccctgagcccgaggtctccatcacgtccgcccacatcgatcccgacgccagcttacatgggcagctgttcaatagcaccggaaactgctatgtctgggattttgacgggggggcattggtgacgaggtgacccagttcatccccaagactaagatccctgcccacacgcgctacgccctgcagtgtcgcttcagccccgactccacgctcctcgccacctgctcggcctgattaagacggtgaagatctggaggacgtccaacttctccctgatgacggagctgaagcatcaagagcggcaaccccggggaagtcctcccgcggcttggatgtggggctgcgctctcatcgggggaactcccagtaacatcgtcactgcttcctcgaacaacctggcccgtctctggtgtgtgaagactggagagatcaagagagagtatggcggccaccagaaggctgttgtctgcctgcccttcaatgacagtgtgctgggctagcctgtgacccctcgggacctgcctggtgcaggtggtggcagcttggagggacccatgcagcacccaggtcagagcagacccttccccctgcccggcttgcgccaagctggacctgatggccccctgtggcgccttgacttgctgggccaggctgcccctgggactctcagcccccaagttgcttatccagatgtgacagagctcgacaccaagccaggctgcacactccctggactgggctaaacctgcactgccctgggaaaaagtcggccgagggcccaaagctgctgaaggggtctgaagctggtgcccaccccccagctaagtgtgttctctgcccctccctgcccgcgtttcagggcctcggtccatagagaacacccaccaccatggccaaggtggaagggtttattagtccctgccagcagctgtcctccctggtgcaggtggcctggccagcccactggattggggacgggccagggtgtggccaggtcgggggcttcagtctgggaggtaataaaagcagaccgacacgcagatgttgctcgggaagcagatgtcgatgcagagataaatcagccgctgtctccggggcccctctgctcgccgggcccagtagatgggggtcctcatgcacaggcgctgcaccaaagcccccgcctgggcggtagccacttacgaggctcccctgcactgccagcagctcctgggtgtggtgggtgtcctggctggggacccaagcctcttggaccttggaggtatccaccagcagccgcagggtctcccgatcactgtcctccatcaggcggaggaagcagacctggtgctcctcagggcggtaacagatgcagccgctctgcccgtcgaacagcaccgcccagctgtggttgctctgaggtgg

SEQ ID NO: 136351 - DNA, 445 bp, Homo sapiens
  misc_feature (1)...(445): n = a,t,c or g
atttcgtggcaggggcagcgctgccgccggggcctggggctgacccgtctgacttcccgtccgtgccgagcccactcgagccgcagccatgtctggggacgagatgatttttgatcctactatgagcnnnnnnnnnnnnnnnnnnnnnnnnccttttatgttagatgagggaggggatacccaaacagaggaaacccagccttcagaaacaaaagaagtggagccagagccaactgaggacaaggatttggaagctgatgaagaggacactaggaaaaaagatgcttctgatgatctagatgacttgaacttctttaatcaaaagaaaaagaagaaaaaaactaaaaagatatttgatattgatgaagctgaagaaggtgtaaaggtagtattgctttcttgttgaaggtaaaatttgacctcttgcaaggttgctaatggctgn

SEQ ID NO: 136352 - DNA, 2007 bp, Homo sapiens
taacggccctgaattcccgggtcgacgatttcgtgagagggcggggtgtcgtttcctttcgctgatgcaagagcctagtgcggtggtgggagaggtatcggcaggggcagcgctgccgccggggcctggggctgacccgtctgacttcccgtccgtgccgagcccactcgagccgcagccatgtctggggacgagatgatttttgatcctactatgagcaagacatgaaaaagaagaagaagaagccttttatgttagatgaggaaggggatacccaaacagaggaaacccagccttcagaaacaaaagaagtggagccagagccaactgaggacaaggatttggaagctgatgaagaggacactaggaaaaaagatgcttctgatgatctagatgacttgaacttctttaatcaaaagaaaaagaagaaaaaaaactaaaaagatatttgatattgatgaagcttgagaaaggtgtaaaggatctttaagatctgaagtgatgttcaagaaccaactgaaccagaggatgaccttgacattatgcttgggcataaaaagaagaaaaagaagaatgttaagttcccagatgaggatgaaatactagagaaagatgaagctctagaagatgaagacaacaaaaaagatgatggtatctcattcagtaatcagacaggccctgcttgggcaggtctcagaaagagactacacatacgaggagctgctgaatcggagtgttcaacatcatgagggaaaaagaatccaggatattggttgcctgggggacgaaaaaggaaatttggtccatggaaacctccacaagtccgtccgagtaggaaccaagaaaactttcttttgtccacttttacaggatatctgtaaactattacatcgttcagcccaaagcatctcctttgcatttttgttgggctgaattggggtaccaagtggttctatagatgggtaataacccaacttgtaatcaaagggaaggtttccaacagaaacagatagaaaatgtcttgagaagatatatccaaggaatatgtcacttgtacacacatgcccgatcaccggacacaaatcctgccagaaggacacacgactcctattcccctacagtgcggaaacttgttcattcttagatgtttctgttggccagtattcaaaaccggccttccccaggctgtccacgggcaaagccgaggcacagctcccgtgcccaaagcctaacctaatttgcctaatcactgatttctgcaaagctttgttgtggagatggtggctgggacagggtttgcccatcaagacgtggatataccggttggtattaaaaaacaagataaaaaaagctgcccaagatttttgggcgagttggttgggtctgaagtccttgcaagaccgctgatggctcaagctgtttgacatacttcattggcctacttttaacacctggtccagagaaacgtggtttggggggtaaggatggtgctttctcaaaatcgttcatagacttctctaaaatccaagataaattaacgctactctaacacgtgattctttcaatttggtttgcccttcagttttcttttctataaaggcgcttggtgaaatcagcaagaaaccaaccatataaaacagtgtgtgccgggctctgactgagaaactgaacaatggcaggcgctttatctgggcagccatttttcttctctgcttctcttgagacacatagttaaaggagacacggcctcccacgcgagtgtggtgggaccttgagacttaggaggattgcctgttttcagtgtccagggaatgactccatagatttgaattcttttccgtatgtggggatggttgctactacctcaccgccaagtcctcccccaagctgttaccacatgaagggaatacaaggtgctaggtaccctccttcctccgtttggccactaaagaggtcttagaaacatagcctgtaaatggtgtcttgtaactggcacactaaaaaagg

SEQ ID NO: 136353 - DNA, 439 bp, Homo sapiens
gtaccaatgccatcatggataagatgcgggtgatggcctacgccggcagcggaactatgctggccgctgggatgtcctgatccagcaggccacccagtgcctcaaccgcctcatccagattgctgcccgcaagaaacgcaactatatcctagatcagacaaatgtttatgggtcagcccagagacgaaaaatgagaccatttgaaggcttccagcgcaaagctattgtaatttgtcccactgacgaggacctaaaagaccgaacaataaagcgaaccgacgaggaagggaaggatgtcccagatcatgcggtctcccaggtgccagacccaaaagcttttcctacagtgataccctttatttttacttccccttgactcatatgttttaacatgattttaacaaactgcacttattaagaaatgtgtttgccctgttta

SEQ ID NO: 136354 - DNA, 419 bp, Homo sapiens
cattgctcctatatccattgaggagtctccctgaaaatcctctgaggttagtacagcagatttactccttcctgaagggaagctcagagaagtagaatgacttgcccagggtcccactgctagagttgggagtaggtcttttgcctccaaaccagtactcttgctccagagctaagccgtgtctcacatgtggactaacaatgtctttggacggtgcccagcagggattctggtgaaggtcaagaccacaatttccccatactgactgtaaggcagaattagatgcacactccaaagacttacaggtgtcaatagcaacaagggtatcatcaaagtcatcttcatcctcttcagcaggaggctgaggagagcggcccctgtactagaaccaggggttaagtcatacaagaacaatggat

SEQ ID NO: 136355 - DNA, 3247 bp, Homo sapiens
gctgggcaaagccggtggcaagggcctcccctgccgctgtgccaggcaggcagtgccaaatccggggagcctggagctggggggagggccggggacagcccggccctgccccctcccccgctgggagcccagcaacttctgaggaaagtttggcacccatggcgtggcggtgccccaggatgggcagggtcccgctggcctggtgcttggcgctgtgcggctgggcgtgcatggcccccaagggcacgcaaggctgaagaaagtcccttcgtgggcaacccaagggaatatcacaggtgcccggggactcacgggcacccttcggtgtcagctccaggttcagggagagccccccgaggtacattggcttcgggatggacagatcctggagctcgcggacagcacccagacccaggtgcccctgggtgaggatgaacaggatgactggatagtggtcagccagctcagaatcacctccctgcagctttccgacacgggacagtaccagtgtttggtgtttctgggacatcagaccttcgtgtcccagcctggctatgttgggctggagggcttgccttacttcctggaggagcccgaagacaggactgtggccgccaacacccccttcaacctgagctgccaagctcagggacccccagagcccgtggacctactctggctccaggatgctgtccccctggccacggctccaggtcacggcccccagcgcagcctgcatgttccagggctgaacaagacatcctctttctcctgcgaagcccataacgccaagggggtcaccacatcccgcacagccaccatcacagtgctcccccagcagccccgtaacctccacctggtctcccgccaacccacggagctggaggtggcttggactccaggcctgagcggcatctaccccctgacccactgcaccctgcaggctgtgctgtcagacgatgggatgggcatccaggcgggagaaccagaccccccagaggagcccctcacctcgcaagcatccgtgcccccccatcagcttcggctaggcagcctccatcctcacaccccttatcacatccgcgtggcatgcaccagcagccagggcccctcatcctggacccactggcttcctgtggagacgccggagggagtgcccctgggcccccctaagaacattagtgctacgcggaatgggagccaggccttcgtgcattggcaagagccccgggcgcccctgcagggtaccctgttagggtaccggctggcgtatcaaggccaggacaccccagaggtgctaatggacatagggctaaggcaagaggtgaccctggagctgcagggggacgggtctgtgtccaatctgacagtgtgtgtggcagcctacactgctgctggggatggaccctggagcctcccagtacccctggaggcctggcgcccaggggaagcacagccagtccaccagctggtgaaggaaccttcaactcctgccttctcgtggccctggtggtatgtactgctaggagcagtcgtggccgctgcctgtgtcctcatcttggctctcttccttgtccaccggcgaaagaaggagacccgttatggagaagtgtttgaaccaacagtggaaagaggtgaactggtagtcaggtaccgcgtgcgcaagtcctacagtcgtcggaccactgaagctaccttgaacagcctgggcatcagtgaagagctgaaggagaagctgcgggatgtgatggtggaccggcacaaggtggccctggggaagactctgggagagggagagtttggagctgtgatggaaggccagctcaaccaggacgactccatcctcaaggtggctgtgaagacgatgaagattgccatctgcacgaggtcagagctggaggatttcctgagtgaagcggtctgcatgaaggaatttgaccatcccaacgtcatgaggctcatcggtgtctgtttccagggttctgaacgagagagcttcccagcacctgtggtcatcttacctttcatgaaacatggagacctacacagcttcctcctctattcccggctcgggggccagccagtgtacctgcccactcagatgctagtgaagttcatggcagacatcgccagtggcatggagtatctgagtaccaagagattcatacaccgggacctggcggccaggaactgcatgctgaatgagaacatgtccgtgtgtgtggcggacttcgggctctccaagaagatctacaatggggactactaccgccagggacgtatcgccaagatgccagtcaagtggattgccattgagagtctagctgaccgtgtctacaccagcaagagcgatgtgtggtccttcggggtgacaatgtgggagattgccacaagaggccaaaccccatatccgggcgtggagaacagcgagatttatgactatctgcgccagggaaatcgcctgaagcagcctgcggactgtctggatggactgtatgccttgatgtcgcggtgctgggagctaaatccccaggaccggccaagttttacagagctgcgggaagatttggagaacacactgaaggccttgcctcctgcccagggagcctgacgaaatcctctatgtcaacatggatgagggtggaggttatcctgaaccccctgggagctgcaggaggagcttgaccccccaacccagccagaccctaaggattcctgttagctgccttcacttgcggctgaggtccatcctgctggacgctatgtcctctgcccttccacaacccctagccccgctcagcctgctgataggggctccccagcagccccagggcaggaggatggtgcctgagacaaccctccacctggtactccctctcaggatccaagctaagcactgccactggggaaaactccaccttcccacttttccaccccacgccttatccccacttgcagccctgtcttcctacctatcccacctccatcccagacaggtccctccccttctctgtgcagtagcatcaccttgaaagcagtagcatcaccatctgtaaaaggaaggggttggattgcaatatctgaagccctcccaggtgttaacattccaagactctagagtccaaggtttaaagagtctagattcaaaggttctaggtttcaaagatgctgtgagtctttggttctaaggacctgaaattccaaagtctctaattctattaaagtgctaaggttctaaggcctaaaa

SEQ ID NO: 136356 - DNA, 3899 bp, Homo sapiens
aaccctgcttccttcctgctaggaggtgccatgtcatttattcaaagaaaacaaaacgaaaccaaacaaaacagggcaaacacatttcttaataagtgcagtttgttaaaatcatgttatgggcattttagtcatggggaagtgaaaataaccggcatcactgtaggaaaagcttttgggtctggcacctgggagaccactggagaggaggcagtgggagaaacttcaagttctgaagggaaggagccccccaacctccccttcttccctctcacccactgaatcccaccagaaactaccaagacgcccggaataaaaggtttcaagttcaatagtcactctctccaaatacaaaaagcagttacaattcaactgaacacagaagcttgtgtgcaaagttatggggaactggggcatcgtataaaaagttgggttaaagatgattctgtggtttggttttgttgtgttttgttttgtggctcttcctcagtcacctgaactccgggaaagaaatgccttatcttgatgaaatatcaacagccccaccccacagtaaaaagacaaattctaaaaattaaaaaaaagcgcataattaccaaaaaaaagtcactgcttcctccccctccccattttgctttttaaacttttttttttttaagttttgattttttttttaatcctgaaaagtagacagtaaaacagctcctgggagaatttacaaccaactgcatgagggtctgggaagctgaggggctggagcagggttgggagagtgaacaggaggggattctcccctcagtcactgtagcctcactgtatgatcaagggaggtggggattatttagtcaaaaaggaagaaggtaggaagaacaggaggtggaaggctggggaggtggggacaaacagaaaataaaaggtcattgttgcctgtttgaatccagaaaaaaatgcctggccctatggaggggaaggaaagcccctcagaggggaggcagtgggcttggagggaggcagccctgggatgacccccatcccccagcacccacgggatctggcgggggcccgaagaaggggccgaggcaggcgctggtggaggaatgccggccaggggcctcccgggaagcctctgggtccacactggcctactgtgtacttgtgcccacccttgtgtgttccccggagtagctcccgtagtcgtagttcccgtagtatggcggccactggccctggttctgatagtactggttccactgctgggcatactgctgatactggttatagctgggctgagggtaggtctgtacaatagggggctggcggtggggtatagggggccgggttgtaaccgccgtagctcccatagttgtaggcaggtggtggtggaggtggaggcggtggggctgtgtagccctggctgtaacctcccctggttgtagggtggctggctgtaactcggctgtggaagggctgtagctgctgacggtgggggtgctggtattggcgcttgagccagggatgttgctgttcttattggaagagctggcccctggggggttccgagcaaggctgtagctgggtggtggcggtggctgctggggtggtggctgtggtggcggaggctgctgtggtggcggctgttgctggggagcccggttgtagctgcctctgttgttggagttgttgttatcccggttgttgctaccccagcggttctggctataaccaccacctccgctgcagatgaaaactcctcggtagttgcctcctccaccgctgcctcccccttggttttggaagccgacacggctgcctccagggggtcctcaggtttcatagcgctggaagccaacaccaccccccggggcccggaaagccaccaccacctcggttgtcaaagcgcttttcagggggtggcccagccttgcggccttcctcgttgtactgcctcactagcttgtccgcttcctcccgctgcagctcaatgaacagaacctcatccaggaagtccccaacatctggcaacgtgaagttggctttcatttctaagaccgcatgatctgggacatccttcccttcctcgtcggttcgctttattgttcggtcttttaggtcctcgtccagtgggacaaattacaatagctttgcgctggaagccttcaaatggtctcatttttcgtctctgggctgacccataaacatttgtctgatctaggatatagttgcgtttcttgcgggcagcaatctggatgaggcggttgaggcactgggtggccctgctggatcaggacatcccagcggccagcatagttaccgctgccggcgtaggcccatcacccgcatcttatccatgatggcattggtacccaggatgttgtacttcttggaagggttggaggctgcatgtttgatggcccatgtggtcttgccagcagcaaggcatggcccaccatcatcagaatctcacattctgccttgctctttggtcccaacggtgccccggatacgctcactaaggggaaggtgctggatgaaggtaaaccccgggaggacagaacagtagggctctgctctctgtccgaagttgaactccactgcgcaattcttcaccaggacatgaggatagagggcctgaccccccaaggcttccttctggattcggaaagcaatgcccatccactttccattcttggtaaaagacagttccacgtcatttccacattcaaaatccgcaaagcagccaatcacatcgttctctgcaaacttgtctccgtagttttcaaaccggctattggtggacttcttcccagtgcctccatagccataggagaaaggctcttcgcctagctgggtgctgcaggagtccagggaccagccgatacggaccacgtgggggtcaggctctgtagacggaaggtgcttcacggagatttcctcattgatcttcatctcgaagcatacacggccccttctgaccccatagctggcacgggctcctgaccacaggtatgcaaagccctcaattgtgagcggatagccactactccgatctcgggccaccttgaagtggaggtcgcagttataggtgtcaatagcaacaagggtatcatcaaagtcatcttcatcctcttcagcaggaggctgaggagagcggcccctcctatcctctcggtgctcaaagtacccccgtccccggttttcttcataaggcctctttcgactctggaattgctgcctgtctggcttgagttgagaagcttcaggcgggaggaagctggtgggtgctccttgcttcatctctgtcttcatttctggacgataggcctgctgctgctccatttccagtggtctcctctcgtagcctgactcgttttcttgtttgatgacttgggtatcgtagaattggttctgcctggtaatattgtccatggcataatgtccgtccggccccgagtagccgccgggctccgcgtgcggctgcagcccgggcggcggtggctgcgcggtcccctccagctcggagcccccctcggtctcgacctcctcgttgatgtgcccgggtcgccccggttcgtcgtcggcgtcgagctcccgctcgtcgtcaggctcctcggcctccaacgccgcctgcagccgctcagcaagctcggtcttgaggcctcgagtgtccaggccgcggcgctgcagctcctcgcgaagttcgttcaccttcagacggcgcacatccatggcccgggcccccggggtggcccccgagcccggcccggcctcccagggctctgtcccccttaaacctttcctgtcaggaggcgaagggggaaagggggggggcccactccaatggcggcagcggctcaaaatggccgccgccaccgcctcccccctcactcgtgcctcgtccg

SEQ ID NO: 136357 - DNA, 6306 bp, Homo sapiens
atggaggcgaccggcacctgggcgctgctgctggcgctggcgctgctcctgctgctgacgctggcgctgtccgggaccagggcccgaggccacctgccccccgggcccacgccgctaccactgctgggaaacctcctgcagctacggcccggggcgctgtattcagggctcatgcggctgagtaagaagtacggaccggtgttcaccatctacctgggaccgtggcggcctgtggtggtcctggttgggcaggaggctgtgcgggaggccctgggaggtcaggctgaggagttcagcggccggggaaccgtagcgatgctggaagggacttttgatggccatggggttttcttctccaacggggagcggtggaggcagctgaggaagtttaccatgcttgctctgcgggacctgggcatggggaagcgagaaggcgaggagctgatccaggcggaggcccggtgtctggtggagacattccaggggacagaaggacgcccattcgatccctccctgctgctggcccaggccacctccaacgtagtctgctccctcctctttggcctccgcttctcctatgaggataaggagttccaggccgtggtccgggcagctggtggtaccctgctgggagtcagctcccaggggggtcagacctacgagatgttctcctggttcctgcggcccctgccaggcccccacaagcagctcctccaccacgtcagcaccttggctgccttcacagtccggcaggtgcagcagcaccaggggaacctggatgcttcgggccccgcacgtgaccttgtcgatgccttcctgctgaagatggcacaggaggaacaaaacccaggcacagaattcaccaacaagaacatgctgatgacagtcatttatttgctgtttgctgggacgatgacggtcagcaccacggtcggctataccctcctgctcctgatgaaataccctcatgtccaaaagtgggtacgtgaggagctgaatcgggagctgggggctggccaggcaccaagcctaggggaccgtacccgcctcccttacaccgacgcggttctgcatgaggcgcagcggctgctggcgctggtgcccatgggaataccccgcaccctcatgcggaccacccgcttccgagggtacaccctgccccagggcacggaggtcttccccctccttggctccatcctgcatgaacccaaacatcttcaagcacccagaagagttcaacccagaccgtttcctggatgcagatggacggttcaggaagcatgaggcgtttcctgcccttttccttagggaagcgtgttttgccttgggagagggcctggcaaaagcggagctcttcctcttcttcaccaccatcctacaagccttctccctggagagcccgtgcccgccggacaccctgagcctcaagcccaccctacccacgtacgacatcgtccttggctcccagaagtatcttcccactgagacacgccgcccccacagaggcacagtccccagccacctctgcaactgcagccctcagtcacccctttttaagcaccctgattctaccaaatgcaaacacatctgggtctgcgaattatgcacagggcactttgggacatacgaagggaccctcagaccggagggaacacctgacccaaccccaacacgtgcttatgtaaccacgtggaaagcggcccctgctgcccctccacacacacatacacactcactgatctacagcccctgttcggcgtcagagtccccactagacccagtggaaggggcacgcaggctgaagaaagtcccttcgtgggcaacccagggaatatcacaggtgcccggggactcacgggcacccttcggtgtcagctccaggttcagggagagccccccgaggtacattggcttcgggatggacagatcctggagctcgcggacagcacccagacccaggtgcccctgggtgaggatgaacaggatgactggatagtggtcagccagctcagaatcacctccctgcagctttccgacacgggacagtaccagtgtttggtgtttctgggacatcagaccttcgtgtcccagcctggctatgttgggctggagggcttgccttacttcctggaggagcccgaagacaggactgtggccgccaacacccccttcaacctgagctgccaagctcagggacccccagagcccgtggacctactctggctccaggatgctgtccccctggccacggctccaggtcacggcccccagcgcagcctgcatgttccaggtgcggccgttggggcctgggaagggggatcccggctctggctccgcgcccccgaagccggccggaagcgctggggtggggaggtgcccccggtgactcacgcgggggcaggaatgctgcggtcggaacgggacccggctccagaacccacctccagccccagggcttctccggccggcggcgccagctcccgcgcgctgaccctggcggggccccacgtgccagggctgaacaagacatcctctttctcctgcgaagcccataacgccaagggggtcaccacatcccgcacagccaccatcacagtgctcccccagcagccccgtaacctccacctggtctcccgccaacccacggagctggaggtggcttggactccaggcctgagcggcatctaccccctgacccactgcaccctgcaggctgtgctgtcaaacgatgggatgggcatccaggcgggagaaccagaccccccagaggagcccctcacctcgcaagcatccgtgcccccccatcagcttcggctaggcagcctccatcctcacaccccttatcacatccgcgtggcatgcaccagcagccagggcccctcatcctggacccactggcttcctgtggagacgccggagggagtgcccctgggcccccctgagaacattagtgctacgcggaatgggagccaggccttcgtgcattggcaagagccccgggcgcccctgcagggtaccctgttagggtaccggctggcgtatcaaggccaggacaccccagaggtgctaatggacatagggctaaggcaagaggtgaccctggagctgcagggggacgggtctgtgtccaatctgacagtgtgtgtggcagcctacactgctgctggggatggaccctggagcctcccagtacccctggaggcctggcgcccagggcaagcacagccagtccaccagctggtgaaggaaccttcaactcctgccttctcgtggccctggtggtatgtactgctaggagcagtcgtggccgctgcctgtgtcctcatcttggctctcttccttgtccaccggcgaaagaaggagacccgttatggagaagtgtttgaaccaacagtggaaagaggtgaactggtagtcaggtaccgcgtgcgcaagtcctacagtcgtcggaccactgaagctaccttgaacagcctgggcatcagtgaagagctgaaggagaagctgcgggatgtgatggtggaccggcacaaggtggccctggggaagactctgggagagggagagtttggagctgtgatggaaggccagctcaaccaggacgactccatcctcaaggtggctgtgaagacgatgaagattgccatctgcacgaggtcagagctggaggatttcctgagtgaagcggtctgcatgaaggaatttgaccatcccaacgtcatgaggctcatcggtgtctgtttccagggttctgaacgagagagcttcccagcacctgtggtcatcttacctttcatgaaacatgggagacctacacagcttcctcctctattcccggctcggggaccagccagtgtacctggcccacttcagatgctagtgaagttcatgggcagacatcgccagtggcatgggagtatcttgagtaccaagagatttcatacaccggggacctgggcggccagggaactgcattgctggaatgagaacatgttccgtgtgtgtggccggactttcggggttctccaagaaggttttacaatggggattattaccgccagggaacgttttcgccaagatgccagtcaagtggattgccattgagagtctagctgaccgtgtctacaccagcaagagcgatgtgtggtccttcggggtgacaatgtgggagattgccacaagaggccaaaccccatatccggggcgtggagaacagcgagatttatgactatctgcgccagggaaatcgcctgaagcagcctgcggactgtcttggatggactgttatgccttgatgtcgcggtgctgggagctaaatccccaggaccggccaagttttacagagctgcgggaagatttggagaacacactgaaggccttgcctcctgcccaggagcctgacgaaatcctctatgtcaacatggatgagggtggagacgccagacagcccgatttacgggaacagccgattagaggattcgggagagcggtcggtgaacttctggatgtctttcgggaggggaaggctctatggtcgcgtgcagagcgcccgttccacgtcaggaaaggtttaagggggacagagccctgggaggccgggccgggctcgggggccaccccgggggcccgggccatggatgtgcgccgtctgaaggtgaacgaacttcgcgaggagctgcagcgccgcggcctggacactcgaggcctcaaggccgagcttgctgagcggctgcaggcggcgttggaggccgaggagcctgacgacgagcgggagctcgacgccgacgacgaaccggggcgacccgggcacatcaacgaggaggtcgagaccgaggggggctccgagctggaggggaccgcgcagccaccgccgcccgggctgcagccgcacgcggagcccggcggctactcggggccggacggacattatgccatggacaatattaccaggcagaaccaattctacgatacccaagtcatcaaacaagaaaacgagtcaggctacgagaggagaccactggaaatggagcagcagcaggcctatccgtccagaaatgaagacagagatgaagcagggagcacccaccagcttcctcccgcctgaagcttctcaactcaagccagacaggcagcaattccagagtcgaaagacgccttatgaagaaaaccggggacggggggtactttgagcaccgagaggataggaggggccgctctcctcagcctcctgcttgaagaggatgaagatgacttttgatgatacccttgttgctattgacacctataacttgcgaacctccacttcaaggtggcccgagatcggagtagtgggctatccgcttcacaattgaggggctttgcatacctggggtcaggagcccgtgccagctattgggtcagaaggggccgtgtatgcttggagatgaagatcaatgaggaaatctccgtgaagcaccttccgtctacagagcctgacccccacggtggtccgtatcggctggtccctggactcctgcagcaacccagctaggcgaagaagctttctcctatggctatggagggactgggaagaagtccaccaatagccggtttgaaaactacggagacaagtttggagagaacgatgtgattggctgctttgcggattttgaatgtggaattgaacgtggaaactgtcttgtaccaagaatggaaagtggatgggcattgctttccgaatccagaagggaagccttggggggtcaggccctctatcctcatgtcctggtgaagaattgcgcagtggagttcaacttcggacagagagcagagccctactgttctgtcctcccggggtttaccttcatccagcaccttccccttagtgagcgtatccggggcaccgttggaccaaagagcaaggcagaatgtgaggcactgtgctcagagtctgacaagcctgatctttttgaatcccgataccagtactgtgagattctgatgatggtgggcctgcctgctgctggcaagaccacatgggccatcaaacatgcagcctccaacccttccaagaagtacaacatcctgggtaccaatgccatcatggataagatgcgggtgatgggcctacgccggcagcggaactatgctggccgctgggatgtcctgatccagcaggccacccagtgcctcaaccgcctcatccagattgctgcccgcaagaaacgcaactatatcctagatcagccagagatttttacatctgcaaatgctctccagagccaggacgagggtgatgatccttgtctttcagacgaggaaatttga

SEQ ID NO: 136358 - DNA, 394 bp, Homo sapiens
gtgtgcagtaaactggaatgctctccctcgctcactcctcagtgtaggagtgatctgaagcaggacaagctcagcctgcagctgccgtgggctttgtgtggactggacgcagagcttgggagacgggggagggctattactccaattcactgtcaatggaattacagctatagcggcagtgtatataggattgctttttctcgtcttcctggagatgctcagtcccagtatattttaaggaagagaaatataaaggaaatttagtatgcctccttttctttaaatgaagaatttagtttcctttacttcttaaaagagaatacctgttcttgtataacgtgactgcaccagacattctgaaaaatcagcaagaagcaaaagctggaaatagctt

SEQ ID NO: 136359 - DNA, 2906 bp, Homo sapiens
  misc_feature (1)...(2906): n = a,t,c or g
cgaccctcgctcactcctcagtgcacgagtgatctgaagcatgacaagctcagcctgcagctgccgtgggctttgtgtggactggacgcagagcttgggagacgggggagggctattactccaattcactgtcaatggaattacagctatagcggcagtgtatataggatggctttttctcgtcttcctgggttctgaagtaacggaagctaccttgtataaagacctcaacactgctgaccatgatcagcgcagcctggagcatcttcctcatcgggactaaaattgggctgttccttcaagtagcacctctatcagctatggctaaatcctgtccatctgtgtgtcgctgcgatgcgggtttcatttactgtaatgatcgctttctgacatccattccaacaggaataccagaggatgctacaactctctaccttcagaacaaccaaataaataatgctgggattccttcagatttgaaaaacttgctgaaagtagaaagaatatacctataccacaacagtttagatgaatttcctaccaacctcccaaagtatgtaaaagagttacatttgcaagaaaataacataaggactatcacttatgattcactttcaaaaattccctatctggaagaattacatttagatgacaactctgtctctgcagttagcatagaagagggagcattccgagacagcaactatctccgactgcttttcctgtcccgtaatcaccttagcacaattccctggggtttgcccaggactatagaagaactacgcttggatgataatcgcatatccactatttcatcaccatctcttcaaggtctcactagtctaaaacgcctggttctagatggaaacctgttgaacaatcatggtttaggtgacaaagttttcttcaacctagttaatttgacagagctgtccctggtgcggaattccctgactgctgcaccagtaaaccttccaggcacaaacctgaggaagctttatcttcaagataaccacatcaatcgggtgcccccaaatgctttttcttatctaaggcagctctatcgactggatatgtccaataataacctaagtaatttacctcagggtatctttgatgatttggacaatataacacaactgattcttcgcaacaatccctggtattgcgggtgcaagatgaaatgggtacgtgactggttacaatcactacctgtgaaggtcaacgtgcgtgggctcatgtgccaagccccagaaaaggttcgtgggatggctattaaggatctcaatgcagaactggttgaatgttaaggacagtgggattgtaagcaccattcagataaccactgcaatacccaacacagtgtatcctgcccaaggacagtggccagctccagtgaccaaacagccagatattaagaaccccaagctcactaaggatcaccaaaccacagggagtccctcaagaaaaacaattacaattactgtgaagtctgtcacctctgataccattcatatctcttggaaacttgctctacctatgactgctttgagactcagctggcttaaactgggccatagcccggcatttggatctataacagaaacaattgtaacaggggaacgcagtgagtacttggtcacagccctggagcctgattcaccctataaagtatgcatggttcccatggaaaccagcaacctctacctatttgatgaaactcctgtttgtattgagactgaaactgcaccccttcgaatgtacaaccctacaaccaccctcaatcgagagcaagagagagaaccttacaaaaaccccaatttacctttggctgccatcattggtggggctgtggccctggttaccattgcccttcttgctttagtgtgttggtatgttcataggaatggatcgctcttctcaaggaactgtggcatatagcaaagggaggagaagaaaggatgactatgcagaagctgttcacttaaggaaggacaactcttattcctgggaaatcagggaaacttctttttcagatgttaccaataagcaatgaacccatctccgaaggaggagtttgtaatacacaccatatttcctcctaatggaatgaatctgtacaaaaacaatcacagtgaaagcagtagtaaccgaagctacacgagacagtggtattccagactcagatcactcacactcatggatgctgaaggacctcaccagcagacttgtgttttggggtttttttaaaccctaagggaggtggatgggtaggaaccctggttcttactgccaaaacactggaaaaagagactgaaaaaaagcaatgtactgtacatttgccattataatttatatttaagaactttttattaaaagtctcaaatttcaggttactgctgcgattgatgtagtggagatgcctgaacacaattctatattttagtattttttagtaatttgtactgtattttccttgcaaatattggagttataaaccatttactttgtgttctactgagtaagatgacttgttgactgtgaaagtgaattttcttgctgtgtcgaacaatcaggactgcattcatatgagatccttgtagtataagcacaggccatttttcactttggtattaataaaatgtnnnnnnnnnnncctggctgaagggctgaatgaaataaaatttaattttaaaaaagggttatgaaataatggcccaattattaaatttgtattatcccaggggtattcaataaatcaaaatgtgggaagtaaggggcaataacaaacttcctgcatatctccatttttgctctaggcaaattaattatccttaaaaaagttaagcatatcttctgaactgaatacatcagctggcataaaaggagcatgaagtctgttaaac

SEQ ID NO: 136360 - DNA, 431 bp, Homo sapiens
tttttccatgaaatacagctggtacttgcaatagtacttgggtgttgaacttgttaagagtgcatatcctttttttcagatccatctatcatttcctagttgtatgtggttgtgtgggttatttctcctcttttacattgattttctcaccagtattaataattatcaccaaataactattacagaaaacttcctcagaaagtaaaattagagtgaaggtatcacaggttggcactattttcattcccgaccaagaaactgacacctgagaaagtatctctttgttgcaggtttttggaaatgggctatattttttgaatcataaccgatatgtactgccataaacaagaggatttcaagccagctccatcttaagcttctcagccttttaccctcctctggaataatgagtgtatcccaaaagtaaatcc

SEQ ID NO: 136361 - DNA, 424 bp, Homo sapiens
cagggttattgcaagtagcaaggagaaaatatatatttaccatttgccaccaatccctggggaagtgcagtcaatacattggaaagggtcctcataagagtttgatgatcattctcagaaagctagccagagaaagtctaaatggtaaaggttccagctcattatcttcttcccttttctcaagttttctctccatctgacatgtgagctcagtatttaccattgccctttctacaaatttaaccaagtttatttaaaaacataatgaccttctatcccaatttacattttctttggtgtagaggacgcctttaccttgatgtgtggagacaagccgttgatttgtaagaaacaccaattatcagcttccacttgtgcttcacaatctgctgagtcgctttaacacttttgatgaactcgtgcc

SEQ ID NO: 136362 - DNA, 480 bp, Homo sapiens
atggaatactatgtagccatgaaaaaggatgagttcatgtcctttggagggacatggatgaagctggaagccattattctcagcaaactaacacaggaacagaaaaccaaacaccgcatgttctcactcataaggcttcatcaaggaggtgaaattcaggctcaggaaaatctgatgggggaagcagggagaagatgggtgttccaggaaagggaaaaacagaccaaatccagcagggattttgccgatttcggaaccaccatcaaacaggattttcgcctgctggggcaaaccagcgtggaccgcttgctgcaactctctcagggccaggcggtgaagggcaatcagctgttgcccgtctcactggtgaaaagaaaaaccaccctggcgcccaatacgcaaaccgcctctccccgcgcgttggccgattcattaatgcagctggcacgacaggtttcccgactggaaagcgggcagtga

SEQ ID NO: 136363 - DNA, 2556 bp, Homo sapiens
atggtaccagcatctgcttctgatgagggcctcaggaagcttccagtcatggtggaaggtgaagggggagccagcgtatcacatggcaaacaggccctgatgatcactgatttcattgcgaaccaaagcaaagacaggagcctgattgttcgattactttgtgccacattttataaggaaaaactgatcactattcacaatagcaaaggcatggaatcaccccaaatgcacatcagtgacagactggataaagaaaatgtggtacatatataccatggaatactatgcagtcacaagaaggaacaagatcgtgtcctttgcagagacatagatggagctggaagtcattatcgtcagcaaactaacacaggaacagaaaaccaaacactgcatgttctcacttacaagtgggagctgaacgatgagaacacatggacacagggaggggaacaacacacactagagcctgttgagcccactgaagagaagctttttatccagtttgaaagatcacatattgtgtcagcctggactgccttgcagaccttttctacaattaaacttctttgcttactgaaagctttcatccctgaggcttgttttcttgctcagataatggactcaatcacacaagaaggaataatagagattacggaacgcagctcctcaccagcaacggaacaaagctggacggagaatgactttgacgagttgagagaggaaggcttcagaaaatcaaactactccgagctaaaggaggaagttcgaaccaatggcaaaaaagttaaaaactttgaaaaaaaattagacgaatggataactagaataaccaatgcagagaagtccttaaaggacttgatggagcggaaaaccaaggcacgagaactacgtgatgaatgcacaagcctcagtaaccgatgcgatcaactggaagaaaggggatcagcgatggaagacgaaatgaatgaaatgaagcaagaagagaagtttagagataaaagaataaaaagaaatgaacaaagcctccaagaaatatgggactgtgtgaaaagaccaaatctacgtctgattggtgtacatgaaagtgatggggagaatggaaccaagttggaaaacactcttaaggatattatccaggagaacttccccaatctagcaaggcaggtcaacactcaaattcaggaaatacagagaatgccacaaagatactcctcgagaagagcaactccaagacacataattgtcagattcaccaaagttgaaatgaaggagaaagtgttaagggcaaccagagagaaaggtcgggttacccacaaagggaagcccatcagactaacagctgatctctcggtagaaactctacaagccagaagagagtgggggccaatattcaacattctaaaagaaaagaattctcaacccaggatttcgtatccagccaaactaagcttcaaaactgaaggagaaataaaatcctttacagacaagcaaatgctgagagattttgtcaccaccaggcctgccctaaaagagctcctgaaggaagcactaaacatggaaaggaacaaccgagacacatataggctcaaaataaagggatggaggaaaatctaccaagcaaatggaaaacaaaaaaaggcaggggttgcaatcctagtcttggataaaacagacttcaaaccaacaaagatcaaaagagacaaagaaggccattacataatggtaaagggatcaattcaacaagaagaactaactatcctaaatatatatgcacccaatacaggagcactcagattcataaagcaagtccttagtgacctacaaagagactcagactcccacacaataataacgggagactttaacacctcactgtcaacattaggcagatcaacaagacagaaagttaacaaggatatccaggaattgaactcagctctgcgccaagtggacctaatagacatctatagaactccccaccccaaatcaacagaatatacattcttttcagcaccacaccgcacctattccaaaattgaccacatagttggaagtaaaagagtcctcagcaaatgtaaaagaacagaaatgataacaaactgtctctcagaccacagtgcaatcaaaccagaactcaggattaagaaactcactcaaaaccactcaattacatggaaactgaacaacctgctcctgaatgactactgggtacataacgaaatgaaggcagaaataaagatgctctttgaaaccaacgagaacaaagacacaacataccagaatctctgggacacattcaaagcagtgtgtagagggaaatttatagcactaaaggcccacaagagaaagcaggaaagatctaaaattgacaccctaacatcacaattaaaagaactagagaagcaagagcaaacacattcaaaagctagcagaaggcaagaaataactaagaacagagcagaactgaaggaaataagacacaaaaaaccgttcaaaaaatcagtgaatccaggagctggttttttgaaaagatcaacaaaattgacagaccgctag

SEQ ID NO: 136364 - DNA, 617 bp, Homo sapiens
ccatgaaatacagctggtacttgcaatagtacttgggtgttgaacttgttaagagtgcatatcctttttttcagatccatctatcatttcctagttgtatgtggttgtgtgggttatttctcctcttttacattgattttctcaccagtattaataattatcaccaaataactattacagaaaacttcctcagaaagtaaaattagagtgaaggtatcacaggttggcactattttcattcccgaccaagaaactgacacactggttagtcatgaaatcggcaaaattccagatgagctctccaaccaccgtattttctgcgtttttgatccagacccagatggtactgctctagcaggacttttccgggtcctcttcactggaacatcagaggtggatcctggtgaaaccctacaagcgtttccactccatacgcgctctgaataatgggattgtgatggtccttacaccaattctcaaactggggcggccagctgcagctggaatcaactcccaggtggcccgtagttgcgatacccagagtagtagctgttcacacggggtcacatccacatacagagcccccttgtctgctgcgtaggtggagttggtcacaa

SEQ ID NO: 136365 - DNA, 889 bp, Homo sapiens
gatatttaatttgccacggcaaagccattgctgtgaagaatggataatatatgtcaatggtaatatatgaagaaataacacaggtgaatagcagaggcaataaatctgtttttaccacaggacttgtcttacacttttctcttagtaataaataaaataattttcgacccagatggagctggcttgaaatcctcttgtttatggcagtacatatcggttatgattcaaaaaatatagcccatttccaaaaacctgcaacaaagagatactttctcaggtgtcagtttcttggtcgggaatgaaaatagtgccaacctgtgataccttcactctaattttactttctgaggaagttttctgtaatagttatttggtgataattattaatactgccataacatcctatggccctgaaaatagttctgccaagctgcgtgcagtggacacttcacggctggcacaggagagatcacaaggccttgctcaatttcatcaaaagtgttaaagcgactcagcagattgtgaagcacaagtggaagctgataattggtgtttcttacaaatcaacggcttgtctccacacatcaagggacatggatgaagctggaagccattatccttagcaaagtaacgcaggaacagaaaaccaaacaccacatgttgtctcttagaagtgggagctgaacgaatcacgccgagcggtcaacaaggcccactcgccgacgtcaaacgtagggcactaacacagcacgataccttctacgggacctggcaacgagggagttccgccaagtggggattagcccaatgcaaattcgtggacgtacgatatcactcgaagtggaagcgcaggagcgtctcgaacctcgagggtgtcggatgcccttaa

SEQ ID NO: 136366 - DNA, 298 bp, Homo sapiens
atgcccatcaatgatagactggctaaagaaaatgtggcacagatacaccatggaatactatgcagcccataaaaaagaatgagatcatgtccctttgcagggacatggatgaagctggaagccatcatcctcagcaaactaacacaggaacagaaaaatcaaacactgcatgttctcacttataactgggagctgaacaatgagaacacatggacacagggaggggaacaacacaccccacctgtcaggaggggaaaggaatttgtggcagctgaattcatacctcctggtgctaagg

SEQ ID NO: 136367 - DNA, 2065 bp, Homo sapiens
atggaagaacgggaagaggtgctggcggtcacagcagcccagggttcgtctgtgctcgtttatagatttgtgtgcccatccagtcctcactgggccctcccagttttagaaatgttgaacactagtgcttgtaagattcgaacaatgagtttaccagctctgagaaaaatgaactgctccagaaccttcaagaatgtttctctgtatcacgcccacatcacaccgaatccatttgtcgtcattgcagagttcatctttctggttttgagcaccatctcacacagttctttgtctttttccagtctgctgttgactgggttagctcagcccgaaaggcagggctatgttccccaggccaggggcattgtcctggacagtcaggaggcatacccctcgccaggtggaaccaccctgtgtatgcatgaccctgacaagcaggcgccaggacagtcaggaggccagctgtggagggtgcccctgtgcccacctggccagcaccacctgcccagctcagagaaggggctgtggctgccgcctgccacgcccgagtgccaggcatggacggggacgctgctgctgggcacatgccttctgtactgcgcccgctccagcatgcccatctgcaccgtctccatgagccaggacttcggctggaacaagaaggaggccggcatcgtgctcagcagcttcttctggggctactgcctgacacaggttgtgggcggccacctcggggatcggattgggggtgagaaggtcatcctgctgtcagcctctgcctggggctccatcacggccgtcaccccactgctcgcccacctgagcagtgcccacctggccttcatgaccttctcacgcatcctcatgggcttgctccaaggggtttacttccctgccctgaccagcctgctgtcgcagaaggtgcgggagagtgagcgagccttcacctacagcatcgtgggcgccggctcccagtttgggacgctgctgaccggggcggtgggctccctgctcctggaatggtacggctggcagagcatcttctatttctccggcggcctcaccttgctttgggtgtggtacgtgtacaggtacctgctgagtgaaaaagatctcatcctggccttgggtgtcctggcccaaagccggccggtgtccaggcacaacagagtcccctggagacggctcttccggaagcctgctgtctgggcagccgtcgtctcccagctctctgcagcctgctccttcttcatcctcctctcctggctgcccaccttcttcgaggagaccttccccgacgccaagggctggatcttcaacgtggttccttggttggtggcgattccggccagtctattcagcgggtttctctctgatcatctcatcaatcagggttacagagccatcacggtgcggaagctcatgcagggcatgggccttggcctctccagcgtctttgctctgtgcctgggccacacctccagcttctgtgagtctgtggtctttgcatcagcctccatcggcctccagaccttcaaccacagtggcatttctgttaacatccaggacttggccccgtcctgcgccggctttctgtttggtgaggaccttgccttaccccagctttgcccctccctgggcctccgggtgggtgtggccaacacagccggggccttggcaggtgtcgtgggtgtgtgtctaggcggctacttgatggagaccacgggctcctggacttgcctgttcaaccttgtggccatcatcagcaacctggggctgtgcaccttcctggtgtttggacaggctcagagggtggacctgagctctacccatgaggacctctagctcccaaccccacagcctctccaaggacccaggcgccagcagccccgggacacaggggactcagtgtgtgggacttggtcactccatgtcatacacacgagcagagaggaacacaaaccactgtggagcctgaagctccttaagaagagtccacaacagctggtgggagggtgcgttatactccctactccactcaggtggactcgagacttttgggccg

SEQ ID NO: 136368 - DNA, 1527 bp, Homo sapiens
atgagattccaggaccggacctggcaagtgccctatcccagccagtgttcctggggctcttccaggcagggctatgttccccaggccaggggcattgtcctggacagtcaggaggcatacccctcgccaggtggaaccaccctgtgtatgcatgaccctgacaagcaggcgccaggacagtcaggaggccagcccctggcaaccaccaatcgacttgttgtctccgtggctttgcagtttctgacatttcatgaaagtggaatcacaagtgccctccgtgtccggcctcttccacagagcgttgagttttcaagggcccgggtgcacagaggcttgaaggcgagcgtccatctgtcgccgccgtgtgtcctgacactcaacaaagctggatcttggagcggtggctgctcagcagcaggcctgggtggctgggcgcacgctcaccacaaaggaggtgccatcaatattcatgagctgggcctgcgtggctgggtttacagagaggacgaggcagccacaggccagacacctctccgtggcactggttctgggccttggctggcagggaggaacaagttctgcctccagagtccctgctgccgcaaggactccggggacacatttagctccagggcctggcgcctgaaccagggtccagtctggacctgggagctggctgacatgggcaggctaggggacaccacaggtcatctcttcacaggagctggcgctgtgggagcccctgagaccacagctgtgcccactgtgagcatcgccccaagacgcagtgtagagatgtggcccgagaccaaagagcatctcgtggctgtggctcggagaaaatgggtgtcagcccaggagaaacgcctgagccttcgtggctgtggctcggagaaaatgggtgtcagcccaggagaaacccgggtttacttccctgccctgaccagcctgctgtcgcagaaggtgcgggagagtgagcgagccttcacctacagcatcgtgggcgccggctcccagtttggggtgggcctatcagctggctggagggcggcttgtcctcagggtgggcctatcagctggctggagggcggcttgtcctcagggtgggcctatcagctggctggagggcggcttgtcctcaggggtgggcctatcagctggctggagggcggcttgtcctcagggtgggcctatcagctggctggagggcggcttgtcctcatccacgatgcggcaaccccgtgcccctcagtcctccctccctgcgcccgctccttggggagctccagaccctctagcgatgctggcggcctggatcgaggccaggccaggggtgtggccaacacagccggggccttggcaggtgtcgtgggtgtgtgtctaggcggctacttgatggagaccacgggctcctggacttgcctgttcaaccttgtggccatcatcagcaacctggggctgtgcaccttcctggtgtttggacaggctcagagggtggacctgagctctacccatgaggacctctag

SEQ ID NO: 136369 - DNA, 438 bp, Homo sapiens
tcttttttagcgccatctgctcgcggcgccgcctcctgctcctcccgctgctgctgccgctgccgccctgagtcactgcctgcgcagctccggccgcctggctccccatactagtcgccgcctgcctagggtagttaaaagacgagtgaatgctctcaaaaacctgcaagttaaatgtgcacagatagaagccaaattctatgaggaagttcatgatcttgaaaggaagtatgctgttctctatcagcctctatttgataagcgatttgaaattattaatgcaatttatgaacctacggaagaagaatgtgaatggaaaccagatgaagaagatgagatttcggaggaattgaaagaaaaggccaagattgtagatgaaaaaaagggatgaggaaaaagaggaccccaaaggaattcctgaattttggtaactgtttt

SEQ ID NO: 136370 - DNA, 467 bp, Homo sapiens; identical to SEQ ID NO: 130890
  misc_feature (1)...(467): n = a,t,c or g

SEQ ID NO: 136371 - DNA, 440 bp, Homo sapiens
gcacgagccaagatcagtgttatattttactggagaagctattgaagatgatgatgatgattatgatgaatatggtgaagaagcggatgaggaacgggaagaagaaggagatgaggaaaatgatccagactatgacccaaagaaggatcaaaacccagcagagtgcaagcagcagtgaagcaggatgtatgtggccttgaggataacctgcactgtaatagcctaaacacgactcttatttacttacagccttatgtctttgtattttcttgggagactacgtaatttttttttaaaggacaggaaactgatattttaaagaccaatttgttctacctaggcatttttaactagtttttctgccagctatgttgactgcgcgaattctgacacgcatgttcattcattgctacataagttgggtcttctggaatatgttt

SEQ ID NO: 136372 - DNA, 649 bp, Homo sapiens
  misc_feature (1)...(649): n = a,t,c or g
gattccggnccccttttctttggatggaccngaaattatgggttgtaccagggtgcccagataggattggaaaaaaggaaagaatgtcactttgaaatctattaagaagaagcagaaacacaagggacgtgggacagttcgtaccgggactaaaaccagtttccaatgactccttctttaacttttttgccccctcctgaagttcctgagagtggagatctgggatgatgatgctgaagcctatccttgctgcagacttcgaaattggtcactttttacgtgagcgtataatcccaagatcagtgttatattttactggagaagctattgaagatgatgatgatgattatgatgaaaaaagcgaagaagcggatgaggtaatgtttaccatatgagcaaaaaattctctgtggttaacacattgagaagcaaattgaacgacttatgtattcctttgctataatcattctgtgatttgggataaaaacattttggagaacatgattttagaattctacagccaaacgatgtatgtataagggttcaataaataaattgcagaactcagcaacatttttttatttcaaataattttggtctgctgcagggttatcagctctttgaagaagtcaaaagctgcagtaaactt

SEQ ID NO: 136373 - DNA, 996 bp, Homo sapiens
atgtccccctggcatttcaaataggcccaaaatttttagctttttacaaaatttagaaaccttttattagattttcctccatatgcccttacccccccctgaggtagttaggtaaacagtactacccattttaattacacagtaaacagaagcacggggaaggtgacatactcatactttaagcaataagaattagaagaaaccatagaagcttggggccttctctctagctctaacccaaagaaaatgaattttatttttttttttttaaaagaaaacagcatcaatcacttaagattttcttcctctttttttttttttttttacacttgcttattagtatagcatctcgttccaaagctggtaccttttcttcaacaatgtgttaaaaactgagtataacccttaattcaaggtaggcctctacttctacctgaattggtacaaaattaagacattatcttgtaagaactaaaattgtatttgaaatttttattttagctgcaaaaacaaaaacaaagccaacaaacaacaaataacttgaaaataggcttgtcaaatgatgtaaattcatcctttccagggaagcagaaggtagaccctaccacaaagaaaagatgcttagttaatggagggttaaatttaaaaatacagttaaaattcaggctaacttctgaaaatcccgttttattcacctcactgtggtaccagtaactatactgagtcaggttactttacagttaactatgtcacctaaaacacaataatccattaacactctaataacagttattgggtgtggtcatactggaaattcttaaccatatagttgtcttgccaattttttttttaaacaataaattgtcttagtataagtcactgcatttctgtaacaaagtaatgaaaggcacagctaatccaagcggacttaaccctattcaacaaccagctgaaaaaatactttggttcttcaagcgaaaaaattacaaaaaaaaa

SEQ ID NO: 136374 - DNA, 1738 bp, Homo sapiens
actgtctagatcgcgagcgccatctgctcgcggcgccggcgtcctgttcctcccgctgctgctgccgctgccgccctgagtcactgcctgcgcagctccggccgcctggctccccatactagtcgccgatatttggagttcttacaacatggcagacattgacaacaaagaacagtctgaacttgatcaagatttggatgatgttgaagaagtagaagaagaggaaactggtgaagaaacaaaactcaaagcacggtcagcgtaactgttcagaatgatgccaaaatcctcagattcttgcaagcccttcaagaaagacttgatgggtctgggtagaaacaccaacaaggatacattgaaagcctgccttagggtagttaaaagacggagtgaatgctctcaaaaacctgcaagttaaatgtgcacagaaagaaacccaacttctatgagggaagttcacgatcttgaaaggaagtatgctgttctctatcagcctctatttgataagcgatttgaaattattaatgcaatttatgaacctacggaagaagaatgtgaatggaaaccagatgaagaagatgagatttcggaggaattgaaaggaaaagggccagattgaagatgagaaaaaggatgaagaaaaagaagaccccaaaggaattccctgaatttgggttaactgtttttaaagaatgttgacttgctcagtgatatggttcaggaacacgatgaacctattctgaagcacttgaaagatattaaagtgaagttctcagatgctggccagcctatgagttttgtcttagaatttcactttgaacccaatgaaatattttacaaatggaagtgctgacaaagacatacaggatgaggttagaaccagaaccagatgattctgatcacttttcctttgatggacaagaaattatgggttgtacagggtgccagatagattggaaaaaaggaaagaatgtcactttgaaaactattaggaagtaggccgaaaccacaagggacgtgggaccagttcgtactgggcactaaaaccagtttcccaatgactctttctctaactttttttgccccctcctgaagtctcctgagagtggagatttggatgaggatcgctgaagcaatccttgctgcagacttcgaaattggtcagctttttaccgtgagcgtataatcccaagatcagtgttatattttactggagaagctattgaagatgatgatgatgattatgatgaagaaggtgaagaagcggatgaggaaggggaagaagaaggagatgaggaaaatgatccagactattgacccaaagaaaggatcaaaacccagcagagtgcaagcagcagtgaagcaggatgtatgtggccttgaggataacctgcactggtctaccttctgcttccctggaaaggatgaatttacatcatttgacaagcctattttcaagttatttgttgtttgtttgcttgtttttgtttttgcagctaaaataaaaatttcaaatacaattttagttcttacaagataatgtcttaattttgtaccaattcaggtagaagtagaggcctaccttgaattaagggttatactcagtttttaacacattgttgaagaaaaggtaccagctttggaacgagatgctatactaataagcaagtgtaaaaaaaaaaaaaaaaagaggaagaaaatcttaagtgattgatgctgttttcttttaaaaaaaaaa

SEQ ID NO: 136375 - DNA, 849 bp, Homo sapiens
atggctgcggctgtggcggggctgctgcgagggggtctcctgccccaggcaggccggctgccagccctccagactgtccgctatggctccaaggctgttacccaccaccgtcgtgtgatgcactttcagcgacagaagctgatggctgtgactgaatatatccccccgacaccagccgagacgggcctcatcaggcttctctgccgggagagagcagcagttttccaggacaaccgaatgatagctatctgccagagcgtggctctgagcgtagcagacaagcttcttatgcgacaccagctgcggaaacacaagatcctgatgaaggtcttccacaaccaggtcctgaagcccttcctggaggactccaagtaccaaaatctgctgcccctttttgtggggcacaacatgctgctggtcagtgaagagcccaaggtcaaggagatgggggagcttgtgggaggcctcaccccactcatggcccagacccactccctgctccagcaccagcccctgaagttgaccaccctattggaccagtacatcagacagcaaagcgagaaggattctgtcgtgtcggccaatgggaagccagatcctcctgaccctgttccggactcgtacccagcctgtttagccagccctgcccataaatacactctgtcctattggctgtgctgtcctccatgggagatgtggaagaacttggggtgggggagtgcatttgtcactgggctttcactaacaatgatattgtcaggaaaatcctcttcccctgtatctgttcccacaaatggcatcccgcacatgcttgctctattaaaggcagctgacagctgtgcccactag

SEQ ID NO: 136376 - DNA, 586 bp, Homo sapiens
ctcccggttcgagccacgcgtccgccccacaggaggagataggcctcatcaggcttctccgccgggagatagcagcagttttccaggacaaccgaatgatagccgtctgccagaatgtggctctgagtgcagaggacaagcttcttatgcgacaccagctgcggaaacacaagatcctgaatgaaggtcttccccaaccaggtcctgaagcccttcctggaggattccaagtaccaaaatctgctgcccctttttgtggggcacaacatgctgctggtcagtgaagagcccaaggtcaaggagatggtacggatcttaaggactgtgccattcctgccgctgctaggtggctgcattgatgacaccatcctcagcaggcagggctttatcaactactccaagctccccagcctgcccctggtgcagggggagcttgtaggaggcctcacctgcctcacagcccagacccactccctgctccagcaccagcccctccagctgaccaccctgttggaccagtacatcagagagcaacgcgagaaagattctgtcatgtcggccaatgggaagccagatcctgacactg

SEQ ID NO: 136377 - DNA, 476 bp, Homo sapiens
ctgcgctgcaggaattcggcacgaggaaaaaactacttttaaggaaatatagcatctatcgtgaacgtggaaaagtaaagataattcaccatgcctgctgtggctttagttcctaaagaactctacctgagttcttcactaaaagacctcaataagaagacagaagttaaaccagagaaaataagcactaagaggattacgtccattcaatacttggaactgcaaacatcaaaaaagccattgaagaagctgaaagactctctgagagccttaaactaagatataaagaagctgaagtccggaaataacttgaggaaaaggacaggcagaaggaagcacagcaactacaacaaaaaaggcaggaaacaggaagagagggatggtggcacattggctaaagtttctttggagaatgtattggattaccaagacaaaacccaaaagagcaatggtgaaaagagtgaaaaaatgtgaga

SEQ ID NO: 136378 - DNA, 1449 bp, Homo sapiens
atgatgagagctcacatgtttgtttacaaggaacttaaacaaatttacaagaaaaaaacccatccccatcaaaaagtgggcaaaggatataaacagacacttctcagaggaagacatttacgtggccaagaaacatatgaaaaaaagctcacacacgtatatgaaacaactgatttcaagcaacagcagtattacttccattcaatacttggacctgcaaacatcaaaaaagccactggagaaactgaacgactctctgaaagccttaaactaagatatgaagaagttgaaatctggaaaaaacttgaggaaaaggacaggcagggggaagcacagtggctacaacaaaaaaggcaggaaacaggaagagaggatggcagcatgttggctaaaggttctttggagattgtattggattccaaagacaaaacccaaaagagcaatggtgaaaagaatgaaaaatgtgagaccaaagagaaaggagcaatcacagcaaaggaactatacacaatgatgatggataaaaacatcagcttgattataatggatgctcaaagaatgcaggattatcaggattcctgtattttacattctctcagtgttcctgaaaaagccatcagtccaggagtcactgctagctggattgaagcacacctcccagatgattctatagatacatggaagaagagggggaatgtggagtatatggtacttcttgactggtttagttctgcaaaagatttacagattggaacaacactctggcatctgaaagatgcacttttcaagtgggaaaagggaggctataaaaactggttcctttgctattcccagtatacaacaaatgctaaggtcactccacccccacaacaccagaatgaagagttgtctatctcattggattttacttatccctcattggaagaatcaattccttctaaacctgctgccgagatgccacctccacctataaaagtggatgaagacatagaattgataagtgatcaaataagtgataatgatcaaaatgagaggacaggaccactgaatatatcaattccagttgaatcagttgctgcttctaaatctgatgtttcacccatcattcagccagtgcctagcataaagaatgttccacagattgatcatactaaaaaactggcagtcaaattgcctgaagagcatataatcaaatctgaaagtacaaatcatgagcaacagtctcctcagaatgaaaaagttattcctgattgttccaccaagccagtagtttcctctccaactctcatgttaacagatgaagaaaaggctcatattcatgcagaaactgctcttctaatggagaaaaacaaacaagaaaaagaacttcaggaaagacagcaagggaaacagaaagaaactgaggagggaagaacacgagcaaaaagccaaaaagaaacaagaagctga

SEQ ID NO: 136379 - DNA, 2984 bp, Homo sapiens
cggcacgaggggtgtgagctgggctggcttccgtcctggtagccaaggctaattctccctcgagttcttgggagatgggcatttggcgagaaggctggcgttagtcaagcgcgcccggcgtcacggaaagaagcacttgtaaggaaatatagcatccattgtgaaagtggaaaagtaaagataattcatcatgcctgctgtggcttcagttcctaaagaactctacctcagttcttcactaaaagaccttaataagaagacagaagttaaaccagagaaaataagcactaagagttatgtgcacagtgccctgaagatctttaagacagcagaagaatgcagattagatcgtgatgaggaaagggcctatgtactatatatgaaatacgtgactgtttataatcttatcaaaaaaagacctgatttcaagcaacagcaggctgactgtgcttacttcttagggcagacagttcacatactgttccagcatagagcactactagagaagaaatatagagcagtaggagcaatcacagcaaaggaactatacacaatgatgacggataaaaacatcagcttgattataatggatgctcgaagaatgcaggattatcaggattcctgtattttacattctctcagtgttcctgaagaagccatcagtccaggagtcactgctagttggattgaagcacacctgccagatgattctaaagacacatggaagaagagggggaatgtggagtatgtggtacttcttgactggtttagttctgccaaagatttacagattggaacaactctccggagtctgaaagatgcacttttcaagtgggaaagtaaaactgtcctgcgcaatgagcctttggttttagagggaggctatgaaaactggctcctttgttatccccagtatacaacaaatgctaaggtcactccacccccacgacgccagaatgaagaggtgtctatctcattggattttacttatccctcattggaagaatcaattccttctaaacctgctgcccagacgccacctgcatctatagaagtagatgaaaatatagaattgataagtggtcaaaatgagagaatgggaccactgaatatatcaactccagttgaaccagttgctgcttctaaatctgatgtttcacccataattcagccagtgcctagtataaagaatgttccacagaagagatggagggacagatataggaggaaaattaacagcgtgcagaaggatatgggaagaacatatcatgggactcaggtttttgatttgtgcaactattgggagagtgagagtggttacatccatgagagtaaagaggaacagaaagagaaactgaggaaggaagaacaagaacaaaaagccaaaaagaaacaagaagctgaagaaaatgaaattacagagaagcaacaaaaagcaaaagaagaaatggagaagaaagaaagtgaacaggccaagaaagaagataaagaaacctcagcaaagaggggcaaagaaataacaggagtaaaaagacaaagtaaaagtgaacatgaaacttctgatgccaagaaatctgtagaagatagggggaaaaggtgtccaaccccagaaatacagaaaaagtcaacaggagatgtgccccatacatctgtgacaggggattcaggttcaggcaagccatttaagattaaaggacaaccagaaagtggaattctaaggacaggaacttttagagaggatacagacgataccgaaagaaataaagctcaacgagaacctttgacaagagcacgaagtgaagaaatggggaggatcgtaccaggactgccttcaggctgggccaagtttcttgacccaatcactggaacctttccgttattatcattcacccaccaacactgttcatatgtacccaccggaaatggctccttcatctgcacctccttccacccctccaactcataaagccaagccacagattcctgctgagcgggatagggaaccttccaaactgaagcgctcctactcctccccagatataacccaggctattcaagaggaagagaagaggaagccaacagtaactccaacagttaatcgggaaaacaagccaacatgttatcctaaagctgagatctcaagggcttttctgcttctcagatttccggaaccctcaatccctgtttttgggaggttcctggacccagctccttacctggaccctcccgaccctagggaaataccttggttatatgaaccctcaatattgcaagtcccccatgtaaccggcccccacattttggctgattatttccaacccgaaactgttatccaggatgatattaacaggtcaaatttgttggggcataaaggtgaagtggcagaagaatttggtataatcatgaaagccctgtggacaggacagtatagatatatcagcccaaaggactttaaaatcaccattgggaagatcaatgaccagtttgcaggatacagtcagcaagattcacaagaattgcttctgttcctaatggatggtctccatgaagatctaaataaagctgataatcggaagagatataaagaagaaaataatgatcatctcgatgactttaaagctgcagaacatgcctggcagaaacacaagcagctcaatgagtctattattgttgcactttttcagggtcaattcaaatctacagtacagtgcctcacatgtcacaaaaagtctaggacatttgaggccttcatgtatttgtctctaccactagcatccacaagtaaatgtacattacagaatcactacggtgggctggatggaggccactacacagcctattgtaaaaatgcagcaagacaacggtggtttaagtttgatgatcatgaagtttctgatatctccgtttcttctgtgaaatcttcagcagcttatatcctcttttatacttcattgggaccacgagtaactgatgtagccacataa

SEQ ID NO: 136380 - DNA, 4449 bp, Homo sapiens
gtgagctgggctggcttccgtcctggtagccaaggctaattctccctcgagttcttgggagatgggcatttggcgagaaggctggcgttagtgaagcgcgcccggcgtcacggtgagtgcgggtcttgggccctagcacctgttctctgggaagtcgtccgctgtgaacgatgaacgcctttccttccaccagctgttggttaccccggagacaagcgtatgtccgcggagaggagtgggacaactcctaaaggaaagaagcacttgtaaggaaatatagcatccattgtgaaagtggaaaagtaaagataattcatcatgcctgctgtggcttcagttcctaaagaactctacctcagttcttcactaaaagaccttaataagaagaacagaagttaaaccagagaaaataagcactaagagttatgtgcacagtggcctcggaaaatctttaagacagcagaagaatgcagattagatcgtgatgaggaaagggcctatgtactatatatgaaatacgtgactgtttataatcttatcaaaaaaagacctgatttcaagcaacagcaggattatttccattcaatacttggacctggaaacatcaaaaaagctgtcgaagaagctgaaagactctctgaaagccttaaattaagatatgaagaagctgaagtccggaaaaaacttgaggaaaaagacaggcaggaggaagcacagcggctacaacaaaaaaggcaggaaacaggaagagaggatggtggcacattggctaaaggctctttggagaatgttttggattccaaagacaaaacccaaaagagcaatggtgaaaagaatgaaaaatgtgagaccaaagagaaaggagcaatcacagcaaaggaactatacacaatgatgacggataaaaacatcagcttgattataatggatgctcgaagaatgcaggattatcaggattcctgtattttacattctctcagtgttcctgaagaagccatcagtccaggagtcactgctagttggattgaagcacacctgccagatgattctaaagacacatggaagaagagggggaatgtggagtatgtggtacttcttgactggtttagttctgccaaagatttacagattggaacaactctccggagtctgaaagatgcacttttcaagtgggaaagtaaaactgtcctgcgcaatgagcctttggttttagagggaggctatgaaaactggctcctttgttatccccagtatacaacaaatgctaaggtcactccacccccacgacgccagaatgaagaggtgtctatctcattggattttacttatccctcattggaagaatcaatttccttctaaacctgctgcccagacgccacctgcatctatagaagtagatgaaaatatagaattgataagtggtccaaaatgagagaatgggaccactgaatatatcgaactccagttgaaccagttgctgcttctaaatctagatgtttcaccccataattcagccagtgcctagtataaagaatgttccccagattgatcggtactaaaaaaccagcagtcaaattgcctgaagagcatagaataaaatctgaaagtacaaaccatgagcgaacaatctcctcagagtggaaaagttattcctgatcgttccaccaagccagtagttttttctccaactctcatgttaacagatgaagaaaaggctcgtattcatgcagaaactgctcttctaatggaaaaaaacaaacaagaaaaagaacttcgggaaaggcagcaagaggaacagaaagagaaactgaggaaggaagaacaagaacaaaaagccaaaaagaaacaagaagctgaagaaaatgaaattacagagaagcaacaaaaagcaaaagaagaaatggagaagaaagaaagtgaacaggccaagaaagaagataaagaaacctcagcaaagaggggcaaagaaataacaggagtaaaaagacaaagtaaaagtgaacatgaaacttctgatgccaagaaatctgtagaagatagggggaaaaggtgtccaaccccagaaatacagaaaaagtcaacaggagatgtgccccatacatctgtgacaggggattcaggttcaggcaagccatttaagattaaaggacaaccagaaagtggaattctaaggacaggaacttttagagaggatacagacgataccgaaagaaataaagctcaacgagaacctttgacaagagcacgaagtgaagaaatggggaggatcgtaccaggactgccttcaggctgggccaagtttcttgacccaatcactggaacctttcgttattatcattcacccaccaacactgttcatatgtacccaccggaaatggctcctttcatctgcacctcctttccacccctccaaactcataaagccaagccacagattcctgctgagcgggatagggaaccttccaaactgaagcgctcctactcctccccagatataacccaggctattcaagaggaagagaagaggaagccaacagtaactccagcagttaatcgggaaaacaagccaacatgttatcctaaagctgagatctcaaggctttctgcttctcagattcggaacctcaatcctgtttttggaggttctggaccagctcttactggacttcgtaacttaggaaatacttgttatatgaactcaatattgcagtgcctatgtaacgctccacatttggctgattatttcaaccgaaactgttatcaggatgatattaacaggtcaaatttgttggggcataaaggtgaagtggcagaagaatttggtataatcatgaaagccctgtggacaggacagtatagatatatccagcccaaaggactttaaaatcacccattgggaagatcaatgacccagtttgcaggatacagtcagcaagattcacaagaattgcttctgttccctaatggatggtctccatgaagatctaaataaaagctgataatcggaagagatataaagaagaaaataatgatcatctcgatgactttaaagctgcagaacatgcctggcagaaaacacaagcagctcaatgagtctattatttgttgcactttttcagggtcaattcaaatctacagtacagtgcctcacatgtcacaaaaagtctaggacatttgaggccttcatgtatttgtctctaccactagcatccacaagtaaatgtacattacaggattgccttagattattttccaaagaagaaaaactcacagataacaacagattttactgcagtcattgcagagctcgacgggattctctaaaaaagataggaaatctgggaaggttaccacctgtggcttttaggtgcatctggaaacgtttttcctacgatgggcaggtgggaaacaaaaattacaggacatctgtgggacttcccgttaggaaattcttggactttgttcacagtatgttattgggtcccaaagaacaatttgaaggaaattataatttgttttcctgtttccaaatccactacgggtggggctgggatgggagggccactacacagcctattgtaaaaatgcagcaagacaacggtggtttaagtttgatgatcatgaagtttctgatatctccgtttctttctgtgaaatcttcagcagcttatatcctcttttatacttcatttggggccacgggtaactgatgtagccacataaggagacataggttataaactagttatcttttaaaaggctcagcaacacaactcttgaaatgcttatcaggataatggtagctatagctggccatttagaggaattctaggacagtgggagctgtgttactagcactatataattccggtcagtgctgacaaataacatttaacaagtattgcagtaatcatcacttacaggtaccatttatttccaaaacaactttttttagtctgctctcaagttacagaaattaactagctaagcattattattcggactggtctaaaaactattgttatctttttttttttccttttcactgttaatgcccttttcacatttctaaatccccatcttgatatacttatgaatactcttagaatgatgtaaagcagatagataggaatgtatgtgtaccataattttattgcatacttgcaccatcaaaatcggatggtaccatagtttaacacgtggtccttttgtgaaacctcagaactcagaggattgctttttttctttcagcctattttgagttaacttcagtgctttcttagggaaatgacaggggcaaagcaatttttctgttggctttgggctgtatttgtgcactaaatctttattctaaaaaaaaaaatggaaactttaatttttttaaaacgagaatttcatttacagctacattaaaatcttaatgagaaaaataatttataaaaaaaaaaa

SEQ ID NO: 136381 - DNA, 562 bp, Homo sapiens
gtgcatcttcagtccggagtttattgagcgtgagaccaggcctgactcctgcaggggccaggtttttgcggggactccatgcctgtggaggcccgaccgagtgcagcctggcggggtgggcgggcaccaggctggacaccattcagtcctcctgatagggaaacgtggaaaccccaactgcttcccaaggggaaagtgggcaaagaaggttcgggccatgtcctcgatctgggggtaggcccccagggcctggaagtgctgcacatagttccagaagtcagaggtggagaaaggccagtagggcatggccggcagctccgcgtaagggtctccttcctcctgcacaggcttggcccccgacaccagctgcagggctctaaggtttcctagcagcctgcaagaggccccagtaggaggcagagggccagccccggcaccatgcaggcctgcatcttcccggtgcttcctgatctgcgactcaggcccaccttgtctctgctcagccagccgtgctgcctggatgggctctgctgccagctcaagagtcctctttatagaaggg

SEQ ID NO: 136382 - DNA, 493 bp, Homo sapiens
tgggcgccggcactccggtccccgccgctccccgtccccgctgctcctagcccctgccgcgtccccggcggacgggctatggcgccaccgggcgcctgtgccgggaccgtgtgggccgtgagatgaggacggctgggagactcgaggggaccgcaagtgcaggccaagctggagaacgccgaagtgctggagctgacggtgcggcgggtccagggtgtgctgcggggccgggcgcgcgaggcagcagctgcaggcggaacgatgcgagcgcttcgctgccggctacatccagtgcatgcacgaggtgcacacgttcgtgtccacgtgccaggccatcgacgctaccgtcgctgccgagctcctgaaccatctgctcgagtccatgccgctgcgtgagggcagcagcttccaggatctgctgggggacgcctggcgggccacctagagccctggacggatggctggctgcgggggcgctccggatcccaatacc

SEQ ID NO: 136383 - DNA, 366 bp, Homo sapiens
aagggtaactaactccaaaattctttatttagtaaaattgtcacatttgatgtcaatggaatacacaaactcaagtgtgctacaaacaagatgtacagagcatcacagctctgggcagtgcagctcagtgcacctgcctctcatctccccgctgaagtggcaagttcaagcttttgtttagcccagggctgcctggaacactagtgcccagcaccattcctgccacctctgcccccagagcccgcacagggctggtgaagcctgggtgggtgaacctgggagagcgctggcagctctacaaaattcttcctcctgactgggctggttaccaggggctgccctgcaagccatccatcagagctgcag

SEQ ID NO: 136384 - DNA, 1332 bp, Homo sapiens
atgcaatccggggtcgtcgttcttcaccaagtgagtcttcccacccagagaacgtgtttaaaggtcgctgccggctacatccagtgccatgacgaggtgcacacgttcgtgtccacgtgccaggccatcgacgctaccgtcgctgccgagctcctgaaccatctgctcgagtccatgccgctgcctgcccctggactaagaaatacttccggaatagattcaccttggaaaaaaacaggaaagaacagaaaattgaagtccaagcgggtcaaacctcgagactcatctgagagcaccggatctggggggcccgtgtccgcccggcccccgctggtgggcttgaacgccacagcctggtcaccctcagacacgtcccagtccagctgcccagccgtgccctttcccgccccagtgccagcagcttattcactgcccgtgtttccagcgccagggactgtggcagcacccccggcacctctccacgccagcttcacagtgcctgctgtgcccgtggacctcagcaccagtttgcagtccagcccccacctttccctgccctatggcgcctgtcatggcattcatgctacccagttattccttccctcggggaccccaaacctgccccaggccttcttccccagccagcctcagtttccgagccaccccacactcacatccgagatggcctctgcctcacagcctgagttccccagccggacctcgatccccagacagccatgtgcttgtccagccacccgggccaccccaccatcggccatgggtagggcctccccaccgctctttcagtcccgcagcagctcgcccctgcagctcaacctgctgcagctggaggaagcccctgagggtggcactggagccatggggaccacaggggccacagagacagcagctgtaggggcggactgcaaacctggcacttctcgggaccagcagccgaaggcgcctctgacccgtgatgaaccctcagacacacagaacagtgacgccctttccacgtcaagcggcctcctaaacctcctgctgaatgaggacctctgctcagcctcgggctctgctgcttcggagtctctgggctccggctcactgggctgcgacgcctccccgagtggggcaggcagtagtgacacaagtcataccagcaaatattttggaagcattgactcctcagagaataatcacaaagcaaaaatgaacactggtatggaagaaagtgagcatttcattaagtgcgtcctgcaggatcccatctggctgctgatggcagatgcggacagcagcgtcatgatgacgtaccagctgccttcccggtaa

SEQ ID NO: 136385 - DNA, 1377 bp, Homo sapiens
gcggccgcggggtcagcggagggcgccggcactccggtccccgccgctccccgtccccgctgctcctatcccctgccgcgtccccggcggagcgggctatgggcgccacccgcggcgcctggcacgggaccgtgtgggccgtgaggatgaggacggctgggagacgcgaggggaccgcaaggcccggaagcccctggtggagaagaagcggcgcgcgcggattcaacgagagcctgcaggagctgcgggttgctgctgggcgggcgccgagggtgcaggccaagcttgaaaaacgccgaactgctggagctgacggtgcggcgggtccagtgtgtgctgcggggccgggcgcgcgagcgcgagcagctgcaggcggaagcgaggcgagcgcttcgctgccggctacatccagttgcatgcacgaaggtgcacacgttcgtgtccacgtgccaggccatcgacgctaccgtcgctgccgagctcctgaaccatctgctcgagtccatgccgctgcgtgagggcagcagcttccaggatctgctgggggacgccctggcggggccacctagagcccctggacggagtggctggcctgcggggggcgctccgggatccccaatacccagccccccgggtcctggggacgacctgtgctccgacctggaggaggcccctgaggctgaactgagtcaggctcctgctgaggggcccgacttggtgcccgcagccctgggcagcctgaccacagcccaaattgcccaggagtgtctggaggccttggtgaccaatgccagccagagtcctgcaggggtggggcccggccctccctgggatctcctcccctcctcccaggggttcagatgtggtgggggtagggccctggaagtctcccagggtcttccctccctcctctgatggatggcttgcaggggcagcccctggtaaccagcccagctcagcgccccagccccgtttcttaaaaaaacttttagggaccctgcagctctggaagtgggtggagggagggagctacgggcaggaggaagaattttgtagagctgccagcgctctcccaggtttcacccagcccagccttcaacccacgcctgtgcgggctctgggggcagaggtggcagaaactggtgctgggcactagtgttccaggcagccctgggctaaacaaaagcttgaacttgccacttcagcggggagatgagaggcaggtgcactgagctgcactgcccagagctgtgatgctctgtacatcttgtttgtagcacagcttgagtttgtgtattccattgacatcaaatgtgacaattttactaaataaagaattttggagttagttacccttgaaaaaaaaaaaagtcgacg

SEQ ID NO: 136386 - DNA, 1527 bp, Homo sapiens
atggtaccagctcctcctttacccctgggagaattcggccgtgaacccaccggtcccggatctttttggttggtaagcattgattatggcccaatttcagagcccgtaatgggccaatcagagatccacttcttccggtttagcctgggaggtccaatgaaaattagcgatggaaactggttgattcaacctggcctcaatttgattcacccgcttcaggtgttcgaggttgaacagcaggataatgaaatggtggtctatgctgccccccgtgatgtgcgtgaacgtacctggcagcttgatacgcctttatttacgttgcgctttttctccccacaggaaggtattgtcggtgtgcggattgagcattttcagggggcgctgaataacggtcctcattatccgctcaatattttgcaggacgtgaaggtcacaatcgaaaacacagaacgttatgctgagtttaaaagtggcaacttaagcgcgcgtgtcagcaaaggtgagttctggtcactggattttctgcgcaacggcgaacgtattaccggtagtcaggtgaaaaataatggctacgtgcaggacacgaataatcaacgcaattatatgtttgagcggcttgatcttggcgttggcgaaacagtttacggtctgggagagcgctttactgccctggtgcgcaatggccagacggtagagacctggaaccgggacgcggcacaagtgaacggtgtggacatgaagctgcccgtggtgctggccaacggccagatccgtgcctcccagcatggttcagatgttgtgattgagaccgacttcggcctgcgtgtggcctacgaccttgtgtactatgtgcgggtcaccgtccctggaaactactaccagctgatgtgtggcctgtgtgggaactacaatggcgaccccaaggatgacttccagaagcccaatggctcgcaggcaggcaacgccaatgagttcggcaactcctgggaggaggtggtgtccgactctccctgcctgccgccgcccacctgcccgccggggagcgagggctgtatccccagcgaggagtgtcctcccgagctggagaagaagtatcagaaggaggagttctgtgggctcctctccagccccacagggccactgtcctcctgccacaagctggtggatccccagggtcccttgaaagattgcatctttgatctctgcctgggtggtgggaacctgagcattctctgcagcaacatccatgcctacgtgagtgcttgccaggtggctggaggccacgtggagccctggaggaatgaaactttctgtcccatggaatgccctcagaacagtcactacgagctctgtgcggacacctgctccctgggctgctcggctctcagtgcccctctgcagtgcccagatgggtgtgctgagggctgccagtgtgactccggcttcctctacaacggccaagcctgcgtgcccatccagcaatgtggctgctaccacaatggtgcctactatgaggtaggaacctag

SEQ ID NO: 136387 - DNA, 8875 bp, Homo sapiens
atgaggatggcagcctcctccaggaagttggcatcatctgcctggcacgtggcccagggtgtggcccagaaactccactatatagccctgccacagggctggccctgcagctccagggacctgcagccatgggtgccctatggagctggtggatactctgggctggagcaaccctcctgtgggagcaaaagtggggaggattggataagtggacccacaactgtattttctcaaccaggattgacccaggaggcttcagtggacctcaagaacactggcagagaggaattcctcacagccttcctgcagaactatcagctggcctacagcaaggcctacccccgcctccttatctccagtctgtcagagagccccgcttcagtctccatcctcagccaggcagacaacacctcaaagaaggtcacagtgaggcccggggagtcggtcatggtcaacatcagtgccaaggctgagatgataggcagcaagatcttccagcatgcggtggtgatccattctgactatgccatctctgtgcaggcactaaatgccaagcctgacacagcggagctgacactgctgcggcccatccaggccctaggcaccgagtattttgtgctcacaccccccggcacctcagccaggaatgtcaaggagtttgccgtggtggccggtgccgcaggtgcctcggtcagtgtcacgctgaaggggtcagtgacattcaatggcaagttctatccagcaggcgatgtcctaagagtgactctacagccctacaatgtggcccagctacagagctcagtggatctctcggggtcaaaggtcacagctagtagccccgtggctgtcctctctggccacagctgtgcgcagaaacatacgacctgcaaccatgtggttgagcagctgctacccacgtctgcctggggcacccactatgtagtacccacgctggcctcccaatctcgctatgatttggccttcgttgtggccagccaggccacaaagctgacctacaaccatgggggtatcactggctcccgtgggctccaggcaggtgatgtggtagagtttgaggtccggccatcctggccactctacctgtctgcaaatgtgggcatccaggtcctgttgtttggcacaggtgccataaggaatgaagtgacttatgacccctacctggtcctgatcccagatgtggcggcctactgcccagcctatgtggtcaagagtgtaccaggctgtgagggcgtggccctggtagtggcacagacgaaggctatcagcgggctgaccatagatgggcatgcagtgggggccaagctcacctgggaggctgtgccaggcagtgagttctcgtatgctgaagtggagctcggcacagctgacatgatccacacggccgaggccaccaccaacttgggactgctcaccttcgggctggccaaggctataggctacgcaacagctgctgattgcggccggactgtactgtccccagtggagccctcctgcgaaggcatgcagtgcgcagccgggcagcgctgccaggtggtaggcgggaaggccgggtgtgtggcggagtccaccgctgtctgccgcgcccagggcgacccccattacaccaccttcgacggccgtcgctacgacatgatgggcacctgttcgtacacgatggtggagctgtgcagcgaggacgacaccctgcccgccttcagcgtggaggccaagaacgagcaccggggcagccgccgcgtctcctacgtgggcctcgtcactgtgcgcgcctacagccactctgtgtcgctgacccgcggtgaagttggcttcgtcctggttgacaaccagcgctcgcgcctgccagtctccctgagtgagggtcgcctgcgtgtgtaccagagcggaccacgggccgtggtggagctggtctttgggctggtggtcacttatgactgggactgccagctggcactcagcctgcctgcacgcttccaagaccaggtgtgcgggctgtgtggcaactataatggtgacccagcagacgacttcctcacgcctgacggggctctggctcctgacgctgtggagttcgcaagtagctggaagctggatgatggggactacctgtgtgaggatggctgccagaacaactgtcccgcctgcaccccaggccaggcccaacactatgagggcgaccgactctgtggcatgctgaccaagctcgatggccccttcgctgtctgccatgacaccctggaccccaggcccttcctggagcagtgtgtatatgacctgtgtgtggtcggtggggagcggctcagcctgtgccgtggcctcagcgcctatgcccaggcctgtctggagcttggcatctcggttggggactggagatcaccagccaactgccccctgtcctgccctgccaacagccgctatgagctctgcggccctgcttgcccgacctcctgcaacggggctgcggcgccgtccaactgctccgggcgcccctgcgtggagggctgcgtgtgcctcccaggcttcgtggccagcggcggcgcctgcgtgccggcctcgtcgtgtggctgcaccttccagggtctccagctcgctccgggccaggaagtgtgggcggacgagttgtgccaaaggcgctgcacctgcaacggcgccacccatcaggtcacctgccgcgacaagcagagctgcccggcgggtgagcgctgcagcgtccagaacggcctcctgggctgctaccccgatcgcttcgggacctgccaggggtccggggacccacactatgtgagcttcgacggccggcgcttcgacttcatgggcacctgcacgtacctgctggtcggctcatgcggccagaacgcagcgctgcctgccttccgggtgctggtggaaaacgagcatcggggcagccagactgtgagctacacgcgcgccgtgcgggtggaggcccgcggggtgaaggtggccgtgcgccgggagtaccccgggcaagtgctggtggatgacgtccttcagtatctgcccttccaagcagcagatgggcaggtgcaggtgttccgacagggcagggatgccgtcgtgcgcacggactttggcctgactgtcacttatgactggaatgcacgagtgactgccaaggtgcccagcagctatgctgaggccctgtgtggactctgtgggaacttcaacggggacccagctgatgacctggctctgcggggtgggggtcaagctgccaatgcactggcctttgggaacagctggcaagaagagacgaggcccggctgtggagcaactgaaccgggtgactgtcccaagctggactccctggtggcccagcagctgcagagcaagaatgagtgtggaatccttgccgaccccaaggggcccttccgggagtgccatagcaagctggacccccagggtgccgtgcgcgactgtgtctatgaccgctgcctgctgccaggccagtctgggccactgtgtgacgcactggccacctatgctgctgcatgccaggctgctggagccacagtgcacccctggaggagtgaagaactttgcccactgagctgcccaccccacagccactatgaggcgtgttcctacggctgcccgctgtcctgtggagacctcccagtgcccgggggctgtggctcagaatgccatgagggctgcgtgtgcgatgagggctttgcgctcagtggtgagtcctgcctgcccctggcctcctgtggctgcgtacaccagggcacctaccacccaccaggccagaccttctaccctggccccggatgtgattccctttgccactgccaggagggcggcctggtgtcctgtgagtcctccagctgcggaccgcacgaggcctgccagccatccggtggcagcttgggctgtgtggccgtgggctctagcacctgccaggcgtcaggagacccccactacaccaccttcgatggccgccgcttcgacttcatgggcacctgcgtgtatgtgctggctcagacctgcggcacccggcctggcctgcatcggtttgccgtcctgcaggagaacgtggcctggggtaatgggcgagtcagtgtgaccagggtgatcacggtccaggtggcaaacttcaccctgcggctggagcagagacagtggaaggtcacgcactttacaaatattaatttatctgatcctgacaacagttccgtggggcaaacaccttattcccgcctgatagatgaggaaacagaaacagggagaggtgactttgtgacccccaaggtcacaaagagggtgaacggtgtggacatgaagctgcccgtggtgctggccaacggccagatccgtgcctcccagcatggttcagatgttgtgattgagaccgacttcggcctgcgtgtggcctacgaccttgtgtactatgtgcgggtcaccgtccccggaaactactaccagcagatgtgtggcctgtgtgggaactacaacggcgaccccaaggatgacttccagaagcccaatggctcacaggcaggcaacgccaatgagttcggcaactcctgggaggaggtggtgcccgactctccctgcctgccgcccaccccttgcccgccggggagcgaggactgtatccccagccacaagtgtcctcccgagctggagaagaagtatcagaaggaggagttctgtgggctcctctccagccccacagggccactgtcctcctgccacaagctggtggatccccagggtcccttgaaagattgcatctttgatctctgcctgggtggtgggaacctgagcattctctgcagcaacatccatgcctacggctctgatcggcaccccctccttgcagccatggagtgccctccgaacagtcactacgagctctgtgcggacacctgctccctgggctgctcagctctcagtgcccctccacagtgccaggatgggtgtgctgagggctgccagtgtgactccggcttcctctacaatggccaagcctgcgtgcccatccagcaatgcggctgctaccacaatggtgtctactatgagccggagcagacagtcctcattgacaactgtcggcagcagtgcacgtgccatgcgggtaaaggcatggtgtgccaggaacacagctgcaagccggggcaggtgtgccagccctccggaggcatcctgagctgcgtcaccaaaggtgctgagctggggttgggcctggggctgatgcgactagggatggaggacaaggactctggggctgagggtggtgtaactggggtgtccatggcgggagacccgtgccacggcgtgacatgccggccacaggagacatgcaaggagcagggtggccagggcgtgtgcctgcccaactatgaggccacgtgctggctgtggggcgacccacactaccactccttcgatggccggaagtttgacttccagggcacctgtaactatgtgctggcaacaactggctgcccgggggtcagcacccagggcctgacacccttcaccgtcaccaccaagaaccagaaccggggcaaccctgctgtgtcctacgtgagagtcgtcaccgtggctgccctcggcaccaacatctccatccacaaggacgagatcggcaaagtccgggtgaacggtgtgctcacagccttgcctgtctctgtggccgacgggcggatttcagtgacccagggtgcatcgaaggcactgctggtggctgactttggactgcaagtcagctatgactggaactggcgggtagacgtgacgctgcccagcagctatcatggcgcagtgtgcgggctctgcggtaacatggaccgcaaccccaacaatgaccaggtcttccctaatggcacactggctccctccatacccatctggggcggcagctggcgagccccaggctgggacccactgtgttgggacgaatgtcgggggtcctgcccaacgtgccctgaggaccggttggagcagtacgagggccctggcttctgcggacccctggcccccggcacagggggccctttcaccacctgccatgctcatgtgccacctgagagcttcttcaagggctgtgttctggacgtctgcatgggtggtggggaccgtgacattctttgcaaggctctggcttcctatgtggccgcctgccaggctgctggggttgtcatcgaagactggcgggcacaggttggctgtgagatcacctgcccagaaaacagccactatgaggtctgtggctcaccctgcccggccagctgtccgtcccctgcaccccttacgacgccagccgtatgtgagggcccctgtgtggagggctgccagtgcgacgcgggtttcgtgttaagtgctgaccgctgtgttcccctcaacaacggctgcggctgctgggccaatggcacctaccacgaggcgggcagtgagttttgggctgatggcacctgctcccagtggtgtcgctgcgggcctgggggtggctcgctggtctgcacacctgccagctgtgggctgggtgaagtgtgtggcctcctgccatccggccagcacggctgccagcccgtcagcacagctgagtgccaggcgtggggtgacccccattacgtcactctggatgggcaccgattcaatttccaaggcacctgcgagtacctgctgagtgcaccctgccacggaccacccttgggggctgagaacttcactgtcactgtagccaatgagcaccggggcagccaggctgtcagctacacccgcagtgtcaccctgcaaatctacaaccacagcctgacactgagtgcccgctggccccggaagctacaggtggacggcgtgttcgtcactctgcccttccagctggactcgctcctgcacgcacacctgagcggcgccgacgtggtggtgaccacaacctcagggctctcgctggctttcgacggggacagcttcgtgcgcctgcgcgtgccggcggcgtacgcgggctctctctgtggcttatgcgggaactacaaccaggaccccgcagacgacctgaaggcggtgggcgggaagcccgccggatggcaggtgggcggcgcccagggctgcggggaatgtgtgtccaagccatgcccgtcgccgtgcaccccagagcagcaagagtccttcggcggcccggacgcctgcggcgtgatctccgccaccgacggcccgctggcgccctgccacggccttgtgccgcccgcgcagtacttccagggctgcttgctggacgcctgccaagttcagggccatcctggaggcctctgtcctgcagtggccacctacgtggcagcctgtcaggccgctggggcccagctccgcgagtggaggcggccggacttctgtcccttccagtgccctgcccacagccactacgagctctgcggtgactcctgtcctgggagctgcccgagcctgtcggcacccgagggctgtgagtcggcctgccgtgaaggctgtgtctgcgatgctggcttcgtgctcagtggtgacacgtgtgtacctgtgggccagtgtggctgcctccacgatgaccgctactacccactgggccagaccttctaccctggccctgggtgtgattccctttgccgctgccgggagggcggtgaggtgtcctgtgagccctccagctgcggcccgcatgagacctgccggccatccggtggcagcttgggctgcgtggccgtgggctctaccacctgccaggcgtcgggagatccccactacaccaccttcgatggccgccgcttcgacttcatgggcacctgcgtgtatgtgctggctcagacctgcggcacccggcctggcctacatcggtttgccgtcctgcaggagaacgtggcctggggtaatgggcgagtcagtgtgaccagggtgatcacggtccaggtggcaaacttcaccctgcggctggagcagagacagtggaaggtcacggtgaacggtgtggacatgaagctgcccgtggtgctggccaacggccagatccgtgcctcccagcatggttcagatgttgtgattgagaccgacttcggcctgcgtgtggcctacgaccttgtgtactatgtgcgggtcaccgtccctggaaactactaccagctgatgtgtggcctgtgtgggaactacaacggcgaccccaaggatgacttccagaagcccaatggctcgcaggcaggcaacgccaatgagttcggcaactcctgggaggaggtggtgcccgactctccctgcctgccgccgcccacctgcccgccggggagcgagggctgtatccccagcgaggagtgtcctcccgagctggagaagaagtatcagaaggaggagttctgtgggctcctctccagccccacagggccactgtcctcttgccacaagctggtggatccccagggtcccttgaaagattgcatctttgatctctgcctgggtggtgggaacctgagcattctctgcagcaacatccatgcctacggctctgatcggcaccccctccttgcagccatggaatgccctcagaacagtcactacgagctctgtgcggacacctgctccctgggctgctcggctctcagtgcccctctgcagtgcccagatgggtgtgctgagggctgccagtgtgactccggcttcctctacaacggccaagcctgcgtgcccatccagcaatgtggctgctaccacaatggtgcctactatgagccggagcagacagtcctcattgacaactgtcggcagcagtgcacgtgccatgtgggtaaagtcgtggtgtgccaggaacacagctgcaagccggggcaggtgtgccagccctccggaggcatcctgagctgcgtcaacaaag

SEQ ID NO: 136388 - DNA, 2373 bp, Homo sapiens
gatctccgccaccgacggcccgctggcaccctgccacggccttgtgccgcccgcgcagtacttccagggctgcttgctggacgcctgccaagttcagggccatcctggaggcctctgtcctgcagtggctacctacgtggcagcctgtcaggccgctggggcccagctcggcgagtggaggcggccggacttctgtcccttgcagtgccctgcccacagccactatgagctctgcggtgactcctgccctgtgagctgcccgagcctctcagcacccgagggctgtgagtcggcctgccgtgaaggctgtgtctgcgatgctggcttcgtactcagtggtgacacctgcgtacccgtgggccagtgtggctgcctccatgatggccgctactacccactgggcgaggtcttctacccgggccctgagtgtgagcggcgctgtgagtgtgggccaggtggccatgtcacctgccaggagggcgcagcctgtgggccccatgaggagtgccggttagaggatggtgtccaggcctgtcatgccacaggctgtggccgctgcctggccaacgggggcatccactacatcacccttgatggccgtgtctacgacctgcatggctcctgctcctatgtcttggcccaagtctgccacccaaagcctggggacgaggacttttccatcgtgcttgagaagaatgcagctggagatctccaacgcctcctggttactgtggctggccaggttgtgagcctagctcaggggcagcaggtcaccgtggacggcgaggctgtggccctgcctgtggctgtgggccgcgtgcgggtgaccgccgagggccgaaacatggttctgcagacgaccaaggggctgcggcttctctttgatggcgatgcccacctcctcatgtccatccccagccccttccgtggacggctctgtggcctctgtgggaacttcaatggcaactggagtgacgactttgtcctgcccaatggctcagcagcgtccagtgtggagaccttcggggctgcatggcgggcgcccggctcctccaagggctgtggcgagggctgcgggccccaaggctgcccagtgtgcttggcagaggagactgcaccctatgagagcaacgaggcctgcgggcagctccggaacccccagggccccttcgcgacctgccaggcggtgctgagtccctctgagtacttccgccaatgcgtatacgacctgtgcgcgcaaaagggtgacaaagccttcctgtgccgcagcctggcagcctacacggcggcctgtcaggcagctggcgtggccgtgaagccctggaggacagacagcttctgcccgctccattgccccgcccacagccactactccatctgcactcgcacctgccagggatcctgtgcggctctctccggcctcacgggctgcaccacccgctgttttgagggctgtgagtgcgacgaccgcttcctgctttcccagggtgtctgcatccctgtccaagattgtggctgcacccataatggccgatacttgccggtaaactcctccctgctgacctcagactgcagcgagcgctgttcctgttcctcaagctctggcctgacatgccagggcagctggctgcccaaccagggccgtgtatgtgaggtcaaggctgaagcccgggaactgctggggccacccgtggtcttctgtgtcctgtctgtggggtgccaaccttcaccacctttgatggggcccgtggtgccaccacctctcctggtgtctatgagctctcttcccgctgcccaggactacagaataccatcccctggtaccgtgtagttgccgaagtccagatctgccatggcaaaacggaggctgtgggccaggtccacatcttcttccaggatgggatggtgacgttgactccaaacaagggtgtgtgggtgaatggtctccgagtggatctcccagctgagaagttagcatctgtgtccgtgagtcgtacacctgatggctccctgctagtccgccagaaggcaggggtccaggtgtggcttggagccaatgggaaggtggctgtgattgtcagcaatgaccatgctgggaaactgtgtggggcctgtggaaactttgacggggaccagaccaatgattggcatgactcccaggagaagccagcgatggagaaatggagagcgcaggacttctccccatgttatggctgatcagtcatccaccaggaacgaagatttcctgaagaagacctggtccctctggaggttgcagtggctgaaggatgcatcatgtgctcctaccctgctctaccgcttttctgggtcacagaggccaaatgtgagagcattgaataaatatcttaagct

SEQ ID NO: 136389 - DNA, 7640 bp, Homo sapiens
agatcacctgcccagaaaacagccactatgaggtctgtggcccaccctgcccggccagctgtccgtcccctgcaccccttacgacgccagccgtatgtgagggcccctgtgtggagggctgccagtgcgacgcgggtttcgtgttaagtgctgaccgctgtgttcccctcaacaacggctgcggctgctgggccaatggcacctaccacgaggcgggcagtgagttttgggctgatggcacctgctcccagtggtgtcgctgcgggcctgggggtggctcgctggtctgcacacctgccagctgtgggctgggtgaagtgtgtggcctcctgccatccggccagcacggctgccagcccgtcagcacagctgagtgccaggcgtggggtgacccccattacgtcactctggatgggcaccgattcgatttccaaggcacctgcgagtacctgctgagtgcaccctgccacggaccacccttgggggctgagaacttcactgtcactgtagccaatgagcaccggggcagccaggctgtcagctacacccgcagtgtcaccctgcaaatctacaaccacagcctgacactgagtgcccgctggccccggaagctacaggtggacggcgtgttcgtcactctgcccttccagctggactcgctcctgcacgcacacctgagcggcgccgacgtggtggtgaccacaacctcagggctctcgctggctttcgatggggacagcttcgtgcgcctgcgcgtgccggcggcgtacgcgggctctctctgtggcttatgcgggaactacaaccaggaccccgcagacgacctgaaggcggtgggcgggaagcccgccggatggcaggtgggcggcgcccagggctgcggggaatgtgtgtccaagccatgcccgtcgccgtgcaccccagagcagcaagagtccttcggcggcccggacgcctgcggcgtgatctccgccaccgacggcccgctggcgccctgccacggccttgtgccgcccgcgcagtacttccagggctgcttgctggacgcctgccaagttcagggccatcctggaggcctctgtcctgcagtggccacctacgtggcagcctgtcaggccgctggggcccagctccgcgagtggaggcggccggacttctgtcccttccagtgccctgcccacagccactacgagctctgcggtgactcctgtcctgggagctgcccgagcctgtcggcacccgagggctgtgagtcggcctgccgtgaaggctgtgtctgcgatgctggcttcgtgctcagtggtgacacgtgtgtacctgtgggccagtgtggctgcctccacgatgaccgctactacccactgggccagaccttctaccctggccctgggtgtgattccctttgccgctgccgggagggcggtgaggtgtcctgtgagccctccagctgcggcccgcatgagacctgccggccatccggtggcagcttgggctgcgtggccgtgggctctaccacctgccaggcgtcgggagatccccactacaccaccttcgatggccaccgcttcgacttcatgggcacctgcgtgtatgtgctggctcagacctgcggcacccggcctggcctgcatcggtttgccgtcctgcaggagaacgtggcctggggtaatgggcgagtcagtgtgaccagggtgatcacggtccaggtggcaaacttcaccctgcggctggagcagagacagtggaaggtcacggtgaacggtgtggacatgaagctgcccgtggtgctggccaacggccagatccgtgcctcccagcatggttcagatgttgtgattgagaccgacttcggcctgcgtgtggcctacgaccttgtgtactatgtgcgggtcaccgtccctggaaactactaccagctgatgtgtggcctgtgtgggaactacaacggcgaccccaaggatgacttccagaagcccaatggctcgcaggcaggcaacgccaatgagttcggcaactcctgggaggaggtggtgcccgactctccctgcctgccgccgcccacctgcccgccggggagcgcgggctgtatccccagcgacaagtgtcctcccgagctggagaagaagtatcagaaggaggagttctgtgggctcctctccagccccacagggccactgtcctcctgccacaagctggtggatccccagggtcccttgaaagattgcatctttgatctctgcctgggtggtgggaacctgagcattctctgcagcaacatccatgcctacgtgagtgcttgccaggcggctggaggccacgtggagccctggaggaatgaaactttctgtcccatggaatgccctcagaacagtcactacgagctctgtgcggacacctgctccctgggctgctcggctctcagtgcccctctgcagtgcccagatgggtgtgctgagggctgccagtgtgactccggcttcctctacaacggccaagcctgcgtgcccatccagcaatgtggctgctaccacaatggtgtctactatgagccggagcagacagtcctcattgacaactgtcggcagcagtgcacgtgccatgtgggtaaagtcgtggtgtgccaggaacacagctgcaagccggggcaggtgtgccagccctccggaggcatcctgagctgcgtcaccaaagacccgtgccacggcgtgacatgccggccacaggagacatgcaaggagcagggtggccagggcgtgtgcctgcccaactatgaggccacgtgctggctgtggggcgacccacactaccactccttcgatggccggaagtttgacttccagggcacctgtaactatgtgctggcaacaactggctgcccgggggtcagcacccagggcctgacacccttcaccgtcaccaccaagaaccagaaccggggcaaccctgctgtgtcctacgtgagagtcgtcaccgtggctgccctcggcaccaacatctccatccacaaggacgagatcggcaaagtccgggtgaacggtgtgctcacagccttgcctgtctctgtggccgacgggcggatttcagtgacccagggtgcatcgaaggcactgctggtggctgactttggactgcaagtcagctatgactggaactggcgggtagacgtgacgctgcccagcagctatcatggcgcagtgtgcgggctctgcggtaacatggaccgcaaccccaacaatgaccaggtcttccctaatggcacactggctccctccatacccatctggggcggcagctggcgagccccaggctgggacccactgtgttgggacgaatgtcgggggtcctgcccaacgtgccctgaggaccggttggagcagtacgagggccctggcttctgcggacccctggcccccggcacagggggccctttcaccacctgccatgctcatgtgccacctgagagcttcttcaagggctgtgttctggacgtctgcatgggtggtggggaccgtgacattctttgcaaggctctggcttcctatgtggccgcctgccaggctgctggggttgtcatcgaagactggcgggcacaggttggctgtgagatcacctgcccagaaaacagccactatgaggtctgtggcccaccctgcccggccagctgtccgtcccctgcaccccttacgacgccagccgtatgtgagggcccctgtgtggagggctgccagtgcgacgcgggtttcgtgttaagtgctgaccgctgtgttcccctcaacaacggctgcggctgctgggccaatggcacctaccacgaggcgggcactgtgggctgggtgaagtgtgtgcctcctgccatccggccagcacgctgccagcccgtcagcacagctgagtgccaggcgtggggtgacccccattacgtcactctggatgggcaccgattcgatttccaaggcacctgcgagtacctgctgagtgcaccctgccacggaccacccttgggggctgagaacttcactgtcactgtagccaatgagcaccggggcagccaggctgtcagctacacccgcagtgtcaccctgcaaatctacaaccacagcctgacactgagtgcccgctggccccggaagctacaggtcgacggcgtgttcgtggctctgcctttccagctggactcgctcctgcacgcacacctgagcggcgccgacgtggtggtgaccacaacctcagggctctcgctggctttcgatggggacagcttcgtgcgcctgcgcgtgccggcggcgtacgcggcctctctctgtggcttatgcgggaactacaaccaggaccccgcagacgacctcaaggctgtgggcgggaagcccgctggatggcaggtgggcggggcccagggctgcggggaatgtgtgtccaagccatgcccgtcgccgtgcaccccagagcagcaggagtccttcggcggcccggacgcctgcggcgtgatctccgccaccgacggcccgctggcaccctgccacggccttgtgccgcccgcgcagtacttccagggctgcttgctggacgcctgccaagttcagggccatcctggaggcctctgtcctgcagtggctacctacgtggcagcctgtcaggccgctggggcccagctcggcgagtggaggcggccggacttctgtcccttgcagtgccctgcccacagccactatgagctctgcggtgactcctgccctgtgagctgcccgagcctctcagcacccgagggctgtgagtcggcctgccgtgaaggctgtgtctgcgatgctggcttcgtactcagtggtgacacctgcgtacccgtgggccagtgtggctgcctccatgatggccgctactacccactgggcgaggtcttctacccgggccctgagtgtgagcggcgctgtgagtgtgggccaggtggccatgtcacctgccaggagggcgcagcctgtgggccccatgaggagtgccggttagaggatggtgtccaggcctgtcatgccacaggctgtggccgctgcctggccaacgggggcatccactacatcacccttgatggccgtgtctacgacctgcatggctcctgctcctatgtcttggcccaagtctgccacccaaagcctggggacgaggacttttccatcgtgcttgagaagaatgcagctggagatctccaacgcctcctggttactgtggctggccaggttgtgagcctagctcaggggcagcaggtcaccgtggacggcgaggctgtggccctgcctgtggctgtgggccgcgtgcgggtgaccgccgagggccgaaacatggttctgcagacgaccaaggggctgcggcttctctttgatggcgatgcccacctcctcatgtccatccccagccccttccgtggacggctctgtggcctctgtgggaacttcaatggcaactggagtgacgactttgtcctgcccaatggctcagcagcgtccaggtgtggagaccttcggggctgcatggcgggcgcccggctcctccaagggctgtggcgagggctgcgggcccccaaggctgcccagtgtgcttggcagaggagactgcaccctatgagagcaacgaggccctgcgggcagctccgaaaccaccagggccccttcgcgacctgccaggcggtgctgagtccctctgagtacttccgccaatgcgtatacgacctgtgcgcgcaaaagggtgacaaagccttcctgtgccgcagcctgacagcctactcgccggcctgtcaggcagctggcgtgtccgtgaagccctggagcaaagacaaattctgcccgctccattgccccgcccacagccactactccatctgcactcgcacctgccagggatcctgtgcggctctctccggcctcacgggctgcaccacccgctgttttgagggctgtgagtgcgacgaccgcttcctgctttcccagggtgtctgcatccctgtccaagattgtggctgcacccataatggccgatacttgccgaacgccagagatgtgagagtcggctccccacccgtggtgtccctgatgggccgtaccctctctccccacaaccgggagagacaatccttatttacaaactgtgggcgcagtgccagtgccaagggggtaaagtcgtggagtgccatgaaaacaactgtcaaccggggcaggctataccttctggatcacaactactcactctgccactgtggtgtgaaagcagccgtagcctatgtaagtgaagacgacccgtgccacggcgtgacatgccggccacaggagacatgcaaggagcagggtggccagggcgtgtgcctgcccaactatgaggccacgtgctggctgtggggcgacccacactaccactccttcgatggccggaagtttgacttccagggcacctgtaactatgtgctggcaacaactggctgcccgggggtcagcacccagggcctgacacccttcaccgtcaccaccaagaaccagaaccggggcaaccctgctgtgtcctacgtgagagtcgtcaccgtggctgccctcggcaccaacatctccatccacaaggacgagatcggcaaagtccgggtgaacggtgtgctcacagccttgcctgtctccgtggccgacgggcggatttcagtggcccagggtgcatcgaaggcactgctggtggctgactttggactgcaagtcagctatgactggaactggcgggtagacgtgacgctccccagcagctatcatggcgcagtgtgcgggctctgcggtaacatggaccgcaaccccaacaatgaccaggtcttccctaatggcacactggctccctccatacccatctggggcggcagctggcgagccccaggctgggacccactgtgttgggacgaatgtcgggggtcctgcccaacgtgccctgaggaccggttggagcagtacgagggccctggcttctgcggacccctttcatctggcacagggggccccttcaccacctgccatgctcatgtgccacctgagagcttcttcaagggctgtgttctggacgtctgcatgggtggtggggaccgtgacattctttgcaaggctctggcttcctacgtggccgcctgccaggccgctggggttgtcatcgaagactggcgggcacaggttggctgtgagatcacctgcccagaaaacagccactatgaggtctgtggcccaccctgcccagccagctgtccgtcccctgcaccccttacgacgccagccgtatgtgagggcccctgtgtggagggctgccagtgcgacgcgggtttcgtgttaagtgctgaccgctgtgttcccctcaacaacggctgcggctgctgggccaatggcacctaccacgaggcgggcagtgagttttgggctgatggcacctgctcccagtggtgtcgctgcgggcctgggggtggctcgctggtctgcacacctgccagctgtgggctgggtgaagtgtgtggcctcctgccatccggccagcacggctgccagcccgtcagcacagctgagtgccaggcgtggggtgacccccattacgtcactctggatgggcaccgattcgatttccaagggacctgcaggcagtga

SEQ ID NO: 136390 - DNA, 523 bp, Homo sapiens
acattgctatatggtagtacaactgtggaaaccaaggagcctgagaaggaaatcagaccagctttggagctcttggaaccaattgaacacaagtgagctgagctcttttatatctgccgagatgcaaactgaggcctttgattgtggctccatggcgggacgaatgtgagggcaaggcaggtacctgctggctgctctgtgggattcatctgtacctctcagttgacctcaggcagagccatggtcaggtgtgggaccagctcacctgactgaattctctctccctccagatttgttagcatcagtgacctcctggcaccaaaagacttgggaacagaaagccaggtgagtatggaagtgtgaaaggatatgggcaggtttcactgggaagacatccctccatgagcttaagtcttcgtaatttttgtttttcagatctttatttcccgcacatattgatgccaccactcattttgagacaacgtgtgatgacattaaaaaccttctttagaggtgacagggt

SEQ ID NO: 136391 - DNA, 370 bp, Homo sapiens
cctttcttccagttacttagatcaaccgtgttatgaaaccattaatagaattaaactttacagtgaatctttggcaagatatggcaaaagcccatacctttatccactctatggccttggagaactgccccaaggatttgcaaggtaagagcctgtgtttaaaacctcagtgattcaaaacctcatcttcaacataatgtgtatatgagatatagtctaaataatgagatgagatcagtctatgagtaataagatgctttttatttttattgaaataaaattaacatataatgatatgcacggatcttcagttaaaaaaaatccagttttatacaactgtagctgatgtgctcttgtaagtgccaactcc

SEQ ID NO: 136392 - DNA, 504 bp, Homo sapiens
attgaaacccttgatgacctgtatgacgccagcttggcacgagggaacttttgaaggcattgatcctaagaagaccacgatgcgagatgtgtataagaaatttgatttgggtcaagacgttatagattttactggtcatgctctcgcccagccccactgccgcggggctgggcgagagcatggcatgggcccctgcgggagggcacagcccctctcaaagctgtcaccagggccaaagtgctgggtggagcagatgcaccgatggacttggcacacccagctcagcctcaagcatcctcttgagaagcctgtgggaaggctcctgcgtttcgttaactgccatctggccgtctctcagtttttgaaatctctgaggagcctgaggatcaagtcagttggggaaccgaattggtccatgggaagcttgaggaattttggacaaattccggccctttgaaaggaccagtttatgttccattttttggtggattttcccaggatgcc

SEQ ID NO: 136393 - DNA, 2426 bp, Homo sapiens
  misc_feature (1)...(2426): n = a,t,c or g
tttcgtcttcccgtctgaggtggcggtcggtctcgccttgtcgccagcatccattttcctctctttctcttcccctttccttcgcgcccaagagcgcctcccttctcttttatggtgggcacggagcccctgcgccttttccttgctcgggtcctgcgtccgcgcctgccccgccatgaatgaggagtacgacgtgatcgtgcatgggcaccggccatgacggaatgtatcctgtcaggtataatgtcagtgaatggcaagaaagttcttcatatgggatcgaaacccttactacggaggagagagtgcatctataacagcattggaagatttatacaaaagatttaaaataccaggatcaccaccccgagtcaaatggggagaggaaagagactggaatgttgacttgaatccccaagttccttaaggctaatgggtcagctggttaagatgctgctttatacagaggtaactcgctatctggattttaaagtgactgaagggagctttgtctataagggtggaaaaatctacaaggttccttccactgaagcagaagccctggcatctagcctaatgggattgtttgaaaaaacgtcgcttcaaggaattcctagtgtatgttgccaacttcgattgaaaaagatccaagaactttttgaaggcattgatcctaagaagaccacaatgcgagatgtgtataagaaatttgatttgggtcaagacgttatagattttactggtcatgctcttgcacctttacagaactgatgattaccttagatcaaccgtgttatgaaaccattaatagaattaaactttacagtgaatctttggcaagatatggcaaaagcccatacctttatccactctatggccttggagaactgccccaaggatttgcaaggctaaggtgctatttatgggagggtacctatatgctgaataaacccattgaaggaaatcattgtacaggaatggggaaaggtaattgggtgtaaaatctgaagggaggaaattgctcgttgtatgcagctcatctgtgaccccagctacgtaaaagatcgggtagaaaaagtgggccaggtgatcacagttatttgcatccctcagccacccccatcaaagaacaccaatgatgccaactcctgcacagatcattattccacagaaccaaagtcaatcgaaagtcagatatctacgtctgcaatgatctcctttgcagcacaatgtagcagcacaagggaagtccattgctatagttagtacaactgtggaaaccaacggagcctgagaaggaaatcagaccagctttgggagctcttgggaaccaattggaacagaaattttggttagcatcagtgacctcctgggtacccaaagacttggggaacagaaagccagatctttatttccccgcacatatgatgccaccactcattttgagacaacgagtgatgaacattaaaaacatctataagaggattgacaggatcagagtttgactttgaggaaatgaagcgcaagaagaatggccatctatggggggaagactaacagcagtacatgttattatgtaattaggacacatttaaaatttgggcaaataatgcatataatggaaatccaatattgtaaggcctgcttttggtaatggaaaatgggaggagaatggaagagcgctgtgcccagttaaatactccccttcacctttctaattattaacttgttttcatggagtggctattcagcattggcagttaccacattctgttccaatttaacccaactgggccttttttttttttccaagtggaagttaaaccaaaccatttggggataccggacaccaggacaacttgaggacagtttttttttaatccttttaatccagtgtagcctatgtgctggctgctggcttcaagagctgggatcccatacaggttgtgtgtcatctggtccctcttgagggttcagggagattcctaaattgaaatattcccccgggtttgggggcagcatcccggaaagttttcccctatgacctttatattttgttattatgtccaaatgtttatggcagggccccnaattagcataagcccccaagttttggtttatgtggggcataaaattcctaacccaaaccccagacatagggagtctatttggagaaagcctgtatgtgggtgtttttaaccctataaaagttgaattgagagagaaggggagaggaagcgaacgataaagcgggtcaagtgtagtgcatcttttgtatctcaggcgtggcttcttcagtggaccaatgctgcaatgcagtattgacttgacaaagcctttacctttggttccaaaagggccccaaatgttttcggccccgcaaaataaagccgaaattctggaaactaaaaaaaaaaaaaaaaaaa

SEQ ID NO: 136394 - DNA, 499 bp, Homo sapiens
  misc_feature (1)...(499): n = a,t,c or g
ctctcgcctgcctgtggggtttctgtcaactagtcgtggagggaaggagactctttaaagaataacatcttattgtggccatgccagaacccactaagaaagaggaaaatgaagtgccagccccagccccacccccggaagaaccaagtaaagagaaggaggccggaactacaccagcaaaagatgaagaggaagtctccccgcctagcgccttgcctccaggtttgggtagtcgggccctggagagaaaagattcagactggacccttgtcgaaactcctcctggggaggaacaagccaagcagaatgccaactcccagctgtccatcttgttcattgaaaaacctcaaggaggagcagaaattgccaacattgcacagccaggtgggaacagcctagggagagcccccatcatgnccaacaaccaatttggnatggcttatcccttantatccctttcaacctcctttgntgctaaanaaatctgaattggtctcca

SEQ ID NO: 136395 - DNA, 347 bp, Homo sapiens
ctcgcctgcctgtggggtttctgtcaactagtcgtggagggaaggagactctttaaagaataacatcttattgtggccatgccagaacccactaagaaagagggtaagacttatctagaaatctttttgttgtactcctgaataaagtgtttattttggtatttatcttcaaacaaataacaaatatcttaactagatgagaaaataaaatcactatgatttaaggaaacgatcttttagattaaacagaccagaggaaaaatacagcgagagtatattgaattgaaaaatttctgataacgatagtttctaaagggatattgactaaaattatcaaatgataattc

SEQ ID NO: 136396 - DNA, 403 bp, Homo sapiens
ttttttcacattcgcagactctgtttattttcatcctattcaaaacagatacatctttgaacacaaaggatgccagagaatcctgtttatcaataactgtcagatgacagatgattcagagtattatgtgacagccggtgatgagaaatgttccactgagctcttcgtaagaggtaaaaatgaaatctcttattgtggtcaccaggagctgttggcttcttctcccagggataatgatcaaagtgaaagtaactgaggctcctctacactggcagctattatggatcctaatgagtcttctggtttgttgaagaagaattaatgctggaagtgttgtggcttgtgaactgttgtgaagcagtagaaagaggattattcaaaatctgatgagtagttgtgacct

SEQ ID NO: 136397 - DNA, 3851 bp, Homo sapiens
gtgaattccgcaccatctctctcctgcctgtggggtttctgtcaactagtcgtggagggaaggagactctttaaagaataacatcttattgtggccatgccagaacccactaagaaagaggaaaatgaagtgccagccccagccccacccccggaagaaccaagtaaagagaaggaggccggaactacaccagcaaaagactggacccttgtcgaaactcctcctggggaggaacaagccaagcagaatgccaactcccagctgtccatcttgttcattgaaaaacctcaaggaggaacagtgaaagttggtgaagatatcaccttcatagccaaagtcaaggctgaagatctttctgagaaacccactatcaatggttcaaggaaatggatggacctggccagcaaagccgggaagcaccttcagctgaaggaaacctttgagaggcacagtcgggtgtacacatttgagatgcagatcatcaaggccaaagataactttgcaggaaattacagatgcgaggtcacctataaggataagtttgacagctgttcatttgatcttgaagtgcacgaatctactgggactactccaaacattgacatcagatctgctttcaagagaagtggagaaggtcaagaggatgcaggagaacttgactttagtggtctcctgaaacgtagggaggtgaagcagcaggaggaagaaccccaggtggacgtatgggagttgctgaagaacaccaaacccagtgagtacgagaagatcgccttccagtatgaatcaccgacctgcagcggcatgctgaagcgactcaagcgcagcatcagagaggagaagaagagcgccgcttttgcaaaaattcttgatcctgtatatcaggttgacaaaggaggcagagtgaggtttgttgtggagctggcagatccaaagttggaggtgaaatggaataaaaatggtcaagaacttcgacccagtaccaaatacatctttgaagacacaagatgccagagcatcctgaatatcgataactgtcagatgacagatgattcagagtattatgtgacagccggtgatgagaaatgttctactgagctcttagtaagagagcctccaattatggtgaccaaacagctggaagatacaactgattattgtggggagagagtggaattagaatgtgaggtgtctgaagatgatgcccaagtaaaatggtttaagaatggtgaagagattatcctggtccaaacaagataccgaattagagttgagggtaaaaaacacatcttgatcatagagggagcaacaaaggctgatgctgcagattattcagtaatgacaacaggaggacaatcatctgctaaacttagtgttgacttgaaacctctgaagattttgacacctctgactgatcagactgtaaatcttggaaaagaaatctgcctgaagtgtgaaatctctgaaaacataccaggaaaatggactaaaaatggcctacctgttcaggagagtgaccgtctaaaggtggttcacaagggaaggatccacaagttagtgatagatcatgccctcactgaagatgaaggtgattatgtatttgcacctgatgcctacaatgttactctgcctgccaaagttcatgttattgatcctcctaagatcatcctggatggtcttgatgctgacaacacagtgacagtgattgcaggaaacaagcttcgtcttgagatccccatcagcggagaaccacctcctaaagccatgtggagccggggagataaggctattatggaaggcagtggccggataagaacagaatcttaccctgatagcagcactctggtcattgatatagctgaaagagatgactctggtgtttaccacatcaatctgaaaaacgaagctggagaggcacatgcaagcatcaaggttaaagttgtggacttccctgatcctccagtggcaccgactgtgacagaggtgggagatgactggtgtatcatgaactgggagcctcctgcctacgacggaggctctccaatcctaggatattttattgagaggaagaagaaacaaagctccaggtggatgaggctgaattttgatctctgcaaagaaacaacttttgagcccaagaagatgattgaaggtgtggcctatgaggtccgcatctttgcagtcaatgccattggcatctccaagcccagtatgccctccaggccttttgttcctttggccgtaacaagccctcctactcttctgactgtggactctgtcactgacacgactgtcacgatgaggtggcgccccccagaccacattggtgcagcaggtttagatggctatgtgctagagtattgctttgaaggaagtacatcagcaaaacagtctgatgaaaatggggaggctgcctatgatctgccagctgaggactggatagttgcaaacaaagatctgattgacaagacgaagttcaccatcacaggtctgccaacagatgcaaagatctttgtgcgtgtgaaggctgttaatgcagctggtgccagcgagcccaagtactattctcagcccattctcgtgaaggaaatcataggaacctccaaagattcgcatcccaagacacctgaaggcaaacctattatccgcagagttgggagaagctgttcaatctgggttattacctttccaggggaaaaccaaggaccaggattttaacttgggaaggaagggtgggttgcaggaatttgataaggattcaaataaacattcggcaactctgagactgatacaatcatatttattagaaaagcagagaggagccactctgggaaatatgatctgcaagtcaaagtggacaaattcgtggagaccgcatcaattgacatcagaatcattgaccgtccaggtccaccccaaattgtgaagattgaggatgtctgggggagaaatgtcgctctcacatggactccaccaaaggatgatggaaatgctgctatcacaggctataccattcagaaggctgacaagaagagcatggaatggttacgtgtcattgagcatatcatcgaaccagtgccacatactgaattggtcatagggaatgaatattacttccgggtcttttctgaaaacatgtgtggcctcagtgaggatgccaccatgactaaagagagtgcagtgatcgccagggatggtaaaatctacaaaaatccagtgtatgaagactttgatttctcagaggcacccatgtttactcagcctttggttaaccgcctatgccatagcggttacatggccaccctaaactgcagtgtgagaggaaatcctaagcctaaaataacctggatgaaaaacaaagttgctattgtggatgatccaagatacaggatgttcagcaacctgggagtctgtaccctggaaattggcaagcccagcccttatgatggaggcacttactgctgcaaagcagtcaatgaccttgggacagtggagattgaatgcaaactggaggtgaaagtcattgcacaataaggatttttggaatgtataatatcatctaaggtgggctctccttctgcagactcctcttgcaaggcgtacctccaaacataattgattgctatctgcgagacttacactcaagcaatcctgaggaatactgagggagggcctggctactgtctctctgcactctgctgctttgaaatctggttgaaatgagaaaaagcattttctgttttcccaccaggcccccaagtgtggtctttttctttcctcctaatgttgaagagaaaaaaaaaaaaaaaaaagtttgcccagattgcttaattaaaaattgcaaacaaaatctc

SEQ ID NO: 136398 - DNA, 619 bp, Homo sapiens
cacactgcagtttagggtggcattgtaaccagctatggcataggtgttaaccaaaggctgagtaaacatgggtgagaggaaatcctaagcctaaaataacctggatgaaaaacaaagttgctattgtggatgatccaagatacaggatgttcagcaaccagggagtctgtaccctggaaattcgcaagcccagcccctatgatggaggcacttactgctgcaaagcagtcaatgaccttgggacagtggagattgaatgcaaacttggaggtgaaagtgatatatcaaggagtaaatacccctggacaaccagtcttcctggaggggcagcaacagtcattgcacaataaggatttttgaatgtataatatcatctaaggtgggctctccttctgcagactcctcttgcaaggcgtacctccaaacataattgattcgtatctgcgagacttacactcaagcaatcctgaggaatactgagggagggcctggctactgtctctgctgcactctggctgcttgaaatctggttgaaatgagaaaaagcattttctgttttcccaccagggcccccaagtgtggtctttttctttcctcctaatgttgaagagaaaaaaaa

SEQ ID NO: 136399 - DNA, 3879 bp, Homo sapiens
  misc_feature (1)...(3879): n = a,t,c or g
cctctcgcctgcctgtggggtttctgtcaactagtcgtggagggaaggagactctttaaagaataacatcttattgtggccatgccagaacccactaagaaagaggaaaatgaagtgccagccccagccccacccccggaagaaccaagtaaagagaaggaggccggaactacaccagcaaaagactggacccttgtcgaaactcctcctggggaggaacaagccaagcagaatgccaactcccagctgtccatcttgttcattgaaaaacctcaaggaggaacagtgaaagttggtgaagatatcaccttcatagccaaagtcaaggctgaagatcttctgagaaaacccactatcaaatggttcaaaggaaaatggatggacctggccagcaaagccgggaagcaccttcagctgaaggaaacctttgagaggcacagtcgggtgtacacatttgagatgcagatcatcaaggccaaagataactttgcaggaaattacagatgcgaggtcacctataaggataagtttgacagctgttcatttgatcttgaagtgcacgaatctactgggactactccaaacattgacatcagatctgctttcaagagaagtggagaaggtcaagaggatgcaggagaacttgactttagtggtctcctgaaacgtagggaggtgaagcagcaggaggaagaaccccaggtggacgtatggggagttgctgaagaacgcgaaacccagtgagtacgagaagatcgccttccagtatggaatcaccgatctgcgcggcatgctcaagcgactcaagcgcatgcgcagagaggagaagaagagcgcagcttttgcaaaaattcttgatcctgcatatcaggttgacaaaggaggcagagtgaggtttgttgtggagctggcagatccaaagttggaggtgaaatggtataaaaatggtcaagaaattcgacccagtaccaaatacatctttgaacacaaaggatgccagagaatccctgtttatcaataactgtcagatgacagatgattcagagtattatgtgacagccggtgatgagaaatgttccactgagctcttcgtaagagagcctccaattatggtgaccaaacagctggaagatacaactgcttattgtggggagagagtggaattagaatgtgaggtgtctgaagatgatgccaatgtaaaatggtttaagaatggtgaagaagattatccccggtccaaaatcaagatacccgaattagagttgagggtaaaaaaacacatcttgatcatagagggagcaacaaaggctgatgctgcagaatattcagtaatgacaacaggaggacaatcatctgctaaacttagtgttgacttgaaacctctgaagattttgacacctctgacctgatcagactgtaaatcttggaaaagaaatctgcctgaagtgtgaaatctctgaaaacataccaggaaaatggactaaaaatggcctacctgttcaggagagtgaccgtctaaaggtggttcacaagggaaggatccacaagttagtgatagccaatgccctcactgaagatgaaggtgattatgtattttgcacctgatgcctacaatgttactctggcctgccaaagttcatgttattgatcctcctaagatcatccctggatggtcttggatgctggacaacacagtgacagtgattgcaggaaacaagcttcgtcttgagatccccatcagcggagaaccacctcctaaagccatgtggagccggggagataaggctattatggaaggcagtggccggataagaacagaatcttaccctgatagcagcactctggtcattgatatagctgaaagagatgactctggtgtttaccacatcaatctgaaaaacgaagctggagaggcacatgcaagcatcaaggttaaagttgtggacttccctgatcctccagtggcaccgacctgtgacagaggtgggagatgactggtgtatcatgaacctgggagcctcctgcctacgacggaggctctccaatcctaggatattttattgagaggaagaagaaacaaagctccaggtggatgaggctgaattttgatctctgcaaagaaacaacttttgagcccaagaagatgattgaaggtgtggcctatgaggtccgcatctttgcagtcaatgccattggcatcctccaagcccagtatgccctccaggccttttgttcctttggctgtaacaagccctcctactcttctgactgtgggactctgtcactgacacggactgtccacggatgaggtgggcgccccccagaccacattggtgcagcaggtttaggatggctatgtgctagagtattgctttgaaggaactgaggactggatagttgcaaacaaagatctgatttgacaagaccgaagttcaccatcacaggtctgccaacagatgcaaagatctttgtgcgtgtgaaggctgttaatgcagctggtgccagcgagcccaagtactattctcagcccattctccgtgaaggaaatcatagaacctccaaagattcgcatcccaagacacctgaagcaaacctatatccgcagagttggagaagctgtcaatctggttatacctttccagggaaaaccaagaccagaattaacttggaagaaggatggtgcagaaattgataagaatcaaataaacattcgcaactctgagactgatacaatcatatttattagaaaagcagagaggagccactctgggaaatatgatctgcaagtcaaagtggacaaattcggtggagacccgcatcaattggacatccagatcattggaccgtccaggtccaccccaaattggtggaagatttgaggatgtctgggggagaaaattgtcgctctcacattggactccaccaaagggatgatggaaatgcctgctattcacaggctataccattcagaaggctgacaagaagagcatgggatgggtttactggttcattgagcatttatcatcgaaccagtggcaccattacttgaattggtcataagggaatgaatattacttccggggtcttttctgaaaaacatgtgtggccntccagtgaggatgcccaccatgactaaagagagtgccagtgatcgccagggatggtaaaatctacaaaaatccagtgtatgaagacttttgatttcctcagaggcacatcatgtttactcagcctttggttaacacctatgccatagctggttacaatgccaccctaaactgccagtgtgagaggaaatcctccagccctaaaaataaccctggatgaaaaaccaaagttgctattggtggatgattccaggataccaggatgttcagcaacccaggggagtctgtacccctggaaaaattccgccaagccccagccccctatgatgggaggcactttactgctgcaaagccagtcaaatgacccttggggaccagtgggagattgaatgcaaaactggaaggtgaaagtgatatatcaaggagtaaatacccctggacaaccagtcttcctggaggggcagcaacaggtgggctctccttctgcagacttcctcttgcaaggcgtacctcccaaacataattgattcatatctgccgagacttacactcaagcaatcctgaggaatactgaggggaagggcctggctactgtctctctgcactctgctgctttgaaatctggttgaaatgagaaaaagcattttctgttttcccaccaggcccccaagtgtggtctttttctttcctcctaatgtttgaagagaaaaaaaaaaaaaaaaaagtttgcccagattgcttaattaaaaattgcaaacaaaaaaaaaaaaaa

SEQ ID NO: 136400 - DNA, 528 bp, Homo sapiens
ttttcagttttgtgtttctttatttgtctacattcagcttaattcagatgtactgcctgaatgacccagacataaaaagaaaccccccactctttcccactggtttttaaaataaaatcttcacttataaaactgaaacactaaagcattaaaatacagaaagctcgtttaactcacttcacaaaagcattaacaaatgacgtatcccttctgtaactatttaaagacaaactgagttaccactaacacgaaggtgaaatagacagagggatactgaactgcaaaaactcaaaaactctacccagacaaagttgtaatggcaactaacaaaccattgaagacacggagtcccaaacacggctaaatatgggtcacctcacgacacagcaacgtggacgggatcggggctggggctggaagccagctgacatggttactgtgatgcctaaaactcgatcttctgactgggagtaagttcagaaggttgaatcttcgcctgtgcttgatccgtaccggagttcatgcgtg

SEQ ID NO: 136401 - DNA, 485 bp, Homo sapiens
gcggagatttctaccttctgcacttactccccatcagaagatcgagttttatgcatcccgtccacgttgctgtgtcgtgaggtgcagcgggtcaccctgtggcccgtcctgtgacccatatttagccgtgtttgggactccgtgtcttcaatggtttgttagttgccattacaactttgtctgggtagagtttttgagtttttgcagttcagtatccctctgtctattcacacttcgtgttagtggtaactcagtttgtctttaaatagttacagaagggatacgtcatttgttaatgcttttgtgaagtgagttaaacgagctttctgtattttaatgctttagtgtttcagttttataagtgaagattttattttaaaaaccagtgggaaagagtggggggtttctttttatgtctgggtcattcaggcagtacatctgaattaagctgaatgtagacaaataaagaaaaacaaaactgaaaa

SEQ ID NO: 136402 - DNA, 559 bp, Homo sapiens
  misc_feature (1)...(559): n = a,t,c or g
caccagggccagcagcagtcctacaacagtagcccctacagcanctatggccctccacagggcaagcagaaaggctataaccatggacaaggcagctactcctactcgaactcctacaacgccnccatcccgtccacgttgctgtgtcgtgaggtgcagcgggtcaccctgtggcccgtcctgtgacccatatttagccgtgtttgggactccgtgtcttcaatggtttgttagttgccattacaactttgtctgggtagagtttttgagtttttgcagttcagtatccctctgtctattcacacttcgtgttagtggtaactcagtttgtctttaaatagttacagaagggatacgtcatttgttaatgcttttgtgaagtgagttaaacgagctttctgtattttaatgctttagtgtttcagttttataagtgaagattttattttaaaaaccagtgggaaagagtggggggtttctttttatgtctgggtcattcaggcagtacatctgaattaagctgaatgtagacaaataaagaaaaacaaaactgaaaaaa

SEQ ID NO: 136403 - DNA, 2295 bp, Homo sapiens
atgcgtccaatgcgaatttttgtgaatgatgaccgccatgtgatggcaaagcattcttccgtttatccaacacaagaggagctggaggcagtccagaacatggtgtcccacacggagcgggcgctcaaagctgtgtccgactggatagacgagcaggaaaagggtagcagcgagcaggcagagtccgataacatggatgtgcccccagaggacgacagtaaagaaggggctggggaacagaagacggagcacatgaccagaaccctgcggggagtgatgcgggtgggcctggtggcaaagggcctcctactcaagggggacttggatctggagctggtgctgctgtgtaaggagaagcccacaaccgccctcctggacaaggtggccgacaacctggccatccagcttgctgctgtaacagaagacaagtacgaaatactgcaatctgtcgacgatgctgcgattgtgataaaaaacacaaaagagcctccattgtccctgaccatccacctgacatcccctgttgtcagagaagaaatggagaaagtattagctggagaaacgctatcagtcaacgaccccccggacgttctggacaggcagaaatgccttgctgccttggcgtccctccgacacgccaagtggttccaggccagagccaacgggctgaagtcttgtgtcattgtgatccgggtcttgagggacctgtgcactcgcgtgcccacctggggtcccctccgaggctggcctctcgagctcctgtgtgagaaatccattggcacggccaacagaccgatgggtgctggcgaggccctgcggagagtgctggagtgcctggcgtcgggcatcgtgatgccagatggttctggcatttatgacccttgtgaaaaagaagccactgatgctattgggcatctagacagacagcaacgggaagatatcacacagagtgcgcagcacgcactgcggctcgctgccttcggccagctccataaagtcctaggcatggaccctctgccttccaagatgcccaagaaaccaaagaatgaaaacccagtggactacaccgttcagatcccaccaagcaccacctatgccattacgcccatgaaacgcccaatggaggaggacggggaggagaagtcgcccagcaaaaagaagaagaagattcagaagaaagaggagaaggcagagcccccccaggctatgaatgccctgatgcggttgaaccagctgaagccagggctgcagtacaagctggtgtcccagactgggcccgtccatgcccccatctttaccatgtctgtggaggttgatggcaattcattcgaggcctctgggccctccaaaaagacggccaagctgcacgtggccgttaaggtgttacaggacatgggcttgccgacgggtgctgaaggcagggactcgagcaagggggaggactcggctgaggagaccgaggcgaagccagcagtggtggcccctgccccagtggtagaagctgtctccacccctagtgcggcctttccctcagatgccactgccgagcaggggccgatcctgacaaagcacggcaagaacccagtcatggagctgaacgagaagaggcgtgggctcaagtacgagctcatctccgagaccgggggcagccacgacaagcgcttcgtcatggaggtcgaagtggatggacagaagttccaaggtgctggttccaacaaaaaggtggcgaaggcctacgctgctcttgctgccctagaaaagcttttccctgacacccctctcgcccttgatgccaacaaaaagaagagagccccagtacccgtcagagggggaccgaaatttgctgctaagccacataaccctggcttcggcatgggaggccccatgcacaacgaagtgcccccaccccccaaccttcgagggcggggaagaggcgggagcatccggggacgagggcgcgggcgaggatttggtggcgccaaccatggaggctacatgaatgccggtgctgggtatggaagctatgggtacggaggcaactctgcgacagcaggctacagtcagttctccaggcccccgcccccatcccgtccacgttgctgtgtcgtgaggtgcagcgggtcaccctgtggcccgtcctgtgacccatatttagccgtgtttgggactccgtgtcttcaatggtttgttagttgccattacaactttgtctgggtagagtttttgagtttttgcagttcagtatccctctgtctattcacacttcgtgttagtggtaactcagtttgtctttaa

SEQ ID NO: 136404 - DNA, 441 bp, Homo sapiens
cctccgacacgccaagtggttccaggccagagccaacgggctgaagtcttgtgtcattgtgatccgggtcttgagggaccttggtcactcgcgtgcccacctggggtcccctccgaggctggcctctcgagctcctgtgtgagaaatccattggcacggccaacagaccgatgggtgctggcgaggccctgcggagagtgctggagtgcctggcgtcgggcatcgtgatgccaagcacgcactgcggctcgctgccttcggccagctccataaagtcctaggcatggaccctctgccttccaagatgcccaagaaaccaaagaatgaaaacccagtggactacaccgttcagatcccaccaagcaccacctatgccattacgcccatgaaacgcccaatggaggaggacggggaggagaagtcgcccagcaaaaaaaaaaa

SEQ ID NO: 136405 - DNA, 558 bp, Homo sapiens
ggagcatgcattacttaattggctggccgacaggccaggaataacatgctcttgctgccctagaaaagcttttccctgacacccctctcgcccttgatgccaacaaaaagaagagagccccaggtacccgtcagagggggaccgaaatttgctgctaagccacataaccctggcttcggcatgggaggccccatgcacaacgaagtgcccccaccccccaaccttcgagggcggggaagaggcgggagcatccggggacgagggcgcgggcgaggatttggtggcgccaaccatggaggctacatgaatgccggtgctgggtatggaagctatgggtacggaggcaactcggcgacacaaggctacaagtgactttttcacaagactgcttacggctattcatgattttgggtcttcctagagccgtctaaaagtattgcacacaaaatcaactttttactccaatttcctccaactccaaaacccaaagtgtccgttgctgtgtccctgtgcttcactgggtttctcaaccgtggcttttcaccgcagcttgtctga

SEQ ID NO: 136406 - DNA, 3598 bp, Homo sapiens
  misc_feature (1)...(3598): n = a,t,c or g
cgccgcctgcccgcccgcccgctcgcccccggtccggactcctcctcctcctcttctcgccattgcagttggacccagcagcccggcgcgcaccgcgtggcttttgggggcagaccccggcgggctgtggcaggagggcggcggcggcggctgcggtcgaagaaggggacgccgacaagagttgaagtattgataacaccaaggaactctatcacaatttgaaaagataagcaaaagtttgatttccagacactacagaagaagtaaaaatgcgtccaatgcgaatttttgtgaatgatgaccgccatgtgatggcaaagcattcttccgtttatccaacacaagaggagctggaggcagtccagaacatggtgtcccacacggagcgggcgctcaaagctgtgtccgactggatagacgagcaggaaaagggtagcagcgagcaggcagagtccgataacatggatgtgcccccagaggacgacagtaaagaaggggctggggaacagaagacggagcacatgaccagaaccctgcggggaagtgatgcgggctgggcctggtggccaaagtgcctcctactcaagggggacttgggatctgggagctggtgctgctgtgttaaggagaagcccacaaccggccctcctgggacaaggtggccgacaacctggccatcacagcttgctgctgtaacagaagacaagttcgaaatactgcaatctgtcgacgatgctgcgattgtgataaaaaaacacaaaagagcctccattgtcccctgaccatccacctgacatcccctgttgtcagagaagaaaatggagaaagtattagctggagaaacgctatcaggtcaacggaccccccgggaacgttctggacaggggnagaattgcctttgctgccttttgnggttcccttccggaaacgcaaaggtggttccaaggccagagccaacgggctgaaagtcttgtgtcattgtgattccgggtcttgagggcacctgtgcactcgcggtgcccacctgggggtccccctccgaggctggcctctcgagctccctgtgtgaagaaatcccattggcacggccaacagaccgatgggtggctggcgaaggccctgcggagagtgctggagtgcctggcgtcgggcatccgtgaatgccagatggttctggcatttatgacccttgtgaaaaagaagccactgatgctattgggcatctagacagacagcaacgggaagatatcacacagagtgcgcagcacgcactcgcggctcgccgcgttcggccagctccataaagtcctaggcatggaccctctgccttccaagatgcccaagaaaccaaagaatgaaaacccagtggatctacaccgttcagatcccaccaagcaccacctatgccattacgcccatgaaacgcccaatggaggaggacggggaggagaagtcgcccagcaaaaagaagaagaagattcagaagaaagaggagaaggcagagcccccccaggctatgaatgccctgatgcggttgaaccagctgaagccagggctgcagtacaagctggtgtcccagactgggcccgtccatgcccccatctttaccatgtctgtggaggttgatggcaattcattcgaggcctctgggccctccaaaaagacggccaagctgcacgtggccgttaaggtgttacaggacatgggcttgccgacgggtgctgaaggcagggactcgaccaagggggaaggactcggctgaggagaccgaggcgaagccagcagtggtggcccctgccccagtggtagaagctgtctccacccctagtgcggcctttccctcagatgccactgccgagaacgtaaaacagcaggggccgatcctgacaaagcacggcaagaacccagtcatggagctgaacgagaagaggcgtgggctcaagtacgagctcatctccgagaccgggggcagccacgacaagcgcttcgtcatcggaggtcgaagtggatggacagaagttccaaggttcttggttccaacaaaaaggtggcgaaggcctacgctgctcttgctgccctagaaaagcttttccctgacacccctctctcgcccttgatgccaacaaaaagaagagagccccagtacccgtcagagggggaccgaaatttgctgctaagccacataaccctggcttcggcatggggaggccccattgcacaacgaattgcccccaccccccaaccttcgagggcggggaagaggcgggagcatccggggacgagggcgcgggcgaggatttggtggcgccaaccatggaggctacatgaatgccggtgctgggtatggaagctatgggtacggagggcaattttgcgacagcaggctacagtcagttctacagcaacggagggcattcttggaatgccagtggcggtggcggcgggggcggtggtggctcctccggctatggctcctactaccaaggtgacaactacaactcaccggttgcccccaaaaacacgctgggaaagaagcagccgcacgggggccagcagaagccctcctacggctcgggctaccagtcccaccagggccagcagcagtcctacaaccagagcccctacagcaactatggccctccacagggcaagcagaaaggctataaccatggacaaggcagctactcctactcgaactcctacaactctcccgggggcgggggcggatccgactacaactacgagagcaaattcaactacagtggtagtggaggccgaagcggcggggaacagctacggcttcaggcggggcatcctaacaacccaggggtcacacgggggctacggcggaggttctggggggcggctccttcataccaagggcaaacaaggaggttacttcacagtcgaactacatactccccggggtccggccaagaactacagtggccctcccagctccttaccaagtcctcacaaggcggcttatggcagaaacgcagacccacagcattgaacttaccagtaccagataaagcccccgcggggcggagatttctaccttctgaaacttacttccccatcagaagatcgagttttatgcatcaccagttaacatgtcagctgcctgcgctccaggcccccggcccccatcccgtcccacggttgctgtgtcgtgaaggtgccagcgggtcaacctgtgggcccgtcctgtgaccccatatttagccgtgtttgggactccgtgttttcaatggtttgttagttgcccattacaactttgtcctgggtagagtttttgagtttttgcagttcagtatccctctgtctactgtcacccttcgtgttagtggtaactcagtttgtctttaaatagttacagaaggggatacgtcatttgttaatgcttttgttgaagttgagttaaaacgagcttttctgtattttaaagctttagtgtttcagttttataaatgaaaattttattttaaaaaccagtgggaaaaagtggggggtttctttttatgtttgggtcattcaggcagtacattttaattaagctgaatgtagacaaataaagaaaaacaaaactgaaaaa

SEQ ID NO: 136407 - DNA, 452 bp, Homo sapiens
tccctgaagctaggaatgctgccaccaggggatgggaccaccctctctaaagcctgtgtctcctgaatctgaccctgcttcccacccccacccttgtaagagcacctgtgggcatggaggggaaggatctggggctgatctaaatgtcttctctcctttttagacgactgcaagaacattgccaacatcatgaagacactcgcctatcgaggcttcatcttcaagcagacatcgaagccgttctgattggccgaggacaggatggggcaggacagggtagctgtttggcccagcccagaatcctcctctccctcaccagaggggaagagggagagtggcatagctctgtgtccagagtgtccccagctgccctgtgggctcatgcccttggcgtgggcttgtgcccttgcaagggcttggccacttggcccttctggagcagacactttgtg

SEQ ID NO: 136408 - DNA, 2154 bp, Homo sapiens
  misc_feature (1)...(2154): n = a,t,c or g
atgctccccaaggacccggggcttgctctcatgtgggtaagagtccatcacgtgtccacacttgcagccacagctagcagaacaggagagaggcttgttgggcaccaagacccacccgacccatggctgctgcccttaagccctttaattctgatgcaggatcagtttcatggccccccctattcccctccaccacagaccatgtcagggttacagcccagccactttggattgaattctggaaccacacttggagacaaaccctggagcctcacccaggggcagcaggaggtcttaaaggactcgtgttttaacggcgatgttactaacacttgggagcagttacctgggaaccctctgcatgcctctgaagggatggttctacacaccttgtacgacagagcaactagttgtattttctttgaggcactggccaacttctcacattggggctttccagctctcacagaaccttcagcatccccagctgccggtcttggcatcttcgaagtaaggagaggtgctttcagtcagctggactcagaacctgttgcaggtggtagtggcctcattgcctttgagtacgcgctggacttcacagggtgctatccctctaccctatgtgaagggagccaggtgcccacttgcagccatcagaggcaagcctttggttgtgttggaatgaggcttcggaaagcacaaactatggccattactgtattgtacagctgctgtttcctggtggtccctcataaggatgggcctccgcctggctcccactatggctcctcactagtattcccggaatgggaacaagcgtttgctgtgtccgagtcttggctgtattgcaacttcactgtaaatcagcaattaaaacccaaacagccaaatgccaaagatgacccgaagcacaaagcaactgacaaacaagtccggacaaatcgacgggtgccctggctgcagagttgtgccaacttggtgcagattggggcacctctcccactactgggctgtttgggccagtattttgaggttctgggaagtatggaagtactggctgggcaatatgggaaggaaatcatccgagttccccatcctaaagctaaatgggccggaccatgggagattgagtcttaccttttcacatgtatgttccagcctgtagttccatccacagctttacccccattctgttacagagctcaccggggattatttcaagccatggtgggatggtcagccaagcctgcagcaagtgctgggagagggtcgatgaatggatgggcgaaggaaggccttcttagatccaaacgttcaagttcaatttttgttcaccctgtgggaggactggggacttaaaaagtccatnctcccaggcccagtgccagtaacttggggcttggccagtggggggatttacttccaagcagtgggattaatcctgaaaaaaggcttacagctttcgccatgggctgctggcccaagaatggacttctagacatgaacaagggcctcagcctgcaacacataggccggccccacagcggcattgacgactgcaagaacattgccaacatcatgaagacactcgcctatggaggcttcatcttcaagcagacatcgaagcccgttctgattggccgaggacaggatggggcaggacagggtagcttggttggcccaccccaaaatcctcctctccctcaccaaagggggaagagggagagtgggcataagctttgttgtcccaaagttgtcccctcagcttccctgtggggctcaatgccccttggccgtgggctttgttgccctttgcaaggggctttggcaacttggccctttctggaagcaagacacttttgtgcccccccatcccccacccctcaatctcagcccagtatcagcccctcccattgcgggcctgggctaagggggaccccaggcactcaccgcctcctcccctggtacaacaggcttctgtggggccaccaagaccctcgctgtgccccctcccatccataagtgcatggtgtgtggtcgccccagggctccaggacagatcaggccccaccttgtgtctacccccatccccgctgtgaacgtgccactgaataaagtcggggaaacgaggcactgggtgtgtgtgcaaagcca

SEQ ID NO: 136409 - DNA, 1115 bp, Homo sapiens
gagagctctggctggcatctggtgggcacccctctgggaagaagcttccagaggaaggagcaggcagcaatctttgctgttctgcagcctccactggtgatacccaggcaaacaggatctggagtggacctccagcaaactccaacagacctgcagaagagggtcctgactgttagaaggaaaactaacagcatcaacatcaacaaaaaggatgaccatgcaaaaaccacatccaaaggtcaccaacagcaaagaccaaaggtagataaatccacaaagatgaggaaaaaccagtgcaaaaaggccacaaattccaaaaaccagaatgtgtcttctcctccaaaggatcacaactcctcaacagcaaaggaacaaaactggatggagaatgagtttgacaaattgacagaagtaggattcagaagtagccaattcgatcaagtggaagaaaggatatcagatattgaagataaacttaatgaaataaagcatgaagacaaaattagagaaaaaagaatgaaaaagaaggaacaaagcctccaagaaatatgggaatatgtgaaaagaccaaacctacgtttgattggtgtacctgaaagtgacggggagaatggaaccaagttggaaaatacacttcaggatactatacaggagaacttccccaatctagcaagacaggccaacattcaaattcaggaaatacagagaacaccacaaagatactcctcgagaagagcaaccccaagacacataattggtagattcaccaaggttgaaatgaaggaaaaacggttaagggcagtcagagagaaaagtagggttacccacaaagggaagctcatcagactaacagcagatctctctgcagaaaccctacaaggcagaagagagtgggggtcaatattaaacattcttaaagaaatgaattttcaacccagaatttcatatccagccaaactgagcttcataagtgaaggagaaataaaatgctttacagacaagcaaatgttgagggatttcgccaataccaggcctgccttacaggagctcctgaaggaagcactaaatatagaaaggaaaaaccggtaccggccactgcaaaagcaaatcaaaaa

SEQ ID NO: 136410 - DNA, 517 bp, Homo sapiens; identical to SEQ ID NO: 116822

SEQ ID NO: 136411 - DNA, 1987 bp, Homo sapiens
tcatgcttgcgtcgtgcccgccgttgccgtcgcgccggggatgcatgtgtcgccgctccaccccgccttccgggcggcgggcccgttgtcgtctccggtgtttgcgcatcgctgcgctgccacctgcccttcgacggcccctcgtcggccccctatgtggtggcttgctggctgtcgcactgtcggctccctgtcgtctgtgtaccggtctgcccttggcccgccgcgccctcgattgatgctcgatccgctcgacggccttcggttcgactgtgcgcccgccgctgccacttgcttgtcggtgcgacgcgtcgagaggtttctcttcattgttcggcgtggcgatgtggtgggggtggctgctgaggtggtggtggtgtgggtgaggtcgtggttgagacaacgggctctgagttcatgatgaagagcacgagtctccggctcgggcgttagcggattcaatcggtgtactggtatggcaccatctctacccacatttttcgatggatctaaccgtgctcctctaggtctgacatgctccgacctttggtctttgatgttggtgaccttcagatggggtttctgtgtggacaccctttttgttaatgttgatgctattcctttccgtttgttagttttccttctaacagtcaggcctctctgctgcaggtctgctgcagtttgctggaggtccactccagatcgtgtttgcctgggtatcaccagcagaggctgcagaacagcaaagattgctgcctgtttcttcctctggaagctctgtcccagagggacacccaccagatgccagccagagctttcctgtatgaggtgtctgtcgacccctgaggaggcagtctgtcccttagcagagctcaagcgctgtggtgggagatccactgctctcttcagagccagcaggcaggaatgtttaagtctgctgaagctgtgcccacagccacaccttcctccaggtgctggcttcccttggctaggggaggggagtcccccccctccttgtgcttctagatgaagccccatttgcagcgttgtgttacggcacacctcttgtggagctggcaacgcttgtgtaaccacacccccagtgtgaaataatgtgaggtacctctcagcgggtaaatcccgaaatgtatcgccccccagaatttcatatctggctaaaccaagctgcataagtgaaggagaaataagatccttttcagaaaagcaaatgctgagggaattcatcaccaccaggtctgccttgcaagagctccagctctcctcctcctcctcccagcctgacaggcgctccagctcgtcgggccgcagcggctccacctcgtccagcaagccgccctcgcccgccgctagcaaggaggtggcgtcccgcagctcttcgctactcgtccgcctcgggcccgacccgggcccgccgcccgacttggcgctgaggcccaaggggaagccccgaggagacgccgcgccggaggagggaatggacgcgccggcccgaaccgggctgccgggcccaagggagccggcgccctgcacggcccccgagcggctcctcagctgttcgttctgcttctccagcttcttcaccagctcctgcagcttccgcacctcttggtccgcgttcacgttggagttaacgtcctccatcccggccccgccgccgccgccgcctccgccgcccggtcgctctcgcagcgacagggaaagagacggaggaaagaggcgtcgccgccgctcactctagccgaggcgccggcatatagcaggaccaggccccaccgccagggtccccccacctcgggttccaaagcgccgctggccccagccgaactgcctcatctgcgccggctccgggattgggggacgcggcgccaatactccggcccctgccgccatcttccctccgtccctgcgccccccgcgtgccggcccagtcggtgacctcagagcgtcgggggtggacgcggccgca

SEQ ID NO: 136412 - DNA, 2488 bp, Homo sapiens
ccagagcaaaggcatacctccaccacattaagaatcctagacattattggccacaggtataaaatccgctggggctccaaacaaaggtatatagttaactatattgggggcattgctttaagatgagtgcctagcagcagtgacagtatctgggcctggaaaaaatgtaccacttacattgaatttgctcttcaacccacaggttctgactcctcaggagcaaaaaacataacctgaagagggaggaagtggatttggggttcaccatttcttggggcacacttgattgaaaactgagacttctgaagagaaggccagaagatacaaagacagaccatcccagttgaatgctgtcttccaagaacagaagaaaatgatccaggcccaggaatccataacactggaggatgtggctgtggacttcacttgggaggagtggcaactcctgggcgctgctcagaaggacctgtaccgggatgtgatgttggagaactacagcaacctggtggcagtggggtatcaagccagcaaaccggatgcactcttcaagttggaacaaggagaacaactgtggacaattgaagatggaatccacagtggagcctgttcagacatatggaaagttgatcatgtgctggagcgcttgcagagtgaaagcctggtgaacagaaggaaaccatgtcatgaacatgatgcatttgaaaatattgttcattgcagcaaaagtcagtttctgttagggcaaaatcatgatatatttgacttacgtggaaaaagtttgaaatccaatttaactttagttaaccagagcaaaggctatgaaataaagaactctgttgagtttactggaaatggggactcctttcttcatgctaaccatgaacgacttcatactgcaattaaattccctgcaagtcaaaaactcatcagcactaagtcccaattcatcagtcccaagcatcagaaaacacgaaaattagagaagcatcatgtgtgcagtgaatgtgggaaagccttcatcaagaagtcttggctaactgatcaccaggtaatgcatacaggagagaaaccccacagatgtagtctatgtgagaaagccttctccagaaagttcatgcttactgaacatcagcgaactcatacaggagaaaaaccttatgaatgccctgaatgtggcaaagcctttctcaagaaatcacggctcaacatacatcagaaaacacataccggagagaaaccctatatatgcagtgaatgtggaaaaggcttcatccagaaaggaaatctcattgtacaccagcgaattcatacaggtgagaaaccttatatatgcaatgaatgtggaaaaggcttcattcagaagacgtgtctcatagcacatcagagatttcacacaggaaagacgccctttgtgtgcagtgaatgtggaaaatcctgttctcagaaatcaggtctcattaaacatcaaagaattcacacaggagagaaaccctttgaatgtagtgaatgtgggaaagcctttagcacaaagcaaaagctcattgtccatcaaaggactcatacaggagagagaccctatggctgtaacgagtgtgggaaagcgtttgcgtatatgtcgtgtctggttaagcataagagaatacacacaagggagaaacaagaggcagccaaggtggaaaatcctcctgcagagaggcacagctcattacacaccagtgatgtcatgcaggagaaaaactctgctaacggggcgactacacaagtgccttctgtggcccctcagacatcattaaacatcagcggcctcctcgcaaaacaggaacgtagtccttgtgggacagccagtggtcagatgtgcagcctcaggagataacagtggatttgcacaggacagaaaccttgtgaatgcagtgaatgtggttgtgccttccgtgatcaattatgtcttattttatgttacagaaaacccataggaagaaaactcagatctatgtggaaaagggttgagcaaaaatttgtagttcattatgtggccgaaaagcatacactgtgagaacatgtataaggctgagatagcctgatagactcatcctattaaaatgtatgctgtgatacacaggcaaatttgatgttaacctaagcacatacacagcaattgctcgactgtgtcaattaaatgagtaaaggaagcccaagtacttttaagtggaggaaatgaagtactgtgaatttttaaaacagatgagataattggtgttgggaagtgttgcagtgactgaaaagcttcataaggggcagttggtgggaaagggctaatactgtaatggtggaatgtgggacacatatgtgtcaattcagtttccttagaccagtgccagtgtggaggattaattgaaaaccatggaccataaactttcagaactttgtattatgcagagggatctgtgaaactagtcaatttgtttcattaaacaaatattttaaaatt

SEQ ID NO: 136413 - DNA, 344 bp, Homo sapiens
  misc_feature (1)...(344): n = a,t,c or g
aaacatgggccaaaagaaaatcnntgaaggaactgacagataggaattgggatcaagaagatgaagctgaagaggtgggaacattctccatggccagtgaggaagtcttnaagaatagagccntaaagaaagcaaagcgcagaaatgttngagttgaagttctcttgctgcaaatggccctaccaccttggntgataaagtttcaaatcccaaaactaatngggacagtcagcagccctcctcctcttggcttgcttccngtaaagcttntgttgggaatgcctatcacaagcagtttggcnccttnaactgctccntgccggntttggntagtnaagcacggg

SEQ ID NO: 136414 - DNA, 543 bp, Homo sapiens
cgaaaacatggccaaaagaaatgctgagaaggaactgacagataggaattgggatcaagaagatgaagctgaagaggtgggaacattctccatggccagtgaggaagtcttgaagaatagagccataaagaaagcaaagcgcagaaatgttggatttgaatctgacactggaggagcctttaaaggttttaaaggtttggtggtaccttctggaggaggacgcttttctggatttggtagtggcgctggagggaagcctttggaaggactgtcgaatggaaacaacataaccagtgcccctcccttcgccagtgcaaaggcagcggcagatcccaaggtagcctttggtggagatgaagaagagaatgatgagccacccaaagtagtagttaccgaagtaaaagaagaagatgctttttactccaaaaagtgtaaactgttttacaagaaagacaatgagtttaaagagaaaggcataggtactctgcatttaaaacctacagcaaatcagaagacacagcttttggtgcgggcagacaccaa

SEQ ID NO: 136415 - DNA, 490 bp, Homo sapiens
ttgtgagcagcagcaagatttattgcaaagagcgaacaaacaaagcatcccggtgtggaaggggacccgagtgggttgtcactgctggctcgggcagcctgcttttattctcatctggccccacccacatcctgctgactggtagagccgagtggtctgttttgacagggtgccgattggtgcgtttacaatccctgagctagacacaaaggttctccatgtccccaccagattaactagatacagagtgttgacaaaaaggttttccaagtccccaccagagtagctagatacagagtgtctattggtgcattcacaaaccctgagctagacacaaggtgctgattggtgtgtttacaaaccttgagctagatacagagtgccaattggtttatttacaatcccttagctagacataaaggttctccaagtccccaccagactcaggagcccagctggctttcacccagtggatcctgcacaggggctg

SEQ ID NO: 136416 - DNA, 517 bp, Homo sapiens
cggcacgaggttcgagttacaaaatggccgcccggagcgtgttcggcgcggttcccccagctgtctctggctgaaccggcgctctcgcctccctgccgaacacagcgtgaggagcccccccagggatatggtgtttgagtctctgggcttgccgagcactaagtcctctgagttccgcagcgcagcaccggaagcggccgagcgcgctcagcccggcgacccctgcgggctccagacccctgcgccgctgcgccccgggtttcgccgcaaccaagacccagcgagtgcagcggcggccgccgaggaggtgaggagcggcggcgggcgcgggaggatcttagcgaccactttgtggggttgtaatacactctgtattacacaatacaccagaataaggaagcttactctggtgtattgtggtgttgagagcaaacaagagtggggagagtatcacgaaggagttcaggcaggtttaacaagacctggcaggtccccaaaactaatcagtaagtttttg

SEQ ID NO: 136417 - DNA, 4719 bp, Homo sapiens
atggggtttcaccatgttggccaggctggtctcgaactcctgacctcagaagtgaagctgcggacctttgcagtgagtgttacagctcttaaggcggcgcgtctggagttgttccttcctcctggtgggttcgtggtctcgctggtttcagaagtgaagctgcagactttcgcagtgggtgttacagctgataaagacagtgtggacccaaagactagacataaaggttctccaagtccccaccagactcaggaacccagctggcttcacccagtggataccgcacaggggctacaggtggagctgcctgccagtcgcgccgtgcgccggcactcctcagcccttgggtggtcgatgggactgggcgtggtggagcagggggcggcgctcgtcggagagtctcgggtctcaggtcgcacaggagcctacggagcgggggaaggctcaggcatggcgggctgcaggcctcactcaggagtgcctgtgattgcctacctggttcttggggcttcaggataccaccatctcctgccaggagatggtgttgccactggaactcgtgcccctgccaagcaccaaagtctcccatgggccatggcccactttccagctattcaccctgcagaactcactggaccaaagctggagctgctctatgttgaagtggtagcaagatgcttctctcctctccaatgcactgcccttgccctggaggaaacaggaatgtcctggggagtgttagaaatttaccagacggctctggtgaagggctgggaacttcagctggaatttggaatatggtccttggagtcttggccgtttagttggcagatgaaaaaagacagcatgaggaagatctgtccttccagaaacacctccaggaggattatttccaatccccagcttcaaccgcctgtcctgccaccctcgtcacccacctgccagtttgctgccccacttcctggaaggccagctctgtgcaaatctggagctatgggagtgggaggtaccaaagaagaagctgtggctctcaccatgttggagttcaaggagggtgatggccatcgggggtgccagctttgggagtgtccctctgaaaatgagtccttcccagtatcatccaccccatggagtgatactccagggtgtctgtctccttatgcccatgtgactgggtggcctctggctgtctacagaagtttgctcagagccagtgtgacagctgactcctgctcattgagaagagacccttctgcctcttggtttattgcaaatcgattttactgtgggcaacaagctttcccagaaatacctaacactgacgcacacatctgtacttgggtgactaatcggcatatcaagcttacccgtcaaaacagaactgaagatttcctccctcaggctgttcctcatgcactttcccctatggaagcatggtctgagtcagtgtgggattatcagtacacattgaaggatgtgtgtgaagggaaagagtgtagcagaggagataattatttccaggtgaagcgactgtattcagatttgatgttagatttagcagctcagtctgatgcaggttttgttttttggcaagaacatttcctaggtattcccagtgcatacacagggcaactcacagatgcccaggtaatatgttactgccagattgcctgccagacgctcacaccaaagcatgctcctgtcctgccttctgtgtatgaggatgctcacattcccacccacttgccaacagtcattatcatttcttcaaatctttgccaattctatagcggtctccggctgaaccggcgctctcgcctccccgccgaacacagcgtgaggagcccccccagggatatggtgtttgagtctctgggcttgccgagcactaagtcctctgagttccgcagcgcagcaccggaagcggccgagcgcgctcagcccggcgacccctgcgggctccagacccctgcgccgctgcgccccgggtttcgccgcaaccaagacccagcgagtgcagcggcggccgccgaggaggttcgaaaacatgggccaaaagaaatgccgggaaggaactgacagataggaattgggatcaagaagatgaagctgaagaggtgggaacattctccatggccagtgaggaagtcttgaagaatagagccataaagaaagcaaagcgcaagaaatgttggatttgaatctgacactggaggagcctttaaaggttttaaaaggtttggtgggtacccttctgaagaagaacgcttttctggatttgggtagtggcgctggagggaagcctttggaaggactgttcgaatggaaacaacataacccagtgcccctcccttcgccagtgcaaaggcagcggcagatccccaaggtagcctttggtaagtagctcccatcccccagccgcctcttggttgataaaaatgtttcaaatcccaaaactaatggggacagtcagcagccctcctcctctggccttgcttccagtaaagcttgtgtcggaaatgcctatcacaagcagttggccgccttggactgctccgtgcgggattggatggtgaagcacgcgaatacaaactccctctgtgatctgacacctatctttaaaagactatgagaaaatatttagcaaacattgaaacagcaaacacgggaaacaagtggcaggaattctgaaagtgaatctaacaaagtggcagctgaaacacagtctccttccctttttggctcaacaaaattacagcaagagtcaacgtttttgtttcatggcaacaaaactgaagatacacctgacaagaagatggaggtggcatctgaaaagaaaacggacccatcatcactaggagcgacaagtgcctcatttaatttcggcaagaaagttgatagctctgttttgggctcattaagctctgtccccctgactggattttctttctcccctggaaactccagtttatttggcaaagatactacccagagtaaaccagtctcttcaccatttcccactaaaccattggagggccaagcagaaggtgacagtggtgaatgcaaaggtggagatgaagaagagaatgatgagccacccaaagtagtagttaccgaagtaaaagaagaagatgctttttactccaaaaagtgtaaactgttttacaagaaagacaatgagtttaaagagaaaggcataggtactctgcatttaaaacctacagcaaatcagaagacacagcttttggtgcgggcagacacccaatttaggcaacatattgctgaacgttctgattccaccccaatatgccatgtacgcgaacagggaagaataacgttcttatcgtctgtgttccaaatccaccaattgacgagaagaatgcccaccatgcccagtcaccatgttgatttcgggtaaaaaccagcgaggatgcagacgagttgcacaaaattttactggagaaaaaggatgcctgaacacgcaaagtcggctgcagaattattgccaagtttttttgctgcttccaccgccccttaaagttagtcagtttttcttctcttctttgacatttttaagaacttatagataacttaaaacttttgtgaggaagattaatgtggcccaataaaacctttaaatgttaagtgtcaagaaactgcactctcccttcttaagaactgcctaaagtgtaaaatacatttgaatgcaatttttggaagattttttaatgttcgtttattaaactaaccctaagtgatttcttcaaggactggcaatcagggtatcaatttgctttcccaaagggctcttccaacccgtgggttttggggtccaccgccaccaccagagaggcttttgaacaggtgcctggctgtgttcagaaggaagctggcctgtgtgcttctctccggtgggctcagccgacgtgtgagacttgttctgttaccaaatgaaccgggctgccacgctgtgacaggcgtttgtcctctgctttatttttactttgaagctcaaatgcgagtactaagtgttcacctcagcgttcgaatcattggcctgtaaccctgtgggctgcttcacgagaattcaggacctgcattttcattctaaaaagaaatgaacagcttgtgaaggagttttttggcttcatagtttctattcatgaggtagggttacttctttatccccctaaagacaaaatgaagataaagggggattgccaggaattggttttaaaagcacaaatgtggtagcttatcatctacaccatggagagtgaacccttacgaaatgaaagtcaaatgagaccatcctagaaaaagaagatgctcataggcatttgtaccatgatcaaccccacgcatatgaaaactatgaccaagtgacgtgcctgggagctttgacacacaagccatgtgaattcactagggaacacgtaataaagcttggccaaggattccaagaaatcataatgcccagagtttgcaagtggcgagaaagtgagcattctcatacacagatgcagctatctcactgtctatctcacactcactgagggtgatgtttcaggagccactggacagaatcttctgcggcaaacctgagaaagaaaactgaaattactgctttgaagtgacgggttactcagaaatactgaaatacatattctataaaatgtaaacttttgattttgactctaataaaataataagcctttg

SEQ ID NO: 136418 - DNA, 432 bp, Homo sapiens
  misc_feature (1)...(432): n = a,t,c or g
aagggcgcctaagaaagctggccaggctgctnaaggagtcggcgcgaaagccgttgcccaaaatatgggtgtggcnacgctgtgcacggggaaacaaggcctcgcgggcnccnagcttcttgctgctgccgttgagctggaagaggttctgcagcacccccggccccttgctggccgctgccaccgccttccgcttggtctgcccaccgcggaccagctcagcaaggggctccacggcggcccaggaagtggtcggagngcccgtgggggatttggcacctgaggttaggagttcggctttaccagctttgtctttgctaatggattttttcccaggtgtcttcaaagcttcggggccgtcctgtgctttgggggacaggctgggggtggcggcttcactagncgggggtgcctcactggataccttcttgg

SEQ ID NO: 136419 - DNA, 419 bp, Homo sapiens
ccgtgctcatccccaaggaggatagcctgctgtacgcgggcagcgtcaggaccctgcagccacccgacatctatagcatcgtcatcgagggcgagaggggcaaccggcagaggatctactcactggagcagctgctgcaggaagcggttctcgatgtgcggccacagtccagccggtacctcccgcccggcacgcgggtctgcgcctactggagtcagaagtctcgatgtctgtacccgggcaacgtggtccggggggcctccggtgacgaagatgaggacctggactcagtagtggtggaatttgacgatggggatacaggccacatcgccgtctccaacgtcaggctgctgccccctgacttcaagatccagtgcacagagccctctccggccctgctagtgtctagcagctgccgg

SEQ ID NO: 136420 - DNA, 557 bp, Homo sapiens
tgcggccgccctccgtggaaaaccggccaaagatctcagccttcctgcccgcccggcagctctggaagtggtcggggaatcccacacagcggcgtggcatgaaggggaaggcccggaagctgttctacaaggccatcgtgcggggcgaggagaccctgcgtgtcggggactgtgctgtcttcctagtcagctgggcggcccaacctcccctacatcggccgcatcgagagcatgtgggagtcgtggggcagcaacattggtggtcaaggtcaagtggttctaccacccctgaggagaccaagctgggcaagaggcagtgcgacggcaagaatgcgctgtaccagtcctgccacgaggatgagaacgacgtgcagaccatctcccacaagtgccaggtcgtggcgcgcgagcagtatgagcagatggcccggagccgcaagtgccaggaccggcaggacctctactactggcgggcacctacgaccccaccaccgggcgcctggtgacggctgatggcgtgcccatcctatgctgagccgctcccacttcagattggt

SEQ ID NO: 136421 - DNA, 2943 bp, Homo sapiens
atgcggcggcggcgcaaagtcgcggccatccatgccgggccccggccccggtccgccgccgcttcctcggagcagcgcggccggggcccgggggcggctcggcgcgcgggcggcgcagaggcggcggcgtccggggtcacaggcggtggtggcggcggggccggtcagcacgcgggaggactgggcttctcggcgggcggccgcgcaccgagccagcggccgctgtgcgggtccatgcctgctcgactttttagcaaacaggaggtggattactgtggcctgcctgcgccgccagcatcgtctttaaggtcgagagggcaccggcagaggatctactcattgaaccagctgctgcaggaagcgttgaggaccgggcgggcccgccccggggaggggcctggctggcttgtcacagacaaaggagggcttggctggggcagcagccactcccaggcccagggaccagactctcaggcagcctggggccgggccccacctgctcatgggtcgtcgcccgcgttcctgcaggttctcgatgtgcggccacagtccagccggtacctcccgcccggcacgcgggtctgcgcctactggagtcagaagtctcgatgtctgtacccgggcaacgtggtccgggccccgcctccctgtttcgggcgcctactgggggttccagctgcaagctcaggtgtgccgtccacaggggcctccggtgacgaagatgaggacctggactcagtagtggtggaatttgacgatggggatacaggccacatcgccgtctccagacgcacagagccctctccagccctgctagtgtctagcagctgccggaggaccaagaaggtatccagtgaggcacccccgcctagtgaagccgccacccccagcctgtcccccaaagcacaggacggccccgaagctttgaagacacctgggaaaaaatccattagcaaagacaaagctggtattttaccggacttcccagaatccggatcggggaaggcaccctctgggggctgggggaaccaggaggcccgtggggtaggcagggtccggggaggggcaggtggaggcagctttgtgggcccagctggggctgactctgctgggcttttgccctcaggtaaagccgaactcctaacctcaggtgccaaatcccccacgggggcctccgaccacttcctgggccgccgtggcagccccttgctgagctggtccgcggtggcgcacaccaagcggaaggcggtggcagcggccagcaaggggccgggggtgctgcagaacctcttccagctcaacggcagcagcaagaaactgcgggcccgcgaggccctgttccccgtgcacagcgtggccacacccatatttggcaacggctttcgcgccgactccttcagcagcctggccagctcctacgcgcccttcgtcggggggaccgggccgggcctccccaggggagcccacaagctgctgcgggctaataaggccgagagggtggaggccgagaagggtgggcggcggcgggcgggcggtgagttcctggtcaagctggaccacgagggtgtgacctcccccaagaacaagacctgcaaggcgttgctcatgggggacaaggacttcagccccaagctcgggcggcccctgcccagccccagctatgtgcacccggcccttgtgggcaaggacaagaaggggcgggcacccatccccccgctgcccatggggctggcgctgcgcaagtacgcgggccaggcagagttcccgctgccctacgacagcgactgccacagctccttctcggacgaggacgaggacgggccggggctggcggccggcgtgccctcccgcttcctcgcccgcctgtccgtgtcctcttcctcctctggctcgtccacctcctcctcctcaggctccgtgtccacctccagcctctgctcctccgacaacgaggactcgtcctacagctcagacgacgaggacccggctctgctgctgcagacctgcctcacccaccccgtgcccaccctcctggcccagcccgaggccctgcgctccaagggcagcggccctcacgcgcatgcccagcgctgcttcctgtccagggccacggtggctggcaccggtgcgggctcaggccccagcagcagcagcaaatccaagctcaagcgcaaagaggccctgagcttctccaaagccaaagagctctcccggaggcagcggccgccctccgtggaaaaccggccaaagatctcagccttcctgcccgcccggcagctctggaagtggtcggggaatcccacacagcggcgtggcatgaaagggaaggcccggaagctgttctacaaggccatcgtgcggggcgaggagaccctgcgtgtcggggactgtgccgtcttcctgtcagctgggcggcccaacctcccctacatcggccgcatcgagagcatgtgggagtcgtggggcagcaacatggtggtcaaggtcaagtggttctaccaccctgaggagaccaagctgggcaagaggcagtgcgacggcaagggaggggacacgacagcagccagcactgtgccccaacacggagcacctggccccaccacacagcccccgctcagcaggtaccacggccctgcagggagccgcacagcccatgggcatgccctagagcagggctcccaggtccctccccacagtggggggctgtggcccacagcagtgctcagcatccggcagaatgcgctgtaccagtcctgccacgaggatgagaacgacgtgcagaccatctcccacaagtgccaggtcgtggcgcgcgagcagtatgagcagatggcccggagccgcaagtgccaggaccggcaggacctctactacctggcgggcacctacgaccccaccaccgggcgcctggtgacggctgatggcgtgcccatcctatgctga

SEQ ID NO: 136422 - DNA, 429 bp, Homo sapiens
  misc_feature (1)...(429): n = a,t,c or g
aatattgccatatacaagaatatcattaaacaagaaaaactgccttgctttgggctttttcctgcacaacttagtcaatactccttctccaataagaactcgtccaggtatagttaaaggttgaccagctgctccaaaacagttttccactatacttatacgtctagtatttgcttcactgtttgccaagcgatccaccatctttcactaatagccccgacggccgcgggcggcggcggcggcgacagcgaaggcgaaggtccgatcctcctggtcgcggacgcacgaaatcgtcgacccgggaaatctgaattcgtcgccaagcttctcgagcttaggctagctctagaccacacgtgtggggggccgagctcgcgcccgctgttctgnnnnnnnnnnnnnnnnnnnnngcacaagtcactggccgac

SEQ ID NO: 136423 - DNA, 659 bp, Homo sapiens
  misc_feature (1)...(659): n = a,t,c or g
gggtgtcttgattagccatccattccttaagtctccctcatctttgatggaatcaatagtgacattttccaggggaataatatgttgtttgttatattttttcttctggatgacaatattgccatatacaagaatatcattaaacaagaaaaactgccttgctttgggctttttcctgcacaacttagtcaatactccttctccaataagaactcgtccaggtatagttaaaggttgaccagctgctccaaaacagttttccactatacttatacgtctagtatttgcttcactgtttgccaagcgatccaccatctttcactaatagccccgacggccgcgggcggcggcggcggcgacagcgaaggcgaaggtccgatcctcctggtcgcggacgcacgaaatcgtcgacccgggttcccgggtccgancgtttcgtttgattccatcaaagatgagggagacttaaggaatggatggctaatcaagacaccaactaaatcttttgcagtttatgctgccactgctacggagatctgaatttgtcgacaagcttctcgagcttaggctagctctagaccacacgtgtggggggccgagctcgcgcccgctgtatctatatagtgtctcctaaatggccgcacaatgcactggctatg

SEQ ID NO: 136424 - DNA, 912 bp, Homo sapiens
atgagcaaggcagggcccatcttcctccccacagtgatctttcaaacccaggatgtcggctgctgcctacccccagcagagctttctggtttgagcggagctgagcttgccaggcctcaagccattctgggcctgtctggggacctggtgaacggactaccccaggagcctaggcatcagcccgaagagaaccctcgaggaaccaacaccctaacttgtgggtcacagaacaaaatgaatcgcctcaccgcgtaccgttgcgaatccattagttcccgcgcgtacaccaactggccccaggacaaacaagcccaaacatctaatcaaacaagggagaggccagcccaggcagccgttgtcgggttcgactggaggggcgggggagtcacctgcgagcggctgcgctggcggccagcccgcccatcgtgtctggatcgcgccggctgcgcggggctgcggacagcacacaccctggaaggccccggcggggaacgggcagagtccgcgccctgcgtccgcgaccaggatgatcggaccttcgccttcgctgtcgccgccggcgccgcccgcggtcgttggggtagctgctcttggcagcagaaacaggtgtatcctttgagatggccccaaggtcacctccaatcccccctcaaggttccaagctcagtgactgctggccaaggcagccagcaggtggccgtggcagagcgggctgtctgcaagcttgaggagcaaggagaggcagtccgagtctcaaaactgaagaacttggagtccaatatagagggcccacccgttaagcgggagcaggtggccaggcgtgccttggcacttgcactcggagaattgagtatcaacaagcagcagggcttcatttctgcttccattgcctgctttaagaagataatgtag

SEQ ID NO: 136425 - DNA, 549 bp, Homo sapiens
  misc_feature (1)...(549): n = a,t,c or g
cctcaagggctctcagcccccgagcagcaagaggatgaggacagcctgaaggaagactcgcntcgggcctggggctcgggccagcattcggatagccacggggagtcatcagccgagctggacgacaaggacatcttggctcctcagaccgtgcagtgtccagcccaggccccagcaggcggcagtgaggagaccatcgccaaagccaagcagagtcgcagtgagaagaaggcccgaaaggcaatgtcaaagctgggcttgcggcagattcagggagtcaccaggatcaccatccagaagtccaagaacatcctctttgtcatcgccaagcctgatgtcttcaagagcccagcctcagacacttatgtggtctttggcgaggccaagattgaggacctgtcccagcaagtgcacaaagccgcagctgagagacaaccacagtgacatcgtcaatgccatcatggaactgaccatgtagccactgaccggaagctggagccatcctacgccttccctcagctctgctactcaataaatcggtgtcccttc

SEQ ID NO: 136426 - DNA, 621 bp, Homo sapiens
atgacctgattacgccagcttgaacgaggccttgccaagggtcagcccagcacgcccgtggacaggcccctgggccctgacccttctgctcctggtacccttgctggggcagccctacccccactggagcccccagccccctgcctgtgccaggacccccaggaagactctgtggaagacgaggagcccccaggctctctgggcctcccaccgccccaggcaggagtccagcctgccgctgctgctgtctcaggaaccacacagcctctggggactgggccgcgagtcagcctctcgcctcactccccactcctcagccccaaggtggcctccatggatgccaaagacctggccttgcagatcttgccgccttgccaagtgcctcctccctctgggccccagagcccagctggccctcaagggctctcagcccccgagcagcaagaggatgaggacagcctggaggaagactcgcctcgggccctgggctcgggccagcattcggatagccacggggagtcatcagccgagctggacgagcaggacatcttggctcctcagaccgtgcagtgtccagcccaggccccagcaggcggcagtgaggagaccatcgccaaagcc

SEQ ID NO: 136427 - DNA, 2271 bp, Homo sapiens
atgcctggggagctgctcgcgccgagctgctgctgccgaggcggaccgacccgggaccgcacagatctgtcctgcgatgcggccgctgccaccaccatcctgggaggggaccggcgggagccctgtgctctgaccccagggcccagccacctggccctcacgttcctgcccagcaagccgggtgcccggccccagcccgagggagccagctgggatgcagggcctggctctgtccacggaggctcctctcccggccaccctggagccccggattgtgatgggagaggagacgtgccaggccctcctgtcacccagagctgcccggacagcgctcagggaccaggagggctggggcctgtcccgcaggggtccatggtggatgaacgagagctgcacccagcagggaccccagagcccccgtcctctgagtccagcctctctgcagacagcagctcctcctggggccaggagggccacttcttcgacctggacttcctggccaatgacccaatgatccccgcagccctcctacccttccagggcagcctcatctttcaggtggaggcagtggaggtgacaccgctatccccagaggaagaagaagaggaggctgtggcggatcccgacccagactcagcctcctacgcagaggcagatgatgagaggctgtacagcggggagccccatgcccaggccactttgctccaggacagtgtccagaagacagaggaggagagcggaggactccgctatgacaccgcctctgcccctacaagacacagatctctcgtcagccccaaagcctgtagctgcagccacgattgtgccccaggcaggctgaagaggacctcaccttaccccaggactccgctatgacaccgcctctgcccctacaagacacagatctctcatcagccccaaagcctgtggctgcagccacgattgtgtcccagcaggctgaagagggcctcaccttaccccaggactccgctatgacaccgcctctgcccctacaagacacagatctctcgtcagccccaaagcctgtagctgcagccacgcctgtgtcccagcaggctgaagagggcctcaccttaccccaggactccgctatgacagcacctctgcctctgcaagacacaggccccacctcaggtccagagcctctggctgtggccacccctcaaaccttgcaggcagaagcaggctgtgccccagggacagagcctgtggccaccatggctcagcaggaagtaggcctggacgggaagcatgtctggaagcgcgacgacacaggtgatggggctaagcctgactcaccccaaaaggagaccctggaggttgagaaccagcaggaaggaggcctgaaggcacctggcacaggaacatggacccagccccaaggtggcctccatggatgccaaagacctggccttgcagatcttgccgccttgccaagtgcctcctccctctgggccccagagcccagctggccctcaaggctctcagcccccgagcagcaagaggatgaggacagcctggaggaagactcgcctcgggccctgggctcgggccagcattcggatagccacggggagtcatcagccgagctggacgagcaggacatcttggctcctcagaccgtgcagtgtccagcccaggtgcccagtccagggaagagggccccagcaggcggcagtgaggagaccatcgccaaagccaagcagagtcgcagtgagaagaaggcccgaaaggcaatgtcaaagctgggcttgcggcagattcagggagtcaccaggatcaccatccagaagtccaagaacatcctctttgtcatcgccaagcctgatgtcttcaaggagacccagcctcagcacacttatgtggttctttggcgaggccaaacattgaggaccttgtcccagcaagtgcacaaagccgcagctgagaagtttaaggtgccctcagagaccctcagccttggtccctgagtcagcaccccagggcccgggttaggcttgagtgcaaggaaaaggaaaaggagggaggaggaaaaggtggaccaggcggggctggaactgcgtgacatttagctggtgatggcgcaggccaatgtgtccagggccaaggccgtgcggggtcttaggagacaacccacagtgacatcgtcaacgccatcatggaactgaccatgtagccactgaccggaagctggagccatcctacgccttccctcagctctgctactcaataaatcggtgtcccttcaaa

SEQ ID NO: 136428 - DNA, 405 bp, Homo sapiens
tttcgtcacccacgccggcgggagccgcccgttcgcgctgccagcagcttccgcctgctacggtcctggcaagcacctcgggatcccattccttcacagggaccctagccagttaaagctgatacattcctgtgggtcaactatgcaactaactcagattttgagcaaacaaagctctcaagttggtgatcctcaggagtctctgcattagttggacagctcttctggaattatcttctaagtcaactgtgggttgggtaggtggctctgctgatttttcgctggacttccacatttgggacgagttggctgtcatcagctctagaaagggtgtggccgttttacattggctgttttcctcacattcctcaagcagttgctgaacagaagacttttgagagtcag

SEQ ID NO: 136429 - DNA, 496 bp, Homo sapiens
ttttaccctaatgctatataagaattgccttatattaagtaaatattcaggaatagagacagccctaagaactgggtcatgtcactagccctcttcagttgcagttcacggatcctccaccttgacaataaccatgattctatccatttctcctcccttgtctgctgctaccaccaactcctcagcacctcctctatacatgcattgcaagctttctcctttctcataactttggtatgctgaagatttatactggccctttctctatgaatcctttcagcttcaacttcagctctgtattgcacatgggaactcttgaaaagacaatctgatcctgtccctctcaggggagaaacttttgggccactgcttttttctcagctatagcaaggaaagcagatagggaaaagaggtgagttggtcactatgtgcagaatatggccaatcagagaagttctgctaaaggagcaagcaggtgtggcagttgctggtcgac

SEQ ID NO: 136430 - DNA, 701 bp, Homo sapiens
gtcctggcaagcacctcgggatcccattccttcacagggaccctagccaggcaagcgcgcgcctcactgtaccggagagctccaagcacgcgcttggtctggggcccggacgctacatctgggaaggggtgggtggctgggtagataggcgaggaaggatcgtctctaccctctctcaagtagctgaggcctccgaaaccttccctagctggatttggggacagaggagcgctgttaaagctgatacattcctgtgggtcaactatgcaactaactcagattttgagcaaacaaagctctcaagttggtgatcctcaggagtctctgcattagttggacagctcttctggaattatcttctaagtcaactgtgggttgggtaggtggctctgctgatttttcgctggacttccacatttgggaccagttggctgtcatcagctctagaaagggtgtggctgttttacattggctgttttcctcacattcctcaagcaggagggctctgagagatttcatttctgtcctgctgatgaagtctacgttcattcagggcctgctgtggaagaccagccccaaagttgctgaacagaagacttttgagagtcagcagaaatcttccactttgcatggttctcttgatgtgaaatcatctatatagccccagaattggaaaagaaaaaaaataaaaaaatggaagg

SEQ ID NO: 136431 - DNA, 2532 bp, Homo sapiens
  misc_feature (1)...(2532): n = a,t,c or g
tcacggatcctccaccttgacaataaccatgattctatccatttctcctcccttgtctgctgctaccaccaactcctcagcacctcctctatacatgcattgcaagctttctcctttctcataactttggtatgctgaagatttatactggcctttctctatgaatcctttcagcttcaacttcagctctgcttgaggaatgtgaggaaaacagccaatgtaaaacggccacaccctttctagagctgatgacagccaactcgtcccaaatgtggaagtccagcgaaaaatcagcagagccaccccttcccagatgtagcgtccgggccccagaccaagcgcgtgcttggagctctccggtacagtgaggcgcgcgcttgcctggctagggtccctgtgaaggaatgggatcccgaggtgcttgccaggaccgtagcaggcggaagctgctggcagcgcgaacgggcggctcccgccggcgtgggtgggggaagggcggcagccacacccggaagtcggtccgggagggagggggaaatctgagggaacgaggcttccggtggcgcaaagggtgtcgggagcggcttcctgcaaaccttccctggcatctggagggaccaccgttgccgcgtcttcggcttccacgatctgcgttcgggctacgcggccacggcggcagccactgcgactcccactgtgcctggctctgtccatattagttcccaggcggccgtcgccgttccagcagcggcagcggcagcggcagctggcggacatgttgtgaggcggcggcgcgggtgtctgaaggacggtttggccgaggcggcggcaacggcttgctggcggcggcggcagcggcagcggcagcggggcctcgggctctatagagccagagcccgctgggtacccgcctcggtaccgcggcgaggccagtgcccctggatcttgcctctgctccgacgccgtttgtgaccagtttaggcgacagcgccctgcccctctgaggagacacgaatggtggttccccagccgctcaaatttccggaccaccgcgctttcccctcctcagcctgggctgtgctctctctagaatcctcgggcccccactttccttccaaacttcatcctaaattctctcacacacgccaatgtgtcccagccctcaaggcaagctgttcctccgttcattttctgcaccctcttcgaaaagcaccccccgcgaatcactctccgagggcgacttttttagaaatctcggtggagttagtggaccagagctggggaagtttaaaaagccggggcccgaggaaaccaggaaggtactatggcttcctcgtctggcaacgcagaaggttctaacaatccccagaggttgctatcaataaaaatgatcaaaagagactcttccttaatgttccgggtggcccaacgatgctcgaagaagctgtggtgaactgctggcactgaattcattccaccttatatcttctgaagccaatgagatttgtaacaaatcggaaaagaagaccatctcaccagagcatgtcatacaagcactagaaagtttgggatttggctcttacatcagtgaagtaaaagaagtcttgcaagagtgtaaaacagtagcattaaaaaagaagaaaggccagttctcggtttgggaaacccttgggcattcctgaagaagagtttatttggagaccaggcaaacaaagaattatttggcaaaagcctagaccagcaacaagcagaaattggcccaacaaggaatgggcttcaaatgcagcaagctgccccancaagccccagcttgctgctgcctcagccaagtgcatctaatccaggcggggatctttctcagggatggaagaagatggtggatggatatctgaaattccaccagctgagtttctatttcttctataaatgtttttccctgcacaacaaaaaacagtgaaagaaaatgcttatctgtaattttggtatgcatcttggtggaccttggtcattggtattctagggatgtctgctattaagtttcatctattgtggggctaaacatgtaaaaactgtctctttgaactattgaaaatttaaggttcagtataatatcaattttgaatttttaatggtgtttatgaaattttaggatagcagcgagtccttcgtttgatcaataaacagtgttacaggataacttcaagtttataaaaaatacagtggaaatttctacaaaggctctaaatctggcatttgcatttcctctgcccttttaactaaactaaaacttgtgaattttaaattattaagggggggggggtcctgtgtaaataagtagacattggattgggttggtgaaagagttccagttctgtagtatctggaatttgtcttttaaaatgagtacatatataggcaataaatatatatgctcagatcaatatacttgttagaaacttcaggcatcaaaacctaggaggagtattttaatagtatttgtataaatcggtgggtatgtttttaattagttcc

SEQ ID NO: 136432 - DNA, 2183 bp, Homo sapiens
  misc_feature (1)...(2183): n = a,t,c or g
atggcgccgcaggtctggcgtcgacggaccctggagcggtgtctgacggaagtcggcaaagccacgggtcggcccgagtgcttcctcacgattcaagagggattggcatcaaagttcacttctttaacaaaagtgctttatgactttaataaaatattagagaatggtaggatccatggaagccccttgcaaaaacttgtgatagaaaattttgatgatgagcagatttggcaacaactggaattgcaaaatgaaccaattttacaatactttcagaatgcagttagtgaaacaattaatgatgaagatatcagtcttctcccagagagtgaagaacaggaacgtgaagaggatggttcagagatagaggctgatgacaaggaggacctagaagatttagaggaggaggaagtgtccgacatgggtaatgatgatcctgaaatgggtgagagagctgaaaactcaagcaaatctgatctgaggaaaagccccgttttcatgtgatgaggattctgaccttgactttgatatcagcaaattggaacagcagagcaaggtgcaaaacaaaggacagggaaaaccaagagaaaagtccatagtagatgataaattcttcaaactctctgaaatggatctctatttagaaaacatacataaantgttaagaggaacgaaaagatgataatgatgatgaggaggaggaagatattgatttttttgaagatattgattctgatgaagatgaagggggactgtttggaagtaaaaaacttaagtcaggtaaaagttccagaaatctgaaatacaaagattttttttgatccagttgaaagtgatgaagacataacaaatgttcatgatgatgagctggattcaaacaaagaagatgatgaaattgctgaagaagaagctctattaactaagtatttcggaaacggatgaagatgatgaccttcaagaaaatgaagacaataaacaacataaagaaagcttgaaaagagtgacctttgctttaccagatgatgcggaaactgaagatacaggtgttttaaatgtaaagaaaaattctgatgaagttaaatcctcctttgaaaaaagacagggaaaagatgaatgaaaaaattgcatctttagaaaaagagttgttagaaaaaaagccgtggcaggcttcaggggggaagtgacagcacagaagaggccagagaacagcctcctggaggagaccctacactttgaccatgctgtccggatggcacctgtgattacagaggaaaccacccttcaactggaaggatatcattaaacagaggataagagatcaggcttgggatgatgtagtacgtaaagaaaaacctaaagaggatgcatatgaatataaaaagcgtttaaccttagaccatgagaagagtaaattgagccttgctgaaatttatgaacaggagtacatcaaactcaaccagcaaaaaacagcagaagaagaaaatccagaacatgtagaaattcagaagatgatggattccctcttctttaaaattggatgccctctccaaacttccactttatcccttaaaccggcctggtaccagaggttaaagttgtgtccaaatctggccagccattaaccatggagggaagtagccccagtgagtgttagtgatccagctctcctgggccccagaggagatcaaggagaaaaataaagctggagatataaaaacagctgctgaaaaaacagctacagacaagaaaccgagagcgagggaaaaaggaaatattcaaaagcgtatgaaaataaaagagaaggagaagcgggagaaaaactgcttgaaaagagcagtgtagatcaagcagggaaataccagcaaaaccagtagccttcggagaagttaaaaccagctgaccaaaactgggcaaagcttcctttcataaaaggattgaacggtaaagacaaggccttaaagttcctctcaagcattcttttctaaattacaagatccaagtaaaaatgcaaatcaatgatgcaaagaaaacgagaaaagaaaaagaagaaaagacaggatatttctgttcaataaattaaagctgtaatatattctgaatataatgtaaatattaatgtgtaagcttatattgtgtcattgttctgttttataataaaattcttgagaaccttaaaaaaaaaa

SEQ ID NO: 136433 - DNA, 150 bp, Homo sapiens; identical to SEQ ID NO: 124651

SEQ ID NO: 136434 - DNA, 610 bp, Homo sapiens
attcggcacgaggggaggggccagcgaggcaagatggagttagtgcagggtcctaaaacgcgggctgcagcagatcaccgggcacggcgggtcttccgaggctatctacgggttttttttcaggacaaatgatgcgaaggttggtacattagtgggggaagacaaatatggaaacaaatactatgaagacaacaagcaattttttggccgtcaccgatgggttgtatatactactgaaatgaatggcaaaaacacattctgggatgtggatggaagcatggtgcctcctgaatggcatcgttggcttcacagtatgactgatgatcctccaacaacaaaaccacttactgctccgtaaatttcatttgggacggaaccattaaatttcaacgtggactggggcaccccaggaacaatatgtaccttattctaccactagaaaagaagattcaggagtggatcccaccttcaacaccttacaagtaaagacaatgaagaacagttgaaacatgcaaaatatggagcttttcatgtaattactcttttactgtttaccattcactataattcacaattaaaattgtgtgactaaacaaaaaaaaaaaaaaaa

SEQ ID NO: 136435 - DNA, 258 bp, Homo sapiens
tggacatggcagcccaaattgcagaaggcatggcattcattgaagagcggaattatattcatcgtgaccttcgggctgccaacattctggtgtctgacaccctgagctgcaagattgcagactttggcctagcacgcctcattgaggacattcaccatcaagtcagatgtgtggtcttttgggatcctgctgacggaaattgtcacccacggccgcatcccttacccagggatgaccaacccggaggtgattcagaac

SEQ ID NO: 136436 - DNA, 741 bp, Homo sapiens
atggaggactttctgctctccaatgggtaccagctgggcaagaccattggggaagggacctactcaaaagtcaaagaagcattttccaaaaaacaccaaagaaaagtggcaattaaagttatagacaagatgggagggccagaagaacgatcattcgatcattccctgctcccgctggcctggaaccaagcaagcccgatggcagctctggagtggcgccctcacaaagccaatgctgaggagatgaccaagtaccacagcgatgactacattaaattcttgcgctccatccgtccagataacatgtcggagtacagcaagcagatgcagagatctgctgccaacccagacaatgcgcccattgttctgcgtctccgggagccagtgtgcaactgcgtgtatctgtttctctctgtgtgtgacttcagctgctggcttcttcccagagccctctcctgctgctgcccaccaatgcagtgctcctgccacccaggcatctcctgggcgtctgatgcacgacttggctgccgttaccctcttattggcaacaatcagaggcctagatttccagggcgaggctaccgcatggtgcgccctgacaactgtccagaggagctgtaccaactcatgaggctgtgctggaaggagcgcccagaggaccggcccacctttgactacctgcgcagtgtgctggaggacttcttcacggccacagagggccagtaccagcctcagccttga

SEQ ID NO: 136437 - DNA, 2320 bp, Homo sapiens
tttcgtctacgacggcgaagggagctgagactgtccaggcagccaggttaggccaggaggaccgtgtgaatggggccagagggctcccgggctgggcagggaccatgggctgtggctgcagctcacacccggaagatgactggatggaaaacatcgatgtgtgtgagaactgccattatcccatagtcccactggatggcaagggcacgctgctcatccgaaatggctctgaggtgcgggacccactggttacctacgaaggctcccgggctgggcagggaccatgggctgtggctgcagctcacacccggaagatgactggatggaaaacatcgatgtgtgtgagaactgccattatcccatagtcccactggatggcaagggcacgctgctcatccgaaatggctctgaggtgcgggacccactggttacctacgaaggctccaatccgccggcttccccactgcaagacaacctggttatccgctctgcacagctatgagccctctcacgacggagatctgggctttgagaagggggaacagctccgcatcctggagcagagcgttcgagtggtggaaggcgcagtccctgaccacgggccaggaaggcttcatccccttcaattttgtggccaaagcgaacagcctggagcccgaaccctggttcttcaagaacctgagccgcaaggacgcggagcggcagctcctggcgcccgggaacactcacggctccttcctcatccgggagagcgagagcaccgcgggatcgttttcactgtcggtccgggacttcgaccagaaccagggagaggtggtgaaacattacaagatccgtaatctggacaacggtggcttctacatctcccctcgaatcacttttcccggcctgcatgaactggcctccgccattacaccaatcgcttcagatgggctgtgcacacgggttgagccgcccctgccagacccagaagccccagaagccccagaagccgtggtgggaggacgagtgggaggttcccagggagacgctgaagctggtggagcggctgggggctggacagttcggggaggtgtggatggggtactacaacgggcacaacgaaggtggcggtgaagagcctgaagcagggcagcatgtccgccggacgccttcctggccgaggccaacctcatgaagcagctgcaacaaccagcggcttggttcggctctacgctgtggtcaccccaggagcccatctacatcatcactgaatacatggagaatgggagtctagtggattttctcaagaccccttcaggcatcaagttgaccatcaacaaactcctggacatggcagcccaaattgcagaaggcatggcattcattgaagagcggaattatattcatcgtgaccttcgggctgccaacattctggtgtctgacaccctgagctgcaagattgcagactttggcctagcacgcctcattgaggacaacgagtacacagccagggagggggccaagtttcccattaagtggacagcgccagaagccatttaatctaggggaaattcaccaccaaggtcggatgtgtggtcctttgtgagacctgctgccggaaatttttaccccacggccgcatcccttaccccagggaatacccaacccggagttgattcagaaactggagcgaggctaccgcatggtgcgcccttactaactgtccagagaagctttaccaactcattgaggctgtgctggaaggagcgcccagaggacccggcccacctttgactacctgcgcagtgtgctggaggacttcttcaaacgccacaggagggccagtaaccagcctcaagccttgagagaacccctgaggaagcccctttgtttctccccctttcctctccagccctgaactggggagagtcgagttcctgtgccatagtcaacatggcctatgcaccatatggactcttgcacatgaatcccaaccaacagtgtgaaaaatatgcaccttgtgtctgtacacggtgtcctgtagttgcgtggactctggcacatgtcttgtacatgtgtagcctgtgcatgtatgtcttggacacttgtacaaggtacccctttctggctctcccatttccttgaggaccacagagagaggggagaagcctgggattgacagaagcttctgcccacctacttttctttcctcagatcatccagaagttcctcaagggccaggactttatctaataccttctgtgtgctcctccttggtgcctggcctggcacacatcaggagttcaataaatgtctgttgatgactgttgtaaaaaat

SEQ ID NO: 136438 - DNA, 384 bp, Homo sapiens
aggacaaaggatccattcagaagttcgtgccctacctcatagcaggcatccaacacggctgccaggatatcggggcccgcagcctgtctgtccttcggtccatgatgtactcaggagagctcaagtttgagaagcggaccatgtcggcccagattgagggtggtgtccatggcctgcactcttacgaaaagcggctgtactgaggacagcggtggaggccgaggtggtggaggggatgcaccccagtgtccacttttgggcacagcctccctcccttctcctcagctgcagtcgaaggctttaactttgcacacttgggatcacagttgcgtcattgtgtattaaatacttggaataaatcaagcaggtctcaacgcctccact

SEQ ID NO: 136439 - DNA, 467 bp, Homo sapiens
acacagtaacaatctgatctctctttcttttccccacaccgtgcagcagctcttcgccagtgaccagggactcacctacaacgacttcttgattctcccaggattcatagacttcatagctgatgagacgccgctgatctcctcccccatggacactgtgacagaggccgacctggccatcgtgatggctctgatgggaggtactggtttcattcaccacaactgcaccccagagttccaggccagtgaggtgcagaaggtcaagaagtttgaaccgggctttatcacacaccccgtggtgctgagccccttgcacactgtgggtgatgtgttggaggccaagatgcgtcatggcttctctggcatccccatcactgagacgggtaccatgggcagcaagctggtgggcatcgtcacctcccgagacatcgactttcttgctgagaaggaccacaccaccctcctca

SEQ ID NO: 136440 - DNA, 468 bp, Homo sapiens
atggtcactctgaagacgccgctgatctcctcccccatggacactgtgacagaggccgacctggccatcgtgatggctctgatgggaggtactggtttcattcaccacaactgcaccccagagttccaggccagtgaggtgcagaaggtcaagaagtttgaaccgggctttatcacacaccccgtggtgctgagccccttgcacactgtgggtgatgtgttggaggccaagatgcgtcatggcttctctggcatccccatcactgagacgggtaccatgggcagcaagctggtgggcatcgtcacctcccgagacatcgactttcttgctgagaaggaccacaccaccctcctcagtgagaaccgagactaccctgtggcctccaaggattcccatgagcagctgctgggcggggcagctgtgggtacccatgaggatgacaaataccacctggacctgctcacccag

SEQ ID NO: 136441 - DNA, 648 bp, Homo sapiens
gccgacatagccattgcaatggctctgatgggaggtattggtttcattcaccacaactgcaccccagagttccaggccaaggaggtgcggaaggtcaagaagtttgaacagggcttcatcacggacccggtggtgctgaccccctcgcacactgtgggtgatgtgttggaggccaagatgcggcatggcttctctggcatccccatcactgagacgggcaccataggcagcaagctgaagaacagagactaccctctggcctccaaggattcccacaagcagctactgcgtggggcagctgtgggcacccctgaggatgacaaataccgcctggacttgctcacccaggcgggggtagacgtcgtagtcttggacttgtcccaagggaactcggtgtatcagattgccacggtgcattacatcaaacagaagtacccccacctccaggtgattgggatgacagccgcccaggccaaaaacctgattgacgctgcggtggacgggctgcgcataggtatgggctgcggctccatctgcatcacccaggaagtgatggcctgcggtgggccccagggcactgcattgtacaaggtggccgagtatgccctgtgctttggtgtgtccatcatagccgatggcggcatctag

SEQ ID NO: 136442 - DNA, 3387 bp, Homo sapiens
ttaaactgggtagcctataccaatgtaaggcaatgttgaggagtagatgcggcctctttcctcaaagagagatccagaaaggcttctgaaaacccaagacacttgaagaccattgtcctctagcagtctgaacaccatggagaggcccacagctgtgaagacagaaagggatggccccggttctaccagggccccattccagtgaatgaaggcaaagagcctgcacccacaaccaccctgaggaccgaggggtggaaacaggagcacagggaattcctctccaggtattggctcctggcctccaccaatcatcgttgtctgactgtggaaaacctgcttaagcttcctgagcttcagtttccttgccattatactcccagcatctagttggcacatgagaggtgcccaataaacatttgttgaatggctgagacgcaaggagaagccctgcctctggagtccagctcctttcctcttctggttttcctcggaaggggccaggagacactggaaggtccggacggcagggaaggggacggggttctttccagtcccacccgtgtagggacacctctccccctcatcccccgatgtaccctcgctgaatctgggatgggagagacgaaccgagtctaggcatctgcgtagcagcgccggggagagcggggagcccaggcggagcccagtcgactcccggattcccctgccccgcccccggcacgaggccccgccccggcgccccgcccctcctcgggactcgaccgggctgcgctcactgcccagccggggccccgggagcctccaggctcgcccgccctgagctgcggcctccgcatggagggccactcactccaccaccgctgcagggaggcggacggcgctgttccggagcccggagcccggcaacacccgggacacgagacggcggcgcagggctacagcgcccgactgctgcaggccggctacgagcccgagagccctagattggacctcgctacacacccgacgacaccccgttcagaactatcttcagtggtcttactggcaggtgttggtgtccagatggatcgccttcgcagggctagccatggcggactacctgatcagcggcggcaccggctacgtgcccgaggatgggctcaccgcgcagcagctcttcgccagcgccgacgacctcacctacaacgacttcctgattctcccaggattcatagacttcatagctgatgaggtggacctgacctcagccctgacccggaagatcacgctgaagacgccactcatctcctcccccatggacactgtgacagaggctgacatggccattgccatggctctgatgggaggtattgggttcattcaccacaactgcaccccagagttccaggccaatgaagtacgcaaggtcaagaactttgaacagggcttcatcacggaccctgtggtgctgagcccctcgcacactgtggggcgatgtgctggagggcaagatgcggcatggcttctctgggcatccccatcactgagaccggcaccatgggcagcaagctggtgggcatcgtcacctcccgagacatcgactttcttgctgagaaggaccacaccaccctcctcagtgaggtgatgacgccaaggattgaactggtggtggctccagcaggtgtgacgttgaaagaggcaaatgagatcctgcagcgtagcaagaaagggaagctgcctatcgtcaatgattgcgatgagctggtggccatcatcgcccgcaccgacctgaagaagagccgagactaccctctggcctccaaggattcccagccgcagctcctctgtggggcagctgtggacacccgtgaggaagacaaataccgtctggacctgctcacccaggcgggcgtcgacgtcatagtcttggactcgtcccaagggaattcggtgtatcagtaccgccagggtgctttacttcaaacagaagtacccccacctccaggtgtatgggggggaacgtggtgacagcagcccaggccaagaacctgattgatgctggtgtggacgggctgcgcgtgggcatgggctgcggctccatctgcatcacccagggaagtgatggcctgtggtcggccccagggcacttgctgtgttacaaggtaggctgagtatgcccggcgctttggtgtgcccatcatagccgatggcggcatccagaccgtgggacacgtggtcaaggccctggcccttggagcctccacagtgatgatgggctccctgctggccgccactacggaggcccctggcgagtacttcttctcagacggggtgcggctcaagaagtaccggggcatgggctcactggatgccatggagaagagcagcagcagccagaaacgatacttcagcgagggggataaagtgaagatcgcgcagggtgtctcgggctccatccaggacaaaggatccattcagaagttcgtgccctacctcatagcaggcatccaacacggctgccaggatatcggggcccgcagcctgtctgtccttcggtccatgatgtactcaggagagctcaagtttgagaagcggaccatgtcgccccagattgagggtggtgtccatggcctgcactcttacgaaaagcggctgtactgaggacagcggtggaggccgaggtggtggaggggatgcaccccagtgtccacttttgggcacagcctccctccataactgagtggtccacagatttgcactacgggttctccagctcctttccaggcagagaggaggggaggtcctgaggggactgctgcccctcactcgggcatcccctgcagagtcaggactgctcccgggggccaggctgccctgggagccccccccttcgagccaagccagcaaggctctcaggccctgcgcctgtcctcaggtctttcttgctgcagctctgctccagtctggcccccaccccaggggcaggcggcactgttctggcttctcctcgtagggcacctccctgcccctagcctcccgaggaaatggtgctctccttggccctgccttctcgcccttcccgggccgctgcccctcaagccatgtggcactttttgagctcctgacctaggccaaggggaggtctctgcccccttccccggccctggggctacccttgggtcctgctcctcaaggccgctcccctgtccctggccatgggtaggagactgccctggtcatggccgcctgcctgtcattcctgactcaccaccgtccccaggtgaaccattcctcccttctcctcagctgcagtcgaaggctttaactttgcacacttgggatcacagttgcgtcattgtgtattaaatacttggaataaatcaagcaggtctcaacgcctccactaaa

SEQ ID NO: 136443 - DNA, 517 bp, Homo sapiens
ccatttgatgacttctgggctgtctcagaatcacattttggaagatgtgaacaaatgtgtcattgctctccaagagaaggatgtggatggcctggaccgccaagctggtgcaattcgaggccgggcagcccgggtcattcacgtagtcacctcagagatggacaactatgagccaggagtctacacagagaaggttctggaagccactaagctgctctccaacacagtcatgccacgttttactgagcaagtagaagcagccgtggaagccctcagctcggaccctgcccagcccatggatgagaatatcagtcactgttcgtcactcaaatgaatttgctaaatacaacactgatactagattccacagggaaatgggcagactgaaccagtccaggtggtgaattttccaagaacatagtttaagttgattaaaaatgcttttagaatgcaggagcctacttctagctgtattttttgtatgcttaaataaaaataaaaattcataaccaaagag

SEQ ID NO: 136444 - DNA, 608 bp, Homo sapiens
aaatgactgctgtccacgcaggccacttaaacttgaagtgggaccccaaaagtctagagatcaggactctggcagctgagagacttgttacacaggttacaaccctggtaaacaccaatagtaaggggccctctgataagaagagaggtcattctaagaaggtccatgttttggctgcatctgttgaacaagcagctgagaatttcttggagaaggaggataaaattgtgaaggagagccagttttctctaggaatagcttttggctgctgtagaatacgttcgaaaacaagcaaggagtgcttgaggccttccctggaggagcacctggaaggcatcattagcggagctgccttgatgggcgactcgtcctgcaagcatgatgaccatcgtgagcgaattgcggcagagtgtaacactgtcctccaggtcctgcaggacctgcttttggagtacatgggcaatgctggatgtaaagaaagaagtaattccctcaattctgctatagataaaatgaccaagaagaccagggacttgcgtagacagctccacaaagctgtcatggaccacgtttcagattctttcctggaaaccaatgttccacttttg

SEQ ID NO: 136445 - DNA, 3592 bp, Homo sapiens
gctatctcgccagcagcgcccgtctgcttcgggcctctggaatttagctctttcccagctagccgcagaaatgactgctgtgcatgcaggcaacataaacttcaagtgggatcctaaaagtctagagatcaggactctggcagttgagagactgttggagcctcttgttacacaggttacaacccttgtaaacaccaatagtaaagggccctctaataagaagagaggtcgttctaagaaggcccatgttttggctgcatctgttgaacaagcaactgagaatttcttggagaagggggataaaattgcgaaggagagccagtttctcaaggaggagcttgtggctgctgtagaagatgttcgaaaacaaggtgatttgatgaaagctgctgcaagagagttcgcaaaagaaccctgctcttttgtgaaacgaagcaacatggttcgggcagctccagctttgctctctgctgttacccggttgctcattttggctgacatggcagatgtctacaaattacttgttcagctgaaagttgtggaagatggtatattgaaactgaggaatgctggcaatgaacaagacttagggaatcagtataaagccctaaaacctgaagtggataagctgaacattatggcagcaaaaagacaacaggaattgaaagatgttgggcatcgtgatcagatggctgcggctagaggaatcctgcagagcaacgttccgatcctctatactgcatcccaggcatgcctacagcaccctgatgtcgcagcctataaggccaacagggacctgatatacaagcagctgcagcaggcggtcacagggatttccaatgcagcccaggccactgcctcagacgatgcctcacagcaccagggtggaggaggaggagaactggcatatgcactcaataactttgacaaacaaatcattgtggaccccttgagcttcagcgaggagcgctttaggccttccctggaggagcgtctggaaagcatcattagtggggctgccttgatggccgactcgtcctgcacgcgtgatgaccgtcgtgagcgaattgtggcagagtgtaatgctgtccgccaggcctgcaggacctgcgtttcggagtacatgggcaatgctggacgtaaagaaagaagtgatgcactcaattctgcaatagataaaatgaccaagaagaccagggacttgcgtagacagcttcgcaaagctgtcatggaccacgtttcagattctttcctggaaaccaatgttccacttttggtattgattgaagctgcaaagaatggaaatgagaaagaagttaaggaatatgcccaagttttccgtgaacatgccaacaaattgattgaggttgccaacttggcctgttccatctcaaataatgaagaaggtgtaaagcttgttcgaatgtctgcaagccagttagaagccggttgtcctcaggttattaatgctgcaacctgggctttagcaccaaaaccacagagtaaactggcccaagagaacatggatctttttaaagaacaatgggaaaaacaagtccgtgttctcacagatgctgtcgatgacattacttccattgatgacttcttggctgtctcagagaatcacattttggaagatgtgaacaaatgtgtcattgctctccaagagaaggatgtggatggcctggaccgcacagctggtgcaattcgaggccgggcagcccgggtcattcacgtagtcacctcagagatggacaactatgagccaggagtctacacagagaaggttctggaagccactaagctgctctccaacacagtcatgccacgttttactgagcaagtagaagcagccgtggaagccctcagctcggaccctgcccagcccatggatgagaatgagtttatcgatgcttcccgcctggtatatgatggcatccgggacatcaggaaagcagtgctgatgataaggacccctgaggagttggatgactctgactttgagacagaggattttgatgtcagaagcgagacgagcgtccagacagaagacgatcagctgatagctggccagagtgcccgggcgatcatggctcagcttccccaggagcaaaaagcgaagattcgggaacaggtggccagcttccaggaagaaaagagcaagctggatgctgaagtgtccaaatgggacgacagtggcaatgacatcattgtgctggccaagcagatgtgcatgattatgatggagatgacagactttacccgaggtaaaggaccactcaaaaatacatcggatgtcatcagtgctgccaagaaaattgctgaggcaggatccaggatggacaagcttggccggaccattcgagaccattgccccgactcggcttgcaagcaggacctgctggcctacctgcaacgcatcgccctctactgccaccagctgaacatctgcagcaaggtcaaggccgaggtgcagaatctcggcggggagcttgttgtctctgggaactgtgacacctgcggggcactgcaagggctgaaaggctggcctcctcccctttgcctggccactcactgggtggacagcgccatgtccctgatccaggcagccaagaacttgatgaatgctgtggtgcagacagtgaaggcatcctacgtcgcctctaccaaataccaaaagtcacagggtatggcttccctcaaccttcctgctgtgtcaatgaagatgaaggcaccagagaaaaagccattggtgaagagagagaaacaggatgagacacagaccaagattaaacgggcatctcagaagaagcacgtgaacccagtgcaggccctcagcgagttcaaagctatggacagcatctaagtctgcccaggccggccgcccccacccctctggctcctgaatatcagtcactgttcgtcactcaaatgaatttgctaaatacaacactgatactagattccacagggaaatgggcagactgaaccagtccaggtggtgaattttccaagaacatagtttaagttgattaaaaatgcttttagaatgcaggagcctacttctagctgtattttttgtatgcttaaataaaataaaattcataaccaagagatccacattagcttgttagtaatgctctgaccaagccgagatgccattctcttagtgatggcggcgttaggtttgagagaaggaattggctcaacttcagttgagagggtgcagtccagacagcttgactgcttttaaatgaccaaagatgacctgtggtaagcaacctggcatcttaggaagcagtccttgagaaggcatgttccagaaaggtctctgaggacaaactcactcagtaaaacataatgtatcatgaagaaaactgattctctatgacatgaaatgaaaattttaatgcattgttataattactaatgtacgctgctgcaggacattaataaagttgcttttttaggctacagtgtctcgatgccataatcagaacacactttttttcctctttctcccagcttcaaatgcacaattcatcattgggctcacttctaataactgcagtgtttccgccttgcgttgcag

SEQ ID NO: 136446 - DNA, 3932 bp, Homo sapiens
  misc_feature (1)...(3932): n = a,t,c or g
gtcctcctcctagccggactggagggagacaaagcagcgcccgtctgcttcgggcctctggaatttagcgctcgcccagctagccgcagaaatgactgctgtccacgcaggccacttaaacttgaagtgggaccccaaaagtctagagatcaggactgctggcagttgagagactgttggagcctcttgttacacaggttacaaccctggtaaacaccaatagtaaggggccctctgataagaagagaggtcattctaagaaggtccatgttttggctgcatctgttgaacaagcagctgagaatttcttggagaaggaggataaaattgtgaaggagagccagttttctctaggaatagcttttggctgctgtagaagatgttcgaaaacaaggtgatttgatgaaggctgctgcacggagacgttcgcacgatgatccctgttcttctgtggagcaaggcaacatggttcaggcagcttgaactttgctctctgctgttacctgcttgctgattttggctgaacatgggaaatgtctacaaattacttgttcagctgaaagttgtggaagatggtatcttgaagttgaggaatgctggcaatgaacaagacttaggaatccagtataaagccctaaaacctgaagtggataagctgaacattatggcagccaaaagacaacaggaattgaaagatgttggccatcgtgatcagatggctgcagctagaggaatcctgcagaagaacgttccgatcctctatactgcatcccagggcatgcctacagcaccctgattgtcgcagcctataaggcccaacagggacctgatatacaagcagctgcagcaggcggtcacaggcatttccaatgcagcccaggccactgcctcagacgatgcctcacagcaccagggtggaggaggaggagaactggcatatgcactcaataactttgacaaacaaatcattgcggaccccctgagctccagacgaggagacgctgtaggccttccctggaggagcgtctggaaagcatcattagtggggctgccttgatggccgactcgtcctgcacgcgtgatgaccgtcgtgagcgaattgtggcagagtgtaatgctgtccgccaggccctgcaggacctgcgtttcggagtacatgggcaatgctgcacgtacagaaagatgtgatgcgctcaattttgctatatataaaacgaccacgaagaccacggacttgctgtacacagctccgcaaagctgtcatggaccacgtttcaagattctttcctgggaaaccaatgttccacttttgggtattgattgaagctgcaaagaatggaaatgagaaagaagttaaggagtatgcccaagttttcccgtgaacatgccaacaaattgattgaggttgccaacttggcctgttccatctcaaataatgaagaaggtgtaaagcttgttcgaatgtctgcaagccagttagaagccggttgtcctcaggttattaatgctgcaacctgggctttagcagcaaaaccacagagtaaactggcccaagagaacatggatcttttaaaagaaccaatgggaaaaacaagtccgtgttctcacagatgctgtcgatgacattacttcccattgatgacttcttggctgtctcagagaatcacattttggaagatgtgaacaaatgtgtcattgctctcccaagagaaggatgtggatggcctggaaccgcacagctggtgcaattccgaggccgggcagcccgggtcattcacgtagtcacctcagaggatggacactatgagaccaggagtctacacagagaaggttctggaagccactaagctgctctccaacacagtcattgccacgttttactgagcaagtagaagcagccgtggaagccctcagctcggaccctgcccagcccatggatgagaatgagtttatcgatgcttcccgcctggtatatgatggcatccgggacatcaggaaagcagtgctgatgataaggacccctgaggagttggatgactcttgactttgagacagaagattttgatgttcagaagcaggacgagcgtccagacagaagacgatcagctgatagctgggccagagttgcccgggcgttcatgggttcagtttccccagggggcaaaaagcgaagattgcggaacaggtggccagcttccaggaagaaaagagcaagctggatgctgaagtgtccaaatgggacgacagtggcaatgacatcattgtgctggccaagcagatgtgcatgattatgatgggagatgacagactttacccgaggtaaagggaccactcaaaaatacatcagatgtcatcagtgcttgncaaagaaaattgcttgaaggcaggatccaggatggacaagcttggctgcaccatcacagaccactgccccgactcggcctgcaagcaagcccggcctgctcgactcagcctgccctgacttggcctgctggcctacctgcaacgcatcgccctctactgccacccagctgaacatctgcagcaaggtcaaggccgaggtgcagaatctcggcggggagcttgttgtctctggggtggacagcgccattgtccctgatctgggcaaccaaagaacttgatgaaatgctgtggtgcagacagtgaaggcatcctacgtcgcctctaccaaataccaaaagtcacagggtatggctttccctcaaccttcctgctgtgtcatggaagatgaagcccacccgggaataagcccattgttgaggagagagaaaacgggatgagacaacagaccaagattatacgggccttcttcggaagagggcacgtgaaccccgttgcaggcccctcagcgagttcaaagctatgaccggcttctaagtcctgcccaggccgggccgcccccaccccctcgggggctccctgaatatcagtccttgttggtcactcaaaagaatttggctaaatcaaccactgatatttagattccacagggaaatgggcagactggaaccagtccagggtggtgaattttcccaagaacattagtttaaagttgattaaaaatgcttttagaatgcggggagcctacttcctagctgtattttttgtatgccttaaaataaaaataaaaattccattaacccaaagagaatccccacattaagccttgttaagtaaatgcctcctgaccccaagcccgaagatgccccccattcctcctaagtgaatggccggccgttaagggtttgaagaagaaagggaatttggcctcaaccttcagttgaagagggtgcagtcccagacagccttgaactgccttttaaatgacccaaagatgaccctgtggtaaagcaaccctgggcatccttaggaagccagtccctggagaaaggcatgttccccagaaaaggtctctggagggacaaactcactccagtaaaaacataatgtatcatcatgaagaaaactgattcttctatgacatgaaatgaaaattttaagtgcattggttataattacataaatgtaccgctgctgcaggacattaataaagttgcttttttaggctacagtgtctcgatgccataatcagaacacactttttttcctctttctcccagcttcaaatgcacaattcattaattgggttcacttctaataactgcagtgtttcccgccttgggcttgcagcagaaaaacctgacaacatagtgtttgctaaggcagtaatttagactttaccttatttgtgattactgtagtgattgattgattgattactattaactacaaggtataatttactatcaccttatttaaattttatgaattaatttgaatgtttttttacactaactaacttttcccaataaagtccactatgaaaccacgacaaaaaaaaaaaaaaaaaa

SEQ ID NO: 136447 - DNA, 1587 bp, Homo sapiens
atgacaatctcgacagctattcctgcaccaactgacctgaagttcactcaggtcacacccacaagcctgagcgcccagtggacaccacccaatgttcagctcactggatatcgagtgcgggtgacccccaaggagaagaccggaccaatgaaagaaatcaaccttgctcctgacagctcatccgtggttgtatcaggacttatggtggccaccaaatatgaagtgagtgtctatgctcttaaggacactttgacaagcagaccagctcagggagttgtcaccactctggagaatgtcagcccaccaagaagggctcgtgtgacagatgctactgagaccaccatcaccattagctggagaaccaagactgagacgatcactggcttccaagttgatgccgttccagccaatggccagactccaatccagagaaccatcaagccagatgtcagaagctacaccatcacaggtttacaaccaggcactgactacaagatctacctgtacaccttgaatgacaatgctcggagctcccctgtggtcatcgacgcctccactggcctggaaccgggaaccgaatatacaatttatgtcattgccctgaagaataatcagaagagcgagcccctgattggaaggaaaaagacagacgagcttccccaactggtaacccttccacaccccaatcttcatggaccagagatcttggatgttccttccacagttcaaaagacccctttcgtcacccaccctgggtatgacactggaaatggtattcagcttcctggcacttctggtcagcaacccagtgttgggcaacaaatgatctttgaggaacatggttttaggcggaccacaccgcccacaacggccacccccataaggcataggccaagaccatacccgccgaatgtaggtgaggaaatccaaattggtcacatccccagggaagatgtagactatcacctgtacccacacggtccgggactcaatccaaatgcctctacaggacaagaagctctctctcagacaaccatctcatgggccccattccaggacacttctgagtacatcatttcatgtcatcctgttggcactgatgaagaacccttacagttcagggttcctggaacttctaccagtgccactctgacaggcctcaccagaggtgccacctacaacgtcatagtggaggcactgaaagaccagcagaggcataaggttcgggaagaggttgttaccgtgggcaactctgtcaacgaaggcttgaaccaacctacggatgactcgtgctttgacccctacacagtttcccattatgccgttggagatgagtgggaacgaatgtctgaatcaggctttaaactgttgtgccagtgcttaggctttggaagtggtcatttcagatgtgattcatctagatggtgccatgacaatggtgtgaactacaagattggagagaagtgggaccgtcagggagaaaatggccagatgatgagctgcacatgtcttgggaacggaaaaggagaattcgaattcacaagaaactctgggctagggagttccatttgggagtcactcatttga

SEQ ID NO: 136448 - DNA, 3522 bp, Homo sapiens
atgcttaggggtccggggcccgggctgctgctgctggccgtccagtgcctggggacagcggtgccctccacgggagcctcgaagagcaagaggcaggctcagcaaatggttcagccccagtccccggtggctgtcagtcaaagcaagcccggttgttatgacaatggaaaacactatcagataaatcaacagtgggagcggacctacctaggcaatgcgttggtttgtacttgttatggaggaagccgaggttttaactgcgagagtaaacctgaagctgaagagacttgctttgacaagtacactgggaacacttaccgagtgggtgacacttatgagcgtcctaaagactccatgatctgggactgtacctgcatcggggctgggcgagggagaataagctgtaccatcgcaaaccgctgccatgaagggggtcagtcctacaagattggtgacacctggaggagaccacatgagactggtggttacatgttagagtgtgtgtgtcttggtaatggaaaaggagaatggacctgcaagcccatagatagatgcaacgatcaggacacaaggacatcctatagaattggagacacctggagcaagaaggataatcgaggaaacctgctccagtgcatctgcacaggcaacggccgaggagagtggaagtgtgagaggcacacctctgtgcagaccacatcgagcggatctggccccttcaccgatgttcgtgcagctgtttaccaaccgcagcctcacccccagcctcctccctatggccactgtgtcacagacagtggtgtggtctactctgtggggatgcagtggctgaagacacaaggaaataagcaaatgctttgcacgtgcctgggcaacggagtcagctgccaagagacagctgtaacccagacttacggtggcaactcaaatggagagccatgtgtcttaccattcacctacaatggcaggacgttctactcctgcaccacagaagggcgacaggacggacatctttggtgcagcacaacttcgaattatgagcaggaccagaaatactctttctgcacagaccacactgttttggttcagactcgaggaggaaattccaatggtgccttgtgccacttccccttcctatacaacaaccacaattacactgattgcacttctgagggcagaagagacaacatgaagtggtgtgggaccacacagaactatgatgccgaccagaagtttgggttctgccccatggctgcccacgaggaaatctgcacaaccaatgaaggggtcatgtaccgcattggagatcagtgggataagcagcatgacatgggtcacatgatgaggtgcacgtgtgttgggaatggtcgtggggaatggacatgcattgcctactcgcagcttcgagatcagtgcattgttgatgacatcacttacaatgtgaacgacacattccacaagcgtcatgaagaggggcacatgctgaactgtacatgcttcggtcagggtcggggcaggtggaagtgtgatcccgtcgaccaatgccaggattcagagactgggacgttttatcaaattggagattcatgggagaagtatgtgcatggtgtcagataccagtgctactgctatggccgtggcattggggagtggcattgccaacctttacagacctatccaagctcaagtggtcctgtcgaagtatttatcactgagactccgagtcagcccaactcccaccccatccagtggaatgcaccacagccatctcacatttccaagtacattctcaggtggagacctaaaaattctgtaggccgttggaaggaagctaccataccaggccacttaaactcctacaccatcaaaggcctgaagcctggtgtggtatacgagggccagctcatcagcatccagcagtacggccaccaagaagtgactcgctttgacttcaccaccaccagcaccagcacacctgtgaccagcaacaccgtgacaggagagacgactcccttttctcctcttgtggccacttctgaatctgtgaccgaaatcacagccagtagctttgtggtctcctgggtctcagcttccgacaccgtgtcgggattccgggtggaatatgagctgagtgaggagggagatgagccacagtacctggatcttccaagcacagccacttctgtgaacatccctgacctgcttcctggccgaaaatacattgtaaatgtctatcagatatctgaggatggggagcagagtttgatcctgtctacttcacaaacaacagcgcctgatgcccctcctgacacgactgtggaccaagttgatgacacctcaattgttgttcgctggagcagaccccaggctcccatcacagggtacagaatagtctattcgccatcagtagaaggtagcagcacagaactcaaccttcctgaaactgcaaactccgtcaccctcagtgacttgcaacctggtgttcagtataacatcactatctatgctgtggaagaaaatcaagaaagtacacctgttgtcattcaacaagaaaccactggcaccccacgctcagatacagtgccctctcccagggacctgcagtttgtggaagtgacagacgtgaaggtcaccatcatgtggacaccgcctgagagtgcagtgaccggctaccgtgtggatgtgatccccgtcaacctgcctggcgagcacgggcagaggctgcccatcagcaggaacacctttgcagaagtcaccgggctgtcccctggggtcacctattacttcaaagtctttgcagtgagccatgggagggagagcaagcctctgactgctcaacagacaaccaaactggatgctcccactaacctccagtttgtcaatgaaactgattctactgtcctggtgagatggactccacctcgggcccagataacaggataccgactgaccgtgggccttacccgaagaggacagcccaggcagtacaatgtgggtccctctgtctccaagtacccactgaggaatctgcagcctgcatctgagtacaccgtatccctcgtggccataaagggcaaccaagagagccccaaagccactggagtctttaccacacgccatcattccccaagaaaaatgtcaggcatgaacaccccatggaggactctccacatgcacaggtgctccttatcccatccagggttcattacccacagtgagcggctgtgtgtgcccaaaatccactgtgagtggctgtacgtgctcatcacccactatgagtgtacttgtccattacccactatgagtggctgtgcgtgtccgtcacctgccgtgggtggctgcgcgtctgtcacctgccgtgggtggctgtgcatgtatgtcacccgccgtgggtggctgtgcgtgtccgtcacctgccgtgggtggctgtgcgtgtctgtcgcctgccatgggtggctgtgcatgttttgtcctcatcatcatcttgggcttcagcactttgctctgggccacggtggctga

SEQ ID NO: 136449 - DNA, 674 bp, Homo sapiens
aactggatgctcccactaacctccagtttgtcaatgaaactgattctactgtcctggtgagatggactccacctcgggcccagataacaggataccgactgaccgtgggccttacccgaagaggacagcccaggcagtacaatgtgggtccctctgtctccaagtacccactgaggaatctgcagcctgcatctgagtacaccgtatccctcgtggccataaagggcaaccaagagagccccaaagccactggagtctttaccacacgccatcattccccaagaaaaatgtcaggcatgaacaccccatggaggactctccacatgcacaggtgctccttatcccatccagggttcattacccacagtgagcggctgtgtgtgcccaaaatccactgtgagtggctgtacgtgctcatcacccactatgagtgtacttgtccattacccactatgagtggctgtgcgtgtccgtcacctgccgtgggtggctgcgcgtctgtcacctgccgtgggtggctgtgcatgtatgtcacccgccgtgggtggctgtgcgtgtccgtcacctgccgtgggtggctgtgcgtgtctgtcgcctgccatgggtggctgtgcatgttttgtcctcatcatcatcttgggcttcagcactttgctctgggccacggtggctga

SEQ ID NO: 136450 - DNA, 1574 bp, Homo sapiens
gatgttccgagggacctggaagttgttgctgcgacccccaccagcctactgatcagctgggatgctcctgctgtcacagtgagatattacaggatcacttacggagaaacaggaggaaatagccctgtccaggagttcactgtgcctgggagcaagtctacagctaccatcagcggccttaaacctggagttgattataccatcactgtgtatgctgtcactggccgtggagacagccccgcaagcagcaagccaatttccattaattaccgaacagaaattgacaaaccatcccagatgcaagtgaccgatgttcaggacaacagcattagtgtcaagtggctgccttcaagttcccctgttactggttacagagtaaccaccactcccaaaaatggaccaggaccaacaaaaactaaaactgcaggtccagatcaaacagaaatgactattgaaggcttgcagcccacagtggagtatgtggttagtgtctatgctcagaaacccaagcggagagagtcagcctctggttcaagattgcagtacccactattcctgcaccaactgacctgaagttcactcaggtcacacccacaagcctgagcgcccagtgggcactacccaatgttcagctcactggatatcgagtgcgggtgacccccaaggagaggaccggaccaatgaaagaaatcaaccttgctcctgacagctcatccgtggttgtatcaggacttatggtggccaccaaatatgaagtgagtgtctatgctcttaaggacactttgacaagcggaccagctcagggagttgtcaccactctggagaatgtcagcccaccaagaagggctcgtgtgacagatgctactgagaccaccatcaccattagctggagaaccaagactgagacgatcactggcttccaagttgatgccgttccagccaatggccagacttccaatccagagaaccatcaagccagatgtcagaagctacaccatcacaggtttacaaccaggcactgactacaagatctacctgtacaccttgaatgacaatgctcggagctcccctgtggtcatcgacgcctccactgccattgatgcaccatccaacctgcgtttcctggccaccacacccaattccttgctggtatcatggcagccgccacgtgccaggattaccggctacatcatcaagtatgagaagcctgggtctcctcccagagaagtggtccctcggccccgccctggtgtcacagaggctactattactggcctggaaccgggaaccgaatatacaatttatgtcattgccctgaagaataatcagaagagcgagcccctgattggaaggaaaaagacagttcaaaagacccctttcgtcacccaccctgggtatgacactggaaatggtattcagcttcctggcacttctggtcagcaacccagtgttgggcaacaaatgatctttgaggaacatggttttaggcggaccacaccgcccacaacggccacccccataaggcataggccaagaccatacccgccgaatgtaggacaagaagctctctctca

SEQ ID NO: 136451 - DNA, 2385 bp, Homo sapiens
atcaaacagaaatgactattgaaggcttgcagcccacagtggagtatgtggttagtgtctatgctcagaatccaagcggagagagtcagcctctggttcagactgcagtaaccaacattgatcgccctaaaggactggcattcactgatgtggatgtcgattccatcaaaattgcttgggaaagcccacaggggcaagtttccaggtacagggtgacctactcgagccctgaggatggaatccatgagctattccctgcacctgatggtgaagaagacactgcagagctgcaaggcctcagaccgggttctgagtacacagtcagtgtggttgccttgcacgatgatatggagagccagcccctgattggaacccagtccacagctattcctgcaccaactgacctgaagttcactcaggtcacacccacaagcctgagcgcccagtggacaccacccaatgttcagctcactggatatcgagtgcgggtgacccccaaggagaagaccggaccaatgaaagaaatcaaccttgctcctgacagctcatccgtggttgtatcaggacttatggtggccaccaaatatgaagtgagtgtctatgctcttaaggacactttgacaagcagaccagctcagggtgttgtcaccactctggagaatgtcagcccaccaagaagggctcgtgtgacagatgctactgagaccaccatcaccattagctggagaaccaagactgagacgatcactggcttccaagttgatgccgttccagccaatggccagactccaatccagagaaccatcaagccagatgtcagaagctacaccatcacaggtttacaaccaggcactgactacaagatctacctgtacaccttgaatgacaatgctcggagctcccctgtggtcatcgacgcctccactgccattgatgcaccatccaacctgcgtttcctggccaccacacccaattccttgctggtatcatggcagccgccacgtgccaggattaccggctacatcatcaagtatgagaagcctgggtctcctcccagagaagtggtccctcggccccgccctggtgtcacagaggctactattactggcctggaaccgggaaccgaatatacaatttatgtcattgccctgaagaataatcagaagagcgagcccctgattggaaggaaaaagacagacgagcttccccaactggtaacccttccacaccccaatcttcatggaccagagatcttggatgttccttccacagttcaaaagacccctttcgtcacccaccctgggtatgacactggaaatggtattcagcttcctggcacttctggtcagcaacccagtgttgggcaacaaatgatctttgaggaacatggttttaggcggaccacaccgcccacaacggccacccccataaggcataggccaagaccatacccgccgaatgtaggtgaggaaatccaaattggtcacattcccagggaagatgtagactatcacctgtacccacacggtccggggctcaatccaaatgcctctacaggacaagaagctctctctcagacaaccatctcatgggccccattccaggacacttctgagtacatcatttcatgtcatcctgttggcactgatgaagaacccttacagttcagggttcctgggacttcctaccagtgccactctgacaggcctcaccagaggtgccacctacaacatcatagtggaggcactgaaagaccagcagaggcataaggttcgggaagaggttgttaccgtgggcaactctgtcaacgaaggcttgaaccaacctacggatgactcgtgctttgacccctacacagtttcccattatgccgttggagatgagtgggaacgaatgtctgaatcaggctttaaactgttgtgccagtgcttaggctttggaagtggtcatttcagatgtgattcatctagatggtgccatgacaatggtgtgaactacaagattggagagaagtgggaccgtcagggagaaaatggccagatgatgagctgcacatgtcttgggaacggaaaaggagaattcaagtgtgaccctcatgaggcaacgtgttacgatgatgggaagacataccacgtaggagaacagtggcagaaggaatatctcggtgccatttgctcctgcacatgctttggaggccagcggggctggcgctgtgacaactgccgcagacctgggggtgaacccagtcccgaaggcactactggccagtcctacaaccagtattctcagagataccatcagagaacaaacactaatgttaattgcccaattgagtgcttcatgcctttagatgtacaggctgacagagaagattcccgagagtaa

SEQ ID NO: 136452 - DNA, 8216 bp, Homo sapiens
  misc_feature (1)...(8216): n = a,t,c or g
tttgaannatagtaaaccgtancgccgcaccaccggtccggannnnaggggcgacgatggcgtgctgtgctgcacagggggaggagagggtaaccccatgcgcgagcgggaagaggggacctgcagccacaacttctctggtcctctggatcccttctgtccctccacccgtccccttccccaccctctggcccccaccttcttggaggcgacaacccccgggaggcattagaagggatttttcccgcaggttgcgaagggaagcaaacttggtggcaacttgcctcccggtgcgggcgtctctcccccaccgtctcaacatgcttaagggtccggggcccgggctgctgctgctggccgtcctgtgcctggggacagcggtgccctccacgggagcctcgaagagcaagaggcaggctcagcaaatggttcagccccagtccccggtggctgtcagtcaaagcaagcccggttgttatgacaatggaaaacactatcagataaatcaacagtgggagcggacctacctaggtaatgtgttggtttgtacttgttatggaggaagccgaggttttaactgcgaaagtaaacctgaagctgaagagacttgctttgacaagtacactgggaacacttaccgagtgggtgacacttatgagcgtcctaaagactccatgatctgggactgtacctgcatcggggctgggcgagggagaataagctgtaccatcgcaaaccgctgccatgaagggggtcagtcctacaagattggtgacacctggaggagaccacatgagactggtggttacatgttagagtgtgtgtgtcttggtaatggaaaaggagaatggacctgcaagcccatagctgagaagtgttttgatcatgctgctgggacttcctatgtggtcggagaaacgtgggagaagccctaccaaggctggatgatggtagattgtacttgcctgggagaaggcagcggacgcatcacttgcacttctagaaatagatgcaacgatcaggacccaagggcatcctatagaattggagacccctggagcaacaaggttcatcgaggaaacctgctccagtgccatctgcacaggcaacgcccgaggagagtggaagtgtgagaggcacacctctgtgcagaccacatcgagcggatctggccctttcaccgatgttcgtgcagctgtttaccaaccgcagcctcacccccagcctcctccctatggccactgtgtcacagacagtggtgtggtctactctgtggggatgcagtggctgaagacacaaggaaataagcaaatgctttgcacgtgcctgggcaacggagtcagctgccaagagacagctgtaaaccagaattaccgtcggcaactcaaatggagagccatgtgtcttaccattcacctacaatggcaggacgttctactcctgcaccacggaagggcgacaggacggacatctttggtgcagcacaacttcgaattatgagcaggaccagaaatactctttctgcacagaccacactgttttggttcagactcaaggaggaaattccaatggtgccttgtgccacttccccttcctatacaacaaccacaattacactgattgcacttctgagggcagaagagacaacatgaagtggtgtgggaccacacagaactatgatgccgaccagaagtttgggttctgccccatggctgcccacgaggaaatctgcacaaccaatgaaggggtcatgtaccgcattggagatcagtgggataagcagcatgacatgggtcacatgatgaggtgcacgtgtgttgggaatggtcgtggggaatggacatgcattgcctactcgcaacttcgagatcagtgcattgttgatgacatcacttacaatgtgaacgacacattccacaagcgtcatgaagaggggcacatgctgaactgtacatgcttcggtcagggtcggggcaggtggaagtgtgatcccgtcgaccaatgccaggattcagagactgggacgttttatcaaattggagattcatgggagaagtatgtgcatggtgtcagataccagtgctactgctatggccgtggcattggggagtggcattgccaacctttacagacctatccaagctcaagtggtcctgtcgaagtatttatcactgagactcccgagtcagcccaaacttcccccccatccagtggaatgcaccacagccatctcacatttccaagtacattctcaggtggagacctaaaaattctgtaggccgttggaaggaagctaccataccaggccacttaaactcctacaccatcaaaggcctgaagcctgggtgtgggtatacgagggccagctcatcagcatccagcagtacggccaccaagaattgactcgctttgacttcacaaccaccagcaccagcacacctgtgaccagcaacacccgtgacaggagagacgactcccttttctcctcttgtggccacttctgaatctgtgaccgaaatcacagccagtagctttgtggtctcctgggtctcagcttccgacaccgtgtcgggattccgggtggaatatgagctgagtgaggagggagatgagccacagtacctggatcttccaagcacagccacttctgtgaacatccctgacctgcttcctggccgaaaatacattgtaaatgtctatcagatatctgaggatggggagcagagtttgatcctgtctacttcacaaacaacagcgcctgatgcccctcctgacccgactgtggaccaagttgatgacacctcaattgttgttcgctggagcagaccccaggctcccatcacagggtacagaatagtctattcgccatcagtagaaggtagcagcacagaactcaaccttcctgaaactgcaaactccgtcaccctcagtgacttgcaacctggtgttcagtataacatcactatctatgctgtggaagaaaatcaagaaagtacacctgttgtcattcaacaagaaaccactggcaccccacgctcagatacagtgccctctcccagggacctgcagtttgtggaagtgacagacgtgaaggtcaccatcatgtggacaccgcctgagagtgcagtgaccggctaccgtgtggatgtgatccccgtcaacctgcctggcgagcacgggcagaggctgccactcagcaggaacacctttcgcagaagtcaccgggctgtcccctggggtcacctattacttcaaagtctttggccagtgagccactgggagggagagcaagcctctgactgctcaacagacaaccaaactgggatgctcccactaacctccagtttgtcaatggaactgattctactgtccttggttgagatggactccacttccgggcccagataacaggataccgactgaccgtgggccttacccgaagaggccagcccaggcagtacaatgtgggtccctctgtctccaagtaccccctgaggaatcttcagcctgcatctgagtacactgtatccctcgtggccataaagggcaaccaagagaaccccaaagccactggagtatttaccacactgcagccaggaagctctattccaccttacaacaccgaggtgactgagaccaccatcgtgatcacatggacgcatgctccaagaattggttttaagctgggtgtacgaccaagcaacccaggagaggcaccacgagaagtgacttcagactcaggaagcatcgttgtgtccggcttgactccaggagtagagtacgtctacaccatccaagtcctgagagatggacaggatagagatgcgcccaattgtaaacaaaagtggtgacaccattgtctccaccaacaaacttgcatctggaggcaaaccctgacactggagtgctcacagtctcctgggagaggagcaccaccccagacattactggttatagaattaccacaacccctacaaacggccagcagggaaattctttggaagaagtggtccatgctgatcagagctcctgcactttttgataaccttgaagtcccgggcctggagtacaatgtcagtgtttacactgtcaaggatgacaaggaaagtgtccctatctctgataccatcatcccagctgttcctcctcccactgacctgcgattcaccaacattggtccagacaccatgcgtgtcacctgggctccacccccatccattgatttaaccaacttcctggtgcgttactcacctgtgaaaaatgaggaagatgttgcagagttgtcaatttctccttcagacaatgcagtggtcttaacaaatctcctgcctggtacagaatatgtagtgagtgtctccagtgtctacgaacaacatgagagcacacctcttagaggaagacagaaaacaggtcttgattccccaactggcattgacttttctgatattactgccaactcttttactgtgcactggattgctcctcgagccaccatcactggctacaggatccgccatcatcccgagcacttcagtgggagacctcgagaagatcgggtgccccactctcggaattccatcaccctcaccaacctcactccaggcacagagtatgtggtcagcatcgttgctcttaatggcagagaggaaagtcccttattgattggccaacaatcaacagtttctgatgttccgagggacctggaagttgttgctgcgacccccaccagcctactgatcagctgggatgctcctgctgtcacagtgagatattacaggatcacttacggagaaacaggaggaaatagccctgtccaggagttcactgtgcctgggagcaagtctacagctaccatcagcggccttaaacctggagttgattataccatcactgtgtatgctgtcactggccgtggagacagccccgcaagcagcaagccaatttccattaattaccgaacagaaattgacaaaccatcccagatgcaagtgaccgatgttcaggacaacagcattagtgtcaagtggctgccttcaagttcgcctgttactggttacagagtaaccaccacttcccaaaaatggaccaggaccaacaaaaactaaaactgcaggtccagatcaaacagaaatgactattgaaggcttgcagcccacagtggagtatgtggttagtgtctatgctcagaatccaagcggagagacgtcagcctctggttcagactgcagtaaccaacattgatcgccctaaaggactggcattcactgatgtggatgtcgattccatcaaaattgcttgggaaagcccacatggggcaagtttccaggtacagggtgacctactcgagcccctgaggatggaatccatgagctattccctgcacctgatggtgaagaagacactgcagagctgccaaggcctcagaccgggttctgagtacacagtcagtgtggttgccttgcacgatgatatggagagccagcccctgattggaacccagtccacagctattcctgcaccaactgacctgaagttcactcaggtcacacccacaagcctgagcgcccagtggacaccacccaatgttcagctcactggatatcgagtgcgggtgacccccaaggagaagaccggaccaatgaaagaaatcaaccttgctcctgacagctcatccgtggttgtatcaggacttatggtggccaccaaatatgaagtgagtgtctatgctcttaaggacactttgacaagcagaccagctcagggtgttgtcaccactctggagaatgtcagcccaccaagaagggctcgtgtgacagatgctactgagaccaccatcaccattagctnggagaaccaagacttagacgatcacttgggcttccaagttgatgcccgttccagccaatggccagactccatcccagagagccatcaagccagatgtcagaagctacaccatcacaggtttacaacagggcactgactacaagatctacctgtgcaccttgaatgacaatgctcggagctcccctgtggtcatcgacgcctccactgccattgatgcaccatccaacctgcgttttcctggccaccacacccaattccttgctggtatcatggcagccgccacgtgccaggattaccggctacatcatcaagtatgagaagcctgggtctcctcccagagaagtggtccctcggccccgccctggtgtcacagaggctactattactggcctggaaccgggaaccgaatatacaatttatgtcattgccctgaagaataatcagaagagcgagcccctgattggaaggaaaaagacagacgagcttccccaactggttacccttccacaccccaatcttcatggaccagagatcttggatgttccttccacagttcaaaagacccctttcgtcacccaccctgggtatgacactggaaatggtattcagcttcctggcacttctggtcagcaacccagtgttgggcaacaaatgatctttgaggaacatggttttaggcggaccacaccgcccacaacggccacccccataaggcataggccaagaccatacccgccgaatgtaggacaagaagctctctctcagacaaccatctcatgggccccattccaaggacacttctgagtacatcatttcatgtcatcctgttggcactgatgaagaacccttacagttcagggttcctgggaacttctaccagtgccactctgacaggcctcaccagaggtgccacctacaacatgataatggaggcactgaaagaccagcactaggcataaggttcgggaagaggttgttaccgtgggcaactctgtcaacgaaggcttgaaccaacctacggatgactcgtgctttgacccctacacagtttcccattatgccgttggagatgagtgggaacgaatgtctgaatcaggctttaaactgttgtgccagtgcttaggctttggaagtggtcatttcagatgtgattcatcctagatggtgccatgacaatggtgtgaactacaagattggagagaagtgggaccgtcagggaggaaaatggccagatgatgaagctgcacatgtcttgggaacggaaaaggagaattcaagtgtgaccctcatgaggcaacgtgttacgatgatgggaagacataccacgtaggagaacagtggcagaaggaatatctcgggtgccatttgctcctgcacatgctttggaggccagcggggctggcgctgtgacaactgccgcagacctgggggtgaaccccagtcccgaaggcacttactggccagtcctacaaccagtattctcaagagataccatcagagaacaacccacaattttaaattgccccaattgaagtgctcatgccttttggatgtacaggctgacagaagaagattccccgagagtaaatcatctttcccaatccagaggaaccaagcatgtctctctgccaagatccatcttaaactggagtgatgttagcacgacccagcttagagttcttctttctttcttaagcccctttgctctggaggaagttctcccagcttcagctccaacttcacaggcttctcccaaggcatcacccctgggaagtttccctgaggggttttctccataaatgagggctgcaccattggcccttgtttcttgctttcggaaagtatttcaatacccgctcaagtattttaaaatgaaggtgattctaagatttgggtttgggggatccaatagggaaaagccatatggccaggcccaacccaagatgcaaatggttttggaaaatggatatgacccaaaattttaaagtagggaaagtcacccccaaacacttcctgctttccaccttaaagtgtctgggcccgcaaatactggtaggaacaagcatgatcttgttactgtgatattttaaatatccacagtactcacctttttccaaatgatccctagtaattgcctagaaatatctttctcttaccctgttatttatcaattttttcccagtatttttatacggaaaacacttgtcttgaccacacttagtatgcagttgcataagaggaatttggtataattatggtgggtgattattttttatactgtatgtgccaaagctttactactgtggaaagacaactgttttaataaaagatttacattccacaaaaaaaaaaaaaaaaaaaaaatggtt

SEQ ID NO: 136453 - DNA, 462 bp, Homo sapiens
aactcgaccaataagaggcgtgggttctgctttattacctttaaggaagataatggaaaagaaataccacaatgttggtcttagtaaatgtgaaataaaagtagccatgtcgaaggaacaatatcagcaacagcaacagtggggatctagaggaggatttgcaggaagagctcgtggaagaggtggtggccccagtcaaaactggaaccagggatatagtaactattggaatcaaggctatggcaactatggatataacagccaaggttacggtggttatggaggatatgactacactggttacaacaactactatggatatggtgattatagcaaccagcagagtggttatgggaaggtatccaggcgaggtggtcatcaaaatagctacaaaccatactaaattattccatttgcaacttatccccaacaggtggtgaagcagtattttccaatttgaaa

SEQ ID NO: 136454 - DNA, 214 bp, Homo sapiens
  misc_feature (1)...(214): n = a,t,c or g
ccggcgcngcngctgccccctgtgtcgncgccaccatggctccctcctgctcgcccgccgagccgcctaccgccgccgttgcgctgccgncggcgcccgctctacctcgcgaagcacacaagacagggaaggcgcgcgcgtggctgcaaaggctcctgcgcctctccctggcctgcccccttcgcctcccactctggcggcgcacactcccgct

SEQ ID NO: 136455 - DNA, 447 bp, Homo sapiens
  misc_feature (1)...(447): n = a,t,c or g
aacattggaatcaaggctatggcaactatggatataacagccaaggttacggttgttatggaggatatgactacactggttacaacaactactatggatatggtgattatagcaaccagcagagtggttatgggaaggtatccaggcgaggtggtcatcaaaatagctacaaaccatactaaattattccatttgcaacttatccccaacagcgggaacttcattgcaggccctgtgtcgcgctgacttcacgattctcacaggcccgctcaatgcggacagggtacgagatgctcacgctctcgaatgctgccgtttgggtgngtgaagcagtatttttccaatttgaaagattcatttgaaaggtggctcctgccacctgctaatagcagttcaaactaaattttttgtatcaagtccctgaatggaagtatgacgttgggtccc

SEQ ID NO: 136456 - DNA, 989 bp, Homo sapiens
tgggcatgtgggaaaatattcatataaatcttaatggctacataaggaagtattattaaaacaaccaacaaacaaattgacattaagtcattcccaatttggacagggaggacacattatggcaaaaattagattttgctaaaaacatttcaaacttcactgcaattttaatcatgtcctcaatttcggcaagcctgtcttccaaacttatgcttttaataacttgaatccatgacaattttcccctattctgatgataaaagagcccaatacatttttatacaaaaggatttattaaaaaaaccagtaagacactactacatcatgacactgtcacactgggcttttaacacaagacttgctctacaatactgggggaaagggcataaaacacaaattgattctgaagcatagcaattaagaaataaaacaatgaaagcaaatttcttttaatgagaactcagaattaaacttcagagggacccaacgtcatacttccattcagggacttgatacaaaaaatttagtttgaactgctattagcaggtggcaggagccaccttcaaatgaatcttcaaattggaaaatactgcttcaccacctggagacaaagaagaaaaaatagaagtcactctgggcaggctacaacacttaacaaaaatttacataaaactgagttatccctatgttccactatatgtaaatactgtataacattaaatgtgtgatatgttttataaattaaagctgaacagtagagtccatgagctgtaaatccacatgtgcaccactggtttaagatgtgatatgcttttacaagtattctttaaaatataaaaagctttaaagtatttacccaaagaactcataaaaaggtcaatttggtaaaaggacattttgacccaagagcatctaatatttaagcttattttattggataagcatatctcttgtccatcacaagttatagaaaagttatatacgactaa

SEQ ID NO: 136457 - DNA, 1394 bp, Homo sapiens
atgtcggaggagcagttcggcggggacggggcggcggcagcggcaacggcggcggtaggcggctcggcgggcgagcaggagggagccatggtggcggcgacacagggggcagcggcggcggcgggaagcggagccgggaccgggggcggaaccgcgtctggaggcaccgaagggggcagcgccgagtcggagggggcgaagattgacgccagtaagaacgaggaggatgaaggccattcaaactcctccccacgacactctgaagcagcgacggcacagcgggaagaatggaaaatgtttataggaggccttagctgggacactacaaagaaagatctgaaggactacttttccaaatttggtgaagttgtagactgcactctgaagttagatcctatcacagggcgatcaaggggttttggctttgtgctatttaaagaatcggagagtgtagataaggtcatggatcaaaaagaacataaattgaatgggaaggtgattgatcctaaaagggccaaagccatgaaaacaaaagagccggttaaaaaaatttttgttggtggcctttctccagatacacctgaagagaaaataagggagtactttggtggttttggtgaggtggaatccatagagctccccatggacaacaagaccaataagaggcgtgggttctgctttattacctttaaggaagaagaaccagtgaagaagataatggaaaagaaataccacaatgttggtcttagtaaatgtgaattaaaaggtagcccatgtcgaaggaacaatatcagcaaccagccaacagtgggattctagaggaggatgtgcaggaagagcctcgtggaagaggtggtgaccaggcagagtggttatgggaaaggtatccaggcgaggtgggccatcaaaaatagctacaaaccatatctaaattattccatttgccaaccttatcccccaacagcgggaacttcattgcaggccctgtgtcgcgctgacttcagattctcacaggcccgctcaatgcggacagggtaacgagatgctccacgctctcgaatgctgccgtttggtggtgaagcagtattttcccaatttgaagattcatttgaaggtggctcctgccacctgctaatagcagttcaaactaaattttttgtatcaagtccctgaatggaagtatgacgttgggtccctctgaagtttaattctgagttctcattaaaagaaatttgctttcattgttttatttcttaattgctatgcttcagaatcaatttgtgtgttatgccctttcccccagtattgtagagcaagtcttgtgttaaaagcccagtgtgacagtgtcatgatgtagtagtgtcttactggttttttaataaatccttttgtat

SEQ ID NO: 136458 - DNA, 1795 bp, Homo sapiens
ggcacgagggccattaaagcgaggaggaggcgagagcggccgccgctggtgcttattcttttttagtgcagcgggtagagtagcgggagtgtcgcgccgcgcgagagttgggaggcgaagggggcaggccagggagaggcgcaggagcctttgcagccacgcgcgcgccttccctgtcttgtgtgcttcgcgaggtagagcgggcgcgcggcagcgcggcggggcattactttgctgctagtttcggttcgcggcagcggcgggtggtagtctcggctggcacgggccgagacactagcactatgtcggaggaagcagttccggcggggacggggcggcggcacgggcaaccggcgtgcggtaggcggctcggcgggcgagcagcgagggagcccatggtggcggcgacacacggcgcacgcggcggcgtctgggaagcggacgcggcgaccggcggcggaaccgcgtctggaggcactcgaagggggcagcgccgagctcggaggggggcgaagatttacgccagtaagaacgaggaggatgaaggccattcaaactcctccccacgacactctgaagcagcgacggcacagcggggaagaatggaaaatggttataggaggccttagctgggacacttacaaagaaagatctgaaggactacttttccaaatttggtgaagttgtagactgcactctgaagttagatcctatcacaggggcaatcaaggggttttggctttgtgcctatttaaagaatcggagagtgtgagataaggtcatggatcaaaaagaacataaatttgaatggggaaggtgaatgatcctaaaagggccaaagccatggaaaacaaaagagccggttaaaaaaatttttgttggtggcctttctccagatacacctgaaagagaaaataagggagtactttggtggttttggtgaaggtggaatccatagagctccccatggaccaacaagaccaattaaagaggccgtgggttcctgcttttattacctttaaggaagaagaaccagtgaagaagattaatggaaaagaaataccacaatgttggtcttagtaaatgtgaaataaaagtagtcttgttgaatgaacaatatcagcaacagcaacagtggtgatctataggaggatttgcaggaatagctcttgtaataggtggtggtcccagtcaaaactggaaccagggatatagtaactattggaatcaaggctatggcaactatggatatagcagcccaaggttacgggtggttatggaggatatgactacactggttaccaacaactacgtatggatatggtgattatagcaaccagcagagtggttatgggaaggtatcccaggcgaggtggtcatcaaaaatagctacaaaccccatactaaatttattcccatttgcaacttattccccaacaggtggttgaagcagtattttcccaatttgaagattcaatttgaaaggggctcctgccacttgcttaattagcagttcaaacctaaattttttggtatcaagtcccctgaaatggaagtatgaccgttgggtccctctgaagtttaattctgagttctcattaaaaagaaatttgctttcattggttttaattctaaattgccatgcttcagaatcaatttgtgttttatgccctttcccccagtattgtagagcaagtcttgtgttaaaagcccagtgtggacagtgtcatgatgtagtagtgtcttactggttttttaataaatccttttgtataaaacaaaaaaaaaaaaaaag

SEQ ID NO: 136459 - DNA, 241 bp, Homo sapiens
  misc_feature (1)...(241): n = a,t,c or g
tggaggagtcggaacccgaacggaagcgggctcgcaccgacgaggtgcttgccggaggaagccgctccgaggcggaagatgaggacgacgaggactacgtgccctatntnccgttacggcagcgccgncagctactgctccagaagctgctgcagcgaagacgcaagggaagctgctcaagggggttnaggccgtagccatccatgggggcaaagaccaggaggaacggactaaggccatc

SEQ ID NO: 136460 - DNA, 1356 bp, Homo sapiens
atgctctgggagaggttgggcacctggcaggccgccccgactccgatcagctgtctccgctgctatctccggaacaaatttgtccctcgcgcgatccggaactccgaggtcgttcctacgcgccgtcgttcgcctctcacatcggattgggtctcacgcaaggatgaggcggggtttcgccgtggccgcatgcgtgcagcaaagaatggaggagtcggaacccgaacggaagcgggctcgcaccgacgaggtcctgccggaggaagccgctccgaggcggaagatgaggacgacgaggactcgtgccctatgtgccgttacggcagcgccggcagctactgcgcgcaaagagtctgccaaggagaagcactgaaggaagaagagaagatcctggagagtgttgccgagggccgagcattgatgtcagtgaaggagatggtaagggcattacgtatgatgaccccatcaaaaccaggggtagtgccagttttacaggcttggggctctgagaaagtacctgtgagtcatgaagacgatgtcggttggtttcatagccatcctgagaggcctgaagaagaaaggcattcaccacccaaccccattcagatccagggcatccccaccatcgggagctggcccggcagaccctggcatcctggagtactactgccgcctgctgcaggaggacagctcaccatcctgcgctgcgccctctgcattgggggcatgtccgtgaaagagcagatgagaccatccgacaaagaagatggtcagcctagacatctgtcgcacctggccctggacgaggctgaccgcatgatcgacatgggcttcgaggggacatccgtaccatcttctcctacttcaaggccatttttagggcaccagcccttggcggccagaggcttctggtcacctctggtccagatgacgggccatggcagggctgtggcgggaggtagaatatgtgaagaggaggccaagatggtgtacctgctcgagtgcctgcagaagacaccccgccttacaccggattggccgcaccgggcgctcggaaacacaggcatcgccactaccttcatcaacaaagcgtgtggagagcgcggctggccttctgcgggggcctgggtcatcggatcactgactgccccaaactcgggctatgcagaccaagcagggccacctggagagtctgaggatggtgtgtgtaccttatgtgtgtacaaggccatgtggggccctgcactgaggaggcagtggcagaatcatgaggcctgcctctgtactctggcaaaacagttcctcgccctccaccgcctcttccctgctgatccaaatgagctcaagccattctga

SEQ ID NO: 136461 - DNA, 260 bp, Homo sapiens
gagagcgcggctggccttctgcgggggcctgggtcatcggatcactgactgccccaaactcgggctatgcagaccaagcagggccacctggagagtctgaggatggtgtgtgtaccttatgtgtgtacaaggccatgtggggccctgcactgaggaggcagtggcagaatcatgaggcctgcctctgtactctggcaaaacagttcctcgccctccaccgcctcttccctgctgatccaaatgagctcaagccattctga

SEQ ID NO: 136462 - DNA, 1743 bp, Homo sapiens
atgaaaggttatctcggaaagtatcaggatatgggcgtcaccatctacctgactccagatggtaagcacgctatctctggttacatgtacaacgagaaaggtgaaaacctgagtaacacacttatcgaaaaagaaatttacgcaccagccggacgcgaaatgtggcaacggatggaacaatcccactggctcctcgacggtaaaaaagatgcgccggtcattgtctacgtcttcgccgatccgttctgcccatattgtaaacagttctggcagcaggcgcgcccgtgggtagattctggcaaagtgcaattaagaacattgttggttggggttatcaagccagaaagcccggcgacagcagcggcaattcttgcctccaaagatcccgcaaaaacctggcaacaatatgaagcctctggtggcaagcttaagctaaacgtgcctgcaaacgtaagtacagagcaaatgaaagtgttaagtgacaatgagaaactgatggacgatctgggggcaaatgtcacgccggctatctattacatgagtaaggaaaatacgctacaacaggccgtggggttgcccgatcttacggaagacaggaaagagcagagcaacaagtgctggggtgcgtggtgcagggaaggcagctggctgctgctggtgtggtcagagtgggccctcatggagaagactgcattcgagcagaaacttgaagggggtgagggggaggctgtgagaagcactcagaatctggatgtgccttgggggtgggccccactggatttcctggtggacctgtcgctcctcctggcgccgtttgaggcggcggcgcaggaagctgcagaagcagcagagcaggacgatgagaccccagatgagccagaagccggcgaagcacgtgaggaacgtgtaggtgccctgggacatcaccatggcggcggcacgggcggcgggtcctcagacgcttcactggacactgggctccgctgcgtggccccgggcccgcgccacactctcaggtgccgccagcgtcactcggggacccgcggccgggggctgcccgtggcaggccagcccctccagggccccctcaccactgtgctgcctggggcggttggccacctcttcctcctggaggccttccttgaccactccacgctgtccgagagctcaaaggccctcacggtatacactcacgctgggcatccagtccacatgggacccacagccctgaatggccccaaccacctctgtgcccactgtggcccaagcagccctaagctccgtccacctcagacgccacatcctttgcgttctcatcgccatttcaacagtgagaaacctcgactttggaaagaacaggaggaggaggtggctaggaagtggcagagccaggacaatacacccaggcctgatcttcagaagttcctatgtttctcaattccatctgacaaccatttaccgaccattgaggctgtgaggcagcaggccaggccctatgagtcagtgctgatggacctcaaagcgctgctgctagaagccaagcagaaggtgccgcccgtgctgcaggtgctgcattgcggggatgagtccatgctggacattggaggagagcgcggctgtgccttctgcgggggcctgggtcatcggatcactgactgccccaaactcgaggctatgcagaccaagcaggtcagcaacatcggtcgcaaggactacctggcccacagctccatggacttctga

SEQ ID NO: 136463 - DNA, 394 bp, Homo sapiens
gggtagtgccagttttacaggcttggggctctgagaaagtacctgtgagtcatgaagacgatgtcggttggtttcatagccatcctgagaggcctgaagaagaaaggcattcaccacccaaccccattcagatccagggcatccccaccatcgggagctggcccggcagaccctggcatcctggagtactactgccgcctgctgcaggaggacagctcaccatcctgcgctgcgccctctgcattgggggcatgtccgtgaaagagcagatgagaccatccgacaaagaagatggtcagcctagacatctgtcgcacctggccctggacgaggctgaccgcatgatcgacatgggcttcgaggggacatccgtaccatcttctcctacttcaag

SEQ ID NO: 136464 - DNA, 1203 bp, Homo sapiens
atgcagggcctctttgccttcagcaccccctgtgcccctgacctgtgcagggctgtggccggggccatcgcccgccagcgggagcggctgccagagctgaccaggccccagccctgccccctgccacgggccacctctctgccctccctggacacccccggagagcttcgggagatgccaccaggacctgagccacccacgtccaggaaaatgcacctggccgagcccggaccccagagcctgccgctactgctagatctcatggtgttgcatggaacaaaaaaaaaggttacccattttcaaagcgggaaggggccctatgaattcatcatctgcccttcggaggacagttccccactcttgcgatgcgccttctgcattgggggcatgtccgtgaaagagcagatggagaccatccgacatcctctgcagaccaccagaggccctggaccaggccctctgttcacagatgggccagaccccatcccggaggccttcctccacggacttctgagtattagggagatggtgagcacagaaaaggtgaagccagtgggccaggaaagcgagcccagagtaaagcctctggagcttgatgacagcgcttctggcggtgtacacatgatggtggccaccccggggcgcctcatggatttgctgcagaagaagatggtcagcctaaacatctgtcgctacctggccctggacgaggctgaccgcatgatcgacatgggcttcgagggtgacatccgtaccatcttctcctacttcaagcacacttccgcagctgccatcggcctgcagcttgctctggacggagggacgggaagtggccagaaggggaagtgtgaggagttcccgtccagcatgtcagcagtctccacaggtcttgaagcgtcggcctgctgcctgtccgtgaccatggaccctctggagaccctatcaaggatggcatcctctaccagcagcatgtcaagtttggcaagggcctggctctctcccgagcctggagactcaccggggatggtaggaggactcccaagagagctgcctggcatggccccactggaatgtggggaattccagaggcccgagagcttatgtgccgacaggaacgagctaggatcccagtctcccgagttcccagggcaggaagaggaggacgaggatgaggatgatgaggaggaagacgaggacgaatga

SEQ ID NO: 136465 - DNA, 2309 bp, Homo sapiens
  misc_feature (1)...(2309): n = a,t,c or g
tatctccggaacaaatttgtccctctgcgcgatccggaactccgaggtcgttcctacgcgccgtcgttcgcctcttcacatcggattgggtctcacgcaaggatgaggcggggtttcgccgtggcgcgcatgcgtgcagcaaagaatggaggagtcggaacccgaacggaagcgggctcgcaccgacgaggtgcctgccggaggaagccgctccgaggcggaagatgaggacgacgaggactacgtgccctatgtgccgttacggcagcgccggcagcctactgctccagaagctgctgcagcgaaagacgcaagggagctgcggaggaagagcagcaggacagcggtagtgaaccccggggagatgaggacgacatcccgctaggccctcaagtccaacgtcagcctcctggatcagcaccagcacctttaaagagaaggctgaaagcgccgcaaaagagtcttgccaaggaagaaagcagcttgaaggaaagaaagagaagatccttggaagaattgtttgccgaagggccgagcattgatgtcaagtgaaaggnagattggctaaagggcattaccgtattgattgaccccatcaaaacccagcttggacttccaccccgtttatgttcttgagcatgtctgaagagcgacatgagcgcgtgcggaagaaataccacatcctggtggagggagacggtatcccaccacccatcaagagcttcaaggaaatgaagtttcctgcagccatcctgagaggcctgaagaagaaaggcattcaccacccaacacccattcagatccagggcatccccaccattctatcttgccgtgacatgataggcatcgctttcacgggttcaggcaagacactggtgttcacgttgcccgtcatcatgttctgcctggaacaagagaagaggttacccttctcaaagcgcgaggggccctatggactcatcatctgcccctcgcgggagctggcccggcagacccatggcatcctggagtactactgccgcctgctgcaggaggacagctcaccactcctgcgctgcggccctctgcattgggggcatgtccgtgaaaagagcagattggagaccatccgacaaggtgtacacatgatggtggccacccccggggcgccctcatggatttgctgcagaagaagatggtcagcctagacatctgtcgctacctggccctggacgaggctgaccgcatgatcgacatgggcttcgagggtgacatccgtaccatcttctcctacttcaagggccagcgacagaccctgctcttcagtgccaccatgccgaagaagattcagaactttgcttaagagtgcccttgtaaagcctgtgaccatcaatgtggggcgtgctggggctgccagcctggatgtcatccaggaggtagaatatgtgaaggaggaggccaagatggtgtacctgctcgagtgcctgcagaagacacccccgcctgtactcatctttgcagagaagaaggcagacgtggacgccatccacgagtacctgctgctcaagggggttgaggccgtagccatccatgggggcaaagaccaggaggaacggactaaggcccatcgaggcattccgggagggcaagaaggatgtcctagtagccacagtacgttgcctccaagggcctggtcttccctgccatccagcacgtcatcaattatgacatgccagaggagattgagaactatgtacaccggattggccgcaccgggcggttcaggaaacacaggcatcgccactaccttcatcaacaaagcgtgtgatgagtcattcctgattgactctcaaggcgcttcttgttagaaagccaaagcagaaggtgccgcccgtgcttgcaggtgctgcaattgcgggggatggagtcccatgctggacattgggaggagcagccgcggctgtgccttctgcggggggcctgggtcatctggatcactgactgccccaaacttcgaggcttatgcagaccaagcaggtcagcaacatcggtcgcaaggactacctggcccacagctccatggacttctgagccgacagtcttcccttctctcccaagaggcctcagtccccaagactgccacccagtctacacatacagcagccccctggacagaatcagcatttcagctcagctggcctggaatggggccaggctggtcctggctgcctgttccctgtgctcttcagaattacttgtttttgtttttccttttaccccagctgccattaaagcccaaacctctaggcccaaaaaaaaaaaaaaaaaaa

SEQ ID NO: 136466 - DNA, 1428 bp, Homo sapiens; identical to SEQ ID NO: 119821

SEQ ID NO: 136467 - DNA, 597 bp, Homo sapiens
tgcacaaaatggctccctacagcccactggtgacccggctgcagaaagctctgggtgtgcggcaataccatgtggcctcagtcctgtgccaacgggccaagatggcgatgagccactttgagcccaatgagtacatccactatgacctgctagagaagaacattaacattgtttgcaaacgactgaactggcctctgaccctcttggagaagatcgtgtatggacacctggatgacccggccagccaggaaatcgagcagggcaagacacctgtggctgtggccggaccacgtggccatgctgcagttcatcagcaaaattggggccaccacttccgtgttcccttacaaccacaggatgaggaggtacctaagcaagacggccggacagacattgccaatctagctgatgaattccaggatcacttggtgcctgaccctggctgccattatgaccaactaattgaaattaacctcagtgagctgaagccgcacatcaatgggcccttcacccccgaccaggctcaccctgtggcagaagtgggcaaggtggcagagaaggaaggatggcctctggacatccgagtaggtctgactg

SEQ ID NO: 136468 - DNA, 512 bp, Homo sapiens
gaagaacattaacattgtttgcaaatgattgaaccggcctctgaccctctcagagaagatcgtgtacagacacccggatgaccccaccagccaggaaattgagcggggcgggacgtacctgcagcagtggccggacagcgtgaccatgcaggtgattggcgtgaagctgatgggctccctctctggttggacctcacccaaagatgtgatcctgaaggtggcaggcatcctcaccatgaaaggtggcacaggtgcaatcgtggaataccacgggcctgttgtagactccatctcctgcactggcatggtgacagtctgcaacatgggcttagaaattgggaccaccacttccgtgttccattacaacctcaggatgaagaagtacatgagcaagacctgccaggcagacattgccaatctagctgatgaattcaaagatcacttggtgcctgaccctgggtgccattatgaccaactaattgaagttaaccccagtgaactgaagctgcaca

SEQ ID NO: 136469 - DNA, 645 bp, Homo sapiens
  misc_feature (1)...(645): n = a,t,c or g
atggcgccctacagcctactggtgactcggctgcaggtcaaggcgtccccggcacagtcagctttcctaaccctgtccctgcctcgcaagaagggattctatagagccgtagcgcgggtctttcaacgcagtgggtatcgggttctttcccaaagtgcttacttggaaagagtgtggctgctggactcttttcgaaatgcccctctgagtcaggagcctggaaacagctatgaccatgattacgaattcgagctcggtacccagctcaacgactccattgccgaggagctgaacaagaagttggccaacaagatgaggagcagacctctcatcaggtcccccaaatcccatacgatgtggctgctgcccttctcctacatgctgttccagccacatctgcaatcgaaggacatcaagaagggggagaagaacacaatcgtcacctcctacaacaggaacttcacgggccgcaacgacgcaaaccccgagacccatgcctttgtcacgtccccagaggtgagactgcccagctgcgcacaagcctagaaatggcctaagggggtccctggcgggtcagaggaggaggcagaaggagatggggactggggtcatcgaattccncgncatggctatgaactcgacgcc

SEQ ID NO: 136470 - DNA, 862 bp, Homo sapiens
aattgctgtaaaaggggtcatagtcctaatgtgttcagcatcatggccaatggctacagcatctttcttcaaatgacgccacgtcatgagttagcctgtcctttattgttggatatttcggttgcttgcaactggtctctgttaaaaaagtctctggcccagcccagatggtgaactcttttggccaagtctggataatttgaagtcaggtggagacctctgctcactgtctcctcctgacccttaaccccaccacccacaatgcaccaggtctaattggtagctgcaccaattcaagctatgaagatatggggcgctcagcagctgtggccaagcaggcactggcccatggcctcaagtgcaagtcccagttcaccatcactccaggttccgagcagatccgcgccaccattgagcgggacggctatgtgagtgcccatatccccctgcccatctcccccaccccatgctgagtaatgcctccaggcggcacaagcccagaggcctgttgggccggggctggggcaggtcccagtggctgccctggggttccagtacagcacttcgtcctgcagccaccacatcaccccttcccatcagactctcacccacccttgacattctgtcttcctctctccctggcaggcacagatcttgagggatctgggtggcattgtcctggccaatgcttgtggcccctgcattggccagtgggacaggtaagaggcgtatcttttgacaagacagccccttgtgcacagggtacagagccccagaagttggagggggaattattggggtggagagaagagactccagccaaggtctctagctccagggactcttgcccattagaagcctc

SEQ ID NO: 136471 - DNA, 4032 bp, Homo sapiens
  misc_feature (1)...(4032): n = a,t,c or g
tcagtgcacaaaatggcgccctacagcctactggtgactcggctgtagaaagctctgggtgtgcggcagtaccatgtgggctcagtcctgtgccaacgggcgcggggtggcgatgagccactttgagcccaacgagtacatccattatgacctgctagagaagagcattaacattgttcgcaaacgactgaaccggccgctgacactctcggagaagattgtgtatggacacctggatgaccccgccagccaggaaattgagcgaggcaagtcgtacctgcggctgcggccggaccgtgtggccatgcaggatgcgaacggcccagatggccatgctccagttcatcagcagcgggctgtccaaggtggctgtgccatccaccatccactgtgaccatctgattgaagcccaggttgggggcgaggaagaacctggcgccgggccaaggacatcaaccaggaagtttataatttcctggcaactgcaggtgccaaatatggcgtgggcttctggaagcctggatctggaatcattcaccaaattattctggaaaactattgcgtaccctggttgtccttctgattgggccctgacttccacacacccaatggtggcggaccttgggggcattctgcattggaagttgtgggtggccgaatgcttgggaatggaatggcttgggaatcccctgggagttgaagtgccccaaggtgattggcgtgaagctgacgggctctctctccggttggccctcacccaaagatgtgatcctgaaggtggcaggcatcctcacggtgaaaggtggcacaggtgcaatcgtggaataccagggacctggtgtagactccatctcctgcactggcatggcgacaatctgcaacatgggtgcagaaattggggccaccacttccgtgttcccttacaaccacaggatgaagaagtacctgagcaagaccggccgggaagacattgccaatctagctgatgaattcaaggatcacttggtgcctgaccctggctgccattatgaccaactaattgaaattaacctcagtgagctgaagccacacatcaatgggcccttcacccctgacctggctcaccctgtggcagaagtgggcaaggtggcagagaaggaaggatggcctctggacatccgaggtgggtcttaattggtagctgcaccaatttcaagctatggaagatatgggggcgctcagcagctgtggccaagcaggcactggcccatggcttcaaagtgcaagtcccagtttcaccatcactccagggtttccgaggcagattccgcgccacctttgaggcgggacggctatgcacagatcttgagggatctgggtgggcattgtcctggccaatgcctgcgggccctgcattggccagtgggacagaaaggacatcaagaagggggagaagaacacaatcgtcacctcctacaacaggaatttcacggggccgcaacgacgcaaaccccgagacccatgcctttgtcacgtccccagagattgtcacagccctggccattgcgggaaccctcaagtttcaacccagagaccgattacctgacggggcacggatgggcaagaagtttcaggcttggaggttcccggattgcagattgagttttcccaaagggggagttttgacccaggggcagggacacctaccagcacccacccaagggacagcagcggggcagcatgttgggacttgagccccaccagccagcgcctgcagctcctggagccttttgacaagtgggatggcaaggacctggaggacctgcagatcctcatcaaggtcaaagggaagtgtaccactgaccacatctcagctgctggcccctggctcaagttccgtgggcacttggataacatctccaacaacctgctcattggtgccatcaacattgaaaacggcaaggccaactccgtggggcaatccggtcactcaggagtttggccccgctcccgatcattgcccgctactacaagaaacatggcatccagttgggtggtgatcggagacgagaactacggcgaagggctcgagccgggagcatgcagctctggaaccctcgccacctttgggggcggggccatcatcaccaaagagctttgcccagatccaacgagaccaaccctgaagaaaacaggggcctgcttcctctgacctttggctgacccgggctgactaccaaccaagattcccccctgtggacaagctgaccattcaggggcctgaaagggacttcaccccctggcaaagccccctgaaagtgcatccatcaagccaccccacaggggaccccaggagaaccatccctccctgaaccacaccctccaacgagacgcaagattgaagtggttccgcagctggcagtgccctcaacagaaatgaagggaactgcaaacagtgaggcgcagtgccctccccccgtctccccgctggcgtcaagttcagctcccacgtgtgcccatcagtggatccgatccgttccagccatggcttcctattccaagatggtgtgaccagacatgcttccttgctccccgcttagcccacggaattaacctgtggttgtggtggggggggttctttaaaataactttttagcccccgtcttcctattttgagtttggttcagatcttaagcagctccatgcaactgtatttatttttggatggacaagactcccatcttaaagtttttctcctgcctgattcattttcattgggtgggttgaagggattctagagaaccttttgttcttgcaaggaaaacaagaatccaaaaccagtgactgttctgtgagtgattggtgtctgtgccgtttgttgtcaagtccagggtccaggaagggtcttttcagtcaaggtcagtggaggcccaacagccacagccacagatggatccatcactgcagtgaaggaggagcagggcctagatggtggaggagcggggcaagctggtgggcactcctggccttgcctcactgtccagctccgagacactatctccttaagcatcggcctcagctgctgttggtcttcacagccggccataccaccttcccgcaggctggtagggtccactgtccagccccagggctagttgctggtccaccaggagatgagagcccaggcctggctcactgatggatcccacaagcgtgtacggagcctccttctttggcagctcctcactggaagtggtggcatctgctgagctaggccctgtgggggacgtgtcaacaaagctctcgtccaccacccggaagcggatctcctcgccggtgtccatgtagaggtcgtgtgctccttcctccgtctcgtactcccacacccacacctgctccgcttcgtcgaacttggctggctggctgcagtgactctggggggatgagaatgtcatcgaagaagcctagagagacgtgcactccttctgggctgcagcctttgatcttcccaatgagaatctcatctaggaatggatgaaacaccacgcagcgaaaatggactttggtgtgtgatgcgccatccccagggaatacataggcatcctccagtttggtgatatcaaacagacaaatgcagaatccccacgtttgtaacacaaccttgttggccaaacttcttgttcaactccctcggcaaatggagtcgtttgagcttcctctcaaactgcccaaggggggatccggacggtgtccaccatttccnacccaggacgaacatcccggcctgcgctgggggctctgggaacaggagggtcagtcacgcacccagggccgggggcagggagaatccccgagccccttggtcccgtcccagtcgctgaggcccccaggctggcggtgaggttgcacggggcggtctcgggggcccggtccgggccatgctccgctactacaacatgaggaaactgaggccagagggaggcactctccgtccacagctccgggtgcgcgcccgcgccgcgagaccccgccacgccacgccactccacgcca

SEQ ID NO: 136472 - DNA, 406 bp, Homo sapiens
tttcgtctagtagcggctgtgtatcggtgacgcgggtgtttccccagtttgtggcccctgagtgctggggggggaccgcggtgactgaacctagaaggtggagaggaatcgtcctcggtgcccagaggcggctctgcagccccgtgacggcgaccactgctcccgggccgtgcttccccaagtagtccgatggcagcggctgcgccgaggcgcccgactcaggagaggctcctgagcgctaggtccgcactgtggtgactgaacccagaagtcggggagcagttgtcctccgctgcacagaggctactctggagctctgtgacggcgcccagcgtgacccactcctgggccaggatacggaccgtcgtgcccatatctcctggctggtcgccctatcctcccgact

SEQ ID NO: 136473 - DNA, 551 bp, Homo sapiens
tcctgcgtcgacgatttcgtgtcatggaaagtggggaactacactacccagaaagctctgctttaaacgacagccggtcagagccagtgagcactcggaaagaaggcatttccacgtgtgcacgtaacgtaaggccgagacttccggggtctctagtagcggctgtgtatcggcgatgcgggtgtttccccagtttgtggccccctgagtgctggggggggaccgcggtgactgaacctataaggtggagaggaatcgtcctcggtgcccagaggcggctctgcagccccgtgacggcgaccactgctcccgggccgtgcttccccaagtagtccgatggcagcggctgcgccgaggcgcccgactcaggtaattgtggcgccttctgtgccctcaggtcaccccatcgtcacccaggtcctaaaccagcgagggagcggctcctgctcacgggtctgtagccggcacccggcgtatgaacactgaggcgctcgcaggaggggtccctgtgtaactgtccagtgggggtccctgtgtaactgtccagtggc

SEQ ID NO: 136474 - DNA, 545 bp, Homo sapiens
tcctcaaactcaagacagttggaagaaccccaagctctttgatctcttggatgtgctgagcagaacttcccgccatcgccatccaaccgggcatggcccaggaggagcgcctgtcacgctatcagcagttcaaggatttccagcggcggatcctggtggccaccaatctgtttggccgggggatggacatcgagcgagtcaacatcgtctttaactacgacatgcctgaggactcggacacctacctgcaccgggtggcccgggcgggtcgctttggcaccaaaggcctagccatcacttttgtgtctgacgagaatgatgccaaaatcctcaatgacgtccaggaccggtttgaagttaatgtggcagaacttccagaggaaatcgacatctccacatacatcgagcagagccggtaaccaccacgtgccagagccgcccacccggagccgcccgcatgcagcttcacctcccctttccaggcgccactgttgagaagctagagattgtatgagaataaacttgttattatggaaaaaaaaaaa

SEQ ID NO: 136475 - DNA, 707 bp, Homo sapiens
  misc_feature (1)...(707): n = a,t,c or g
cgcttttccaagtacatgcccagcgtcaaggtgtctgtgttctcgngtggtctctccatcaagaaggatgaagaagtgttgaagaagaactgtccccatgtcgtggtgnggacccgggcccgcatcctggcgctcgtgcggaataggagcttcagcctanagaatgtgaagcactttgtgctggacgagtgtgacaagatgctggagcagctggacatgcggcgggatgtgcaggagatcttccgcctgacaccacacgagaagcagtgcatgatgttcagcgcctgtcacgctatcagcagttcaaggatttccagcggcggatcctggtggccaccaatctgtttggccgggggatggacatcgagcgagtcaacatcgtctttaactacgacatgcctgaggactcggacacctacctgcaccgggtggcccgggcgggtcgctttggcaccaaaggcctagccatcacttttgtgtctgacgagaatgatgccaaaatcctcaatgacgtccaggaccggtttgaagttaatgtggcagaacttccagaggaaatcgacatctccacatacatcgagcagagccggtaaccaccacgtgccagagccgcccacccggagccgcccgcatgcagcttcacctcccctttccaggcgccactgttgagaagctagagattgtatgagaataaacttgttattatg

SEQ ID NO: 136476 - DNA, 575 bp, Homo sapiens
ggcacgaggcgatgaagaggaagagccccaggctcctcaagagagcacaccagctccccctaagaaagacatcaagggatcctacgtttccatccacagctctggcttccgggactttctgctgaagccggagctcctgcgggccatcgtggactgtggctttgagcatccttctgaggtccagcatgagtgcattccccaggccatcctgggcatggacgtcctgtgccaggccaagtccgggatgggcaagacagcggtcttcgtgctggccaccctacagcagattgagcctgtcaacggacaggtgacggtcctggtcatgtgccacacgagggagctggccttccagatcagcaaggaatatgagcgcttttccaagtacatgcccagcgtcaaggatgaagaagtgttgaagaagaactgtccccatgtcgtggtggggaccccgggccgcatcctggcgctcgtgcggaataggagcttcagcctaaagaatgtgaagcactttgtgctggacgagtgtgacaagatgctggagcagctggacatgcggcgggatgtgcaggagatct

SEQ ID NO: 136477 - DNA, 569 bp, Homo sapiens
  misc_feature (1)...(569): n = a,t,c or g
tttggattacgatgaggaggaagagccccaggcccgtcaagagagcacaccagctccccctaagaaagacatcaagggatcctacgtttccatccacagctctggcttccgggactttctgctgaagccggagctcctgcgggccatcgtggactgtggctttgagcatccttctgaggtccagcatgagtgcattccccaggccagcgtcaaggtgtctgtgttcttcggtggtctctccatcaagaaggatgaagaagtgttgaagaagaactgtccccatgtcgtggtggggaccccgggccgcatcctggcgctcgtgcggaataggagcttcagcctaaagaatgtgaagcactttgtgctggacgagtgtgacaagatgctggagcagctgggctcccctccctgaagcgtggctcgaggcgcacgggcacggctgctccgcgccagtancagtgcggcgggatgtgcaggagatcttccgcctgacaccacacgagaagcagtgcatgatgttcagcgcaccctgagcaaggacatccggcctgtgtgcaggaagttcatgc

SEQ ID NO: 136478 - DNA, 441 bp, Homo sapiens
ggcgcacgggcacggctgctccgcgccagcgtgtaagtggattgcagctcctcccgcgcctgcgctcgctggccaccccccagcccgtcaggcaccaggactggccactcccgcggctcactctgccctcgtcacggtgccactggctccctggcacaggttgggaggggtctgggtctggtctggggtgggggtcctgcatggcagacgctcatgcccacccatgtcttgccctccccacctagacatgcggcgggatgtgcaggagatcttccgcctgacaccacacgagaagcagtgcatgatgttcagcgccaccctgagcaaggacatccggcctgtgtgcaggaagttcatgcaggatgtgagtagggcgagagtggcagctttggccttccccaggggcctggagcctggggccccaggacacccgcacggccc

SEQ ID NO: 136479 - DNA, 1548 bp, Homo sapiens
ctattcaccattcagttgaacgactgcgatcctgttgttgccgctaatcacctgcgaactgtaatgaatcgtcggaatggcatcttcttctatgccagctttcacctgcgcgtgaccgtagactttagcgcaatcgcatagccagacattgttctcttcattaccttcaatactggcaaaatcaaaaaggttgtatacagccgtgtatcgccatggcaaaaacgtgttttcactgttaaatgtggtcaaccataaaaacttgatggggacatccagtttttcttttccacgaacaccatcacgggtcgcggtcatttccgtaccatggtcgatggcatctgtccatgtaaagacggaaatctgcgttttaacaggattctcgagcatcgggaaccattctacccccagatcccagctaccttcgcgtacgcctgagttgccgccgtttatgccgacgttgccggtgaagatttctttgctatcggtaagcccgcggttctgcaaaacagaaccatgaaggcccgataagcgcagcgcatcgggcaatttagcatttggcatcattgattgtccacgctgctgtgccatttcattcaataagcgcaggctgttgaggttggcttcggtaagcattttcggtgtcagaccacgaactttattcccttcacgatgcatccgtgaatcttgcggaatgccgttgagatattttccggtcagcaatcccttggtgctgccattgctgtaggtctggatcatgttctccgccccctgcttcaccttcagctcaatggccaactgcttctccaggcccgccacgcggctcaggttggtggccgagcaggtggggccacccgcaccaggggactgggggccatttttgtgtctgacgagaatgatgccaaaatcctcaatgacgtccaggaccggtttgaagttaatgtggcagaacttccagaggaaatcgacatctccacatacagtaagtgcccgggtctgattgtggccagtgccagacgtggtggaggtgaattctgagtacttgctccccccagcaactaggcaggcccacttccggtattcttcccgaaccctggccccatcccagcacctccatctctctcccacgggctccccctccagaccaccgctgctacctggatcttcggctccagctgccacagcccaattcagcttcatgcgtgcgctgctctgacccatagtgacgttcttgtccccccgctcctggatcatcagggtcagctccgcagcccacggcgcttcctcgggtcccaaagggcgccaatgtgcaagcaccgccgccagggagcgctccctgccggagccccggagaccaaaggttggctccctcccctgtttcccgaaggagtgagggtccgacggcggccacgaacaaagctgcacgctctgcataccccggagatcccctagaaattccgcagaggcctcccctctccgcttgggcacgagtctgcatttatgaagggccatctgcatgcagcagccccgaaaaagaaagccgatgcccat

SEQ ID NO: 136480 - DNA, 1324 bp, Homo sapiens
atggcagaacaggatgtggaaaacgatcttttggattacgatgaagaggaagagccccaggctcctcaagagagcacaccagctccccctaagaaagacatcaagggatcctacgtttccatccacagctctggcttccgggactttctgctgaagccggagctcctgcgggccatcgtggactgtggctttgagcatccttctgaggtccagcatgagtgcattccccaggccatcctgggcatggacgtcctgtgccaggccaagtccgggatgggcaagacagcggtcttcgtgctggccaccctacagcagattgagcctgtcaacggacagtcaggccaggtgcacatctttgggcttcatattggcgcccgtgccctcgttatctcagagcacatcctgaaggatgaaggtgctgtggagggctgtggtgtggtccagtgtctgatggcacgggtgacggtcctggtcatgtgccacacgagggagctggccttccagatcagcaaggaatatgagcgcttttccaagtacatgcccagcgtcaaggtgtctgtgttcttcggtggtctctccatcaagaaggatgaagaagtgttgaagaagaactgtccccatgtcgtggtggggaccccgggccgcatcctggcgctcgtgcggaataggagcttcagcctaaagaatgtgaagcactttgtgctggacgagtgtgacaagatgctggagcagctggacatgcggcgggaatgtgcaggagatcttccgccttgacaccacaccgagaaagcagtgcatgatgttcagcgccaccctgaagcaaggacatcccggcctgtgttgcaggaagttcatgcaggatcccatggaggtgtttggtggacgacgagaccaagctcacgctgcacggccctgcagcagtactacgtcaaactcaagaccagtgagaagaaccgcagcctctttgatctcttgggatgtgcctggagtttaaccaggtgactcatcttcgtcaagtcagtgcagcgctgcatggccctggcccagctcctcggtggagcagaacttcccggccattcgccatccaccggggcatggcccaggaggagcgcctgtcacgctatcagcagttcaaggatttccagcggcggatcctggtggccaccaatctgtttggccgggggatggacatcgagcgagtcaacatcgtctttaactacgacatgcctgaggactcggacacctacctgcaccgggtggcccgggcgggtcgctttggcaccaaaggcctagccatcacttttgtgtctgacgagaatgatgc

SEQ ID NO: 136481 - DNA, 1594 bp, Homo sapiens
tttcgtaggaagcgcagcaactcgtgtctgagcgcccggcggaaaaccgaagttggaagtgtctcttagcagcgcgcggagaagaacggggagccagcatcatggcagaacaggatgtggaaaacgatcttttggattacgatgaagaggaagagccccaggctcctcaagagagcacaccagctcccccctaagaaagacatcaagggatcctacggtttccatccacagctctggcttccgggactttcctgcctgaagccggagctcctgcgggccatcggtggacttgtggcctttgagcatccttctgaggtccagcatgaagtgcattccccagggccatcctggggcatgggacgtcctgttgccaggccaaagtcccgggatgggcaagacagcggtctttcgttgctggccacccttacagcagatttgagcctgtcaacggacaggtgaccggtcctggtcatgttgccacacgagggagctggccttccagatcagcaaggaatatgagcgcttttccaagtacatgcccagcgtcaaggtgtctgtgttcttcggtggtctctccatcaagaaggatggaagaagtgatgaagaagaactgtccccatgtcgtggtggggaccccgggccgcatcctggcgctcgtgcggaataggagcttcagcctaaagaatgtgaagcactttgtgctggacgagtgtgacaagatgctggagcagctggacatgcggcgggatgtgcaggagatcttccgcctgacaccacacgagaagcagtgcatgatgttcagcgccaccctgagcaaggacatccgccctgtgtgcaggaagttcatgcaggatcccatggaggtgtttgtggacgacgagaccaagctcacgctgcacgggctgcagcagtactacgtcaaactcaaagacagtgagcaagacccgcaaggtctttgatctctgggatggtgctggagtttaaccaggttgatattcttcgtcaaggtcagtgcaagcgctgcatggcccttggcccagctccttcgtggagcaaaacttcccggcccaatggccaatcccaccggggcaatggcccccagaaggaacgccctgtcaacgcttatcaagcaagttcaaaggatttcccaagcgggcgggatcccctggtggccacccaaatcttgtttggcccgggggatggacatcgaagcgaagtcaaacatcggtctttaactacggacatgccttgaggactcgggacaccctacctgcaaccgggttggcccggcggggtcgctttggcaccaaaaggccttagccattcacttttgtgtctgacgggaaatgatgcccaaaatcctcaatgacgtcccaggaccggttttgaagttaaatgtgggcagaactttccagaggaaatcgacatctccacatacatcgagcagagccggttaaaccaccagttggccagagccggcccacccggagccgccccgcatgcagcttcacctcccctttccaggcgccactgttgagaagctagagatttgtatgagaataaacttgttattatggaaaaaaaaaaaaaaaaa

SEQ ID NO: 136482 - DNA, 327 bp, Homo sapiens
cggccgctccaacatcagaatggccgactgtcagcgtgaagcgtgatctgctcttccaagccctgggccgcacctacactgacgaagaatttgatgaactatgttttgaatttggtctggagcttgatgaaattacatctgagaaggaaataataagtaaagaacaaggtaatgtaaaggcagcaggagcctctgatgttgttctttacaaaattgacgtccctttctcctcccctagtgtccttaagtcctcctccacagggaacatctatttgggctttgatgtttaataaagtagaaagcactgtcaaaaaaaacctcgtgccg

SEQ ID NO: 136483 - DNA, 847 bp, Homo sapiens
atgaatcagacatctgagaaggaaataataagtaaagaacaaggtaatgtaaaggcagcaggagcttctgatgttgttctttacaaaattgacgtccctgccaatagatatgatctcctgtgtctggaaggattggttcgaggacttcaggtcttcaaagaaagaaatttctttctcacggttctggaggttgagaagtccaagaccaaagtggagcagattcagtgtctgtgctcccaagaagatattgctgataaactaggtgtggatatctctgcaacaaaggcagtccacataagtaatcctaaaacagctgaatttcaggtggcacgcactacccttcttcctggcctcctgaagaccatagcagcaaatcgtaagatgccccttccactgaaactgtttgaaatctctgacattgtaataaaagattctaatacagatgtaggtgcaaaaaactacagacatctctgtgctgtttattacaacaagaatcctgggtttgagatcattcatgggctgctggacagaattatgcagttgctcgatgtgcctcctggtgaagacaaggggggatatgtgatcaaagcgtcgggaagcttggggtccttcatcctgacgttatcaccaaatttgagctgaccatgccctgctcctccctagaaatcaatattggaccctttttgtgaagattggtctctgtggtgtgattctcttcccaggtgtccctttctcctcccctagtgtccttaagtcctcctccacagggaacatctatttgggctttgatgtttaataaagtagaaagcactgtcaaaaaaaaaaaaaaaaaaaaaaaaaaaaaaaa

SEQ ID NO: 136484 - DNA, 2273 bp, Homo sapiens
cggcacgaggccgactgtcagcgtgaagcgtgatctgctcttccaagccctgggccgcacctacactgacgaagaatttgatgaacctatgttttgaatttggtctggagcttgatgaaattacatctgagaaggaaataataagtaaagaacaaggtaatgtaaaggcagcaggagcctctgatgttgttctttacaaaattgacgtccttgccactagatatgatctcctgtgtctggaaggattggttcgaggacttcaggtcttcaaagaaaggataaaggctccagtgtataaacgggtaatgcctgatggaaaaatccagaaattgattatcacagaagagacagctaagatacgtccttttgcgggagcagcagttctccgtaatataaagtttactaaagatccgatatgacagcttcattgaacttcaggagaaattacatcagaatatttgcaggaaaagagcactggttgccattggtacccatgatttggacactttgtcgggcccatttacttatactgcaaagcgtccttcagatatcaaattcaagcctctaaataagaccaaggagtatacagcctgtgaactgatgaacatatacaagactgacaatcacctgaaacattatttacatatcattgaaaacaaacccctgtatccagttatctatgatagcaatgggtgtcgtcctttcaatgcctcccatcatcaatggggatcattccagaataacagtaaatactagaaatatttttattgaatgcacgggaactgactttactaaggcaaaaatagttcttgatattattgtcaccatgttcagtgaatattgtgagaatcaatttacggtcgaagctgctgaagtggtttttcctaatggaaaatcacatacctttccagaattagcttaccgaaaggagatggtgagagctgacctaattaacaaaaaagttggaatcagagaaactccagaaaatcttgccaaacttctgaccaggatgtatttaaaatcagaagtcataggtgatgggaatcagattgagattgaaatccctccaaccagagctgacattatccatgcatgtgatattgtaggaagatgcagctattgcttatgggatataacaacattgcagatgcactctcccgaaaactttacaccataggctaatcaatttcctcttaataaggctcactgaacttctccgacatgacatggcaggccgctggctttcactgaagcactttacctttggccctgtgctcccaaggaagatattggctggataaactaggtgtgggatatctctggcaacaaagggcagtccacataagtaattcctaaaacagctgaatttcaggtggcacgcactacccttcttcctgggcctccctgaagaccataggcagcaaatcgtaaggtggccccttccactggaaactgtttgaaatctctggacattgtaataaaaggattctaataccagatgtaggtgcaaaaaaaactacgagacaatctctggtggctggtttattaccaacaaaaaatcctggggtttgagatcaattcatggggctgctgggacagaattatggcagtttgctccgatgttgcctcctggtggaagacaagggggggatatgtgattcaaagcatcagaagggcctgctttcttccccggggcgatgtgcagagattcttttgccaggggtcaaagccttcgggaagcttgggggtccttcatcctgacgttattcaccaaatttggagctgaccattgccctgctcctccctagaaatcgaatattggaccctttttgtgaagattggtctctgtgggtgtgaatctcttcccaggtgtccctttctcctcaccctagtgtccttaaagtcctccatccacaggagaacatcatatttgggactttgaatgtttatataaagtagaaagcactgtctggctgtgtgggtaaaagaccatcctttccctgcatattaggccagcttgtgccatataccaatgtggtgtctgtgtgtgaagctgcattgttgggtaaaagccccgtggagtgctggagaaatgcactagcagagtgcaggatctgttctgaaaggcagacgtgctcctcagacatcagaacatcacattggaacggattactcctgcataacaagatcccatttctttccttattgataaaacaagataatcgatgagaattcatgttgcatgagttcgagataactgaggggttagcttg

SEQ ID NO: 136485 - DNA, 445 bp, Homo sapiens
ttttccatttttttaaacgtttattacttcaagagtgaattatttttcaaagatgataaaactcatttctattccagtagaaaagggtcacaggtttgccccagggtccaggagcgcccggaaggcagggcccccaggcctcttcacctcagcctgggcacctataatctgagggaccctgtgagggggtgggggcagctcgggggcacagcctgcggccacttcggccagagagtgggcggagaccctcgggcagctgcacagggcatcttgtgctcactccattgttttccgaggcctgtgtaaaggcgctttgcctggcctggcaggtagaccaaggccaaagctcgtggccagggcctgggcactgagtccccactgaatttggcacaggaaggcggcactcccagcctggcccgtcctgcatggggagccaccacaccgg

SEQ ID NO: 136486 - DNA, 645 bp, Homo sapiens
atggcgatggcccactacgtgaaccatcacccaaatcaagttttttggggtcgaggtgcccccttgtttctctcccatcctcacttcctcaacgccgacccggttctggcagaagcggtgactggcctgcaccctaaccaggaggcacactccttgttcctggacatccacccggcggagccaggtcacgacaaaatccgcgatgcggtccgtgcatggtcgtcgtccctggacaatcaggacgtagtgtcagcgctgatcatcaacgaataccgggagcagggcggtaccgccatcagcttcccagaagacatcagcagggcgcgccagaaactttttcgctttctggataaccgcttcgactccgatcagtaccgcgagaacgttagagaactgaccccggcaatcatggctgttcttcctgttgagtttcgtacacgcctggcgccgcagaacgacaccatgtcgctgatcgcatctgccatgaaggaatgttcagaagcaaagcaagccgttctcctgaacgcgcctgagcaccagaaaatgaaggaggtaagcgagggcatagcgtcattgtttcgcctcatgccggagcaggtaggaccgctgatgacgatggttacatcgatgctgggggttatatga

SEQ ID NO: 136487 - DNA, 423 bp, Homo sapiens
  misc_feature (1)...(423): n = a,t,c or g
atgaccttgaggctcatcatgaccttggcattcacnaccctcggcgacgtgcccttcatgaaccgcactgtgggtgagatcatgtggggctacaaggacccccttgtgaatctcatcaacaagtactttccaggcatgttccccttcaaggacaagttcggattatttgctgaggtacgtgtggcctgggattttgccgatttcggaaccaccatcaaacaggattttcgcctgctggggcaaaccagcgtggaccgcttgctgcaactctctcagggccaggcggtgaagggcaatcagctgttgcccgtctcactggaggccgggcagtacgggcatacccaagcctatgcctacagcatccagggtgacggtcccgaggatgacgatgagcgcatgttagatttcatacacggtgcctga

SEQ ID NO: 136488 - DNA, 599 bp, Homo sapiens
ctgcacgagcaccccgtcacggaatcccccatgaactgctctgtgacactgcagctgagcctctacatgaaatctgtcgcagcattggacaaactggcaagattgagcctgtggtcctgccgctgctctggtttgcagagagcggggccatggagggggagactcttcacacattctacactcagctggtgttgatgcccaaggtgatgcactatgcccagtacgtcctcctggcgctgggctgcgtcctgctgctggtccctgtcatctgccaaatccggagccaagtaggtgctggccagagggcagcccgggctgacagccattcgcttttcctccagcctaaactgacatcatcctatggactgagccggccactctcatggccgaagtgagcgcatgctgtgcccccgagctgcccccaccccctcacagggtccctcagattataggtgcccaggctgaggtgaatgagcctgggggccctgcgttccgggcgctcctggaccctggggcaaacctgtgacccttttctactggaatagaaatgagttttatcatctttgaaaaataattcactcttgaagtaataaacgttt

SEQ ID NO: 136489 - DNA, 486 bp, Homo sapiens
atgttcgtggcagcgggaacagccacggtgaagtttccaaagggagaatgtgcttggctggtgcccttccccttcctggtgcctgtgcggcgcttgtcctgctgctggttattctcccagagcccctgcggtgcccgcttcacactctctatgggggaagggaccctgtggactccatacgcctctggcgtcaggctggggagttcaggcacaaaagcaacatcaccttcaacaacaacgacaccgtgtccttcctcgagtaccgcacctttccagttccagccctccaagtcccacggctcggagagcgactacatcgtcatgcccaacatcctggtcttgaataaacctcggagcacctggatctctgtctgctttgttcacggctgtatcccagcatctagaacggggcccaggacagagtcaatgcacagcaaatccttgtggaaagcctggctagctgcccctggcctccctctgctgtga

SEQ ID NO: 136490 - DNA, 2650 bp, Homo sapiens
  misc_feature (1)...(2650): n = a,t,c or g
cgtcgccgtccccgtctcctgccaggcgcggagccctgcgagccgcgggtgggccccaggcgcgcagacatgggctgctccgccaaagcgcgctgggctgccggggcgctgggcgtcgcggggctactgtgcgctgtgctgggcgctgtcatgatcgtgatggtgccgtcgctcatcaagcagcaggtccttaagaacgtgcgcatcgaccccagtagcctgtccttcaacatgtggaaggagatccctatccccttctatctctccgtctacttctttgacgtcatgaaccccagcgagatcctgaagggcgagaagccgcaggtgcgggagcgcgggccctacgtgtacaagggagttcaaggcacaaaagcaacatcaccttcaacaacaacgacaccgtgtccttcctcgagtaccgcaccttccagttccagccctccaagtcccacggctcggagagcgactacatcgtcatgcccaacatcctggtcttgggtgtgggcggtgatgatggagaataagcccatgaccctgaagctcatcatgaccttgggcattcaccaccctcgggcgaacgtgcctttcatggaaccgcactgtggggtgaggttcatgtggggctacaaggacccccttgtgaatctcatcaacaagtactttccaggcatgttccccttcaagggcgggttcggagtatttgctgagctcaacaactccgactctgggctcttcacggtgttcacgggggtccagaacatcagcaggatccacctcgtggacaagtggaacgggctgagcaaggttgacttctggcattccgatcagtgcaacatgatcaatggaacttctgggcaaatgtggccgcccttcatgactcctgagtcctcgctggagttctacagcccggaggcctgccgatccatgaagctaatgtacaagggagtcaggggtgtttgaaggcatccccacctatcgcttcgtggctcccaaaaccctgtttgccaacgggtccatctacccacccaacgaaggcttctgcccgtgcctggagtctggaattcagaacgtcagcacctgcaggttcagtgcccccttgtttctctcccatcctcacttcctcaacgctgacccggttctggcagaagcggtgactggcctgcaccctaaccaggaggcacactccttgttcctggacatccacccggtcacgattatccccatgaactgctctgtgaaactgcagctgagcctctacatgaaatctgtcgcaggcattggacaaactgggaagattgagcctgtggtcctgccgctgctctggtttgcagagagcggggccatggagggggagactcttcacacattctgacactcagctggtgttggatgcccaaggtgatgcacttatgcccagtacgttccttcctgggcgctgggctggcgtcctgctgctggtccctgttcatcttgccaaatccggagccaagagaaatgctatttattttggagtagtagtaaaaagggctcaaaggataaggaggccattcaggctggttctgaataatccctgatgacatcagctcccaagggctctggtgctgcaggaagcaaaactgtaggggtcctgaaggacaccggtgaagnccagccaaggcctggccgctgggcttgaaccggccccccagcccctacaccccgtttttcccgggattttcccagcgggacagccccccaggccccacagcctgagcctcccagctgccatgtgcctgttgcacaccttgacacacccccctggcacacttacacacatgcgtgcaggcttgtggcagacactcagggatggagcttgctgctgaagggacttgtagggagaggctcgtcaacaagcactgttctggaaccttctttccacggtggcccacaggccttgaccacaggggctgtgggtcctgcgtccccttcctcgggtgagcctggcctgtcccgttcagccgttgggcccaggcttcctcccctccaaggtgaaacactgcagtcccggtgtggtggctccccatgcaggacgggccaggctgggagtgccgccttcctgtgccaaattcagtggggactcagtgcccaggccctgggcaacggagctttggccttggtctaccttccaaggcccaggccaaagcgcctttaacacaggcctcggaaaaaacaatggagtgaagcaacaaagatgccccttgtgcaagcttgcccgaaaggtctccgcccaaccccggcccgggactttgatccccccgaaagtcttcaacagggcactgcatcgtggttgtctggcgcccttttccctcccagcctaaactgacatctatcctatggactgaagccggccactcgtctggccgaagttggccgccaggctgtgcccccgagcttgcccccacccccttcacagggtccctcagattataaggtgcccgaggctgaggtgaagcagcctggggggccctgccttccgggcgctcctgggaccctgggggcaaacctgtgacccttttctactggaatagaaatgagttttatcatctttgaaaaataattccctcttgaagtaataaacgtttaaacaaaatgggaaaaaaaaaaaaaaaaa

SEQ ID NO: 136491 - DNA, 1712 bp, Homo sapiens
  misc_feature (1)...(1712): n = a,t,c or g
ggatccacgtcccacgggccggacccgcggccgcgttcggaaatcagcctgagcctgagtaccgctaaggctttaatcacgggtcccgagagccctaagtcttctctttgcttgctgatctcgtaccttaatgtgcaaaagaatcacgttgggaactgaaaattcagaatcctgggcctcactcccagaggatctgatctacatgtgtggagatgcccaggaatctgctttattctcttttgtcctcccacctgtccccccatttcagcacctcggtaacctctgccaaagtggctgtgaatggcgttcagctgcattaccagccactttggagagggagatcacgcagtccatgctacttcctgggatgttaggaagtggagagactgattttggacctcagctcaagaacctcaataagaagctcttcacggtggtcgcctgggatcctccgaggctatggacattccaggcccccagatcgcgatttcccagcagacttttttgaaagggatgcaaaagatgctgttgatttgatgaaggcgctgaagtttaagaaggtttctctgctggggtggagtgatgggggcataaccgcactcattgctgctgcaaaatatccatcttacatccacaagatgggtgatctgggggcgccaacgcctacgtcacttgacgaaagaccagcaggataatatgaggggcatccgaggatggtttctcaaatgggagttgaggggaaaaaggaaagcctctaggaagccctctatgggtatgactactttgccagaacctgtgaaaagtgggtggatggcataagaccagtttaaacatctcccagatggtaacatctgccggcacctgctgcccccgggtccaagtgccccccgcctttgattgtgcacgggtgagaaggatcctctggtcccacggtttcatgccgacttcattcataagcacgtgaaaggctcacggctgcatttgatgccagaaggcaaacacaacctgcatttgcgttttgcagatgaattcaacaagttagcatgaagacttcctacaatgagaatgcccactccagtcttggcgggtccttcttgcggggcttgatcgtgttgcctgccctgttaaacatgatgccctttgaaaactctccgccctttgaaaactttcctacccctccccttcaatccttatccctaacccaaatgaggaataatgacatattggaaaacagcctctaggcttcaggctgggcacggtggctcacagctataatctcagcactttgggaggctgaggtgggagaattgcctgagccccaggagttcaagacccaagnctgtgcaatatagggagactccgggctctacaaaaaaagagtttttcaaaattagccaggcgaagtggcacacatctgtggtcccaggtgctcaggaagctgaggtgggaggatcacttgagcccaattcaaagctgcagtgagctgtaattgcatcactgcactccaaccctgggcaacagagtaagaccttgtcttaaaaaaaaataaaaacataaaaaaaaataaaaaaggaataaagcctctaacttcaatagctatgaaaattaaatccgattttctaagatgaagttgtgacaagttataccattgtcttaacaggtgaattcctgccataatttattttcaaataaattttaggtggagaaaaaaa

SEQ ID NO: 136492 - DNA, 612 bp, Homo sapiens
atggacctctttaagtggtcaaaaactgtgaaggcatttgtatcccctgtgaatgctcaccaatgggtaacctcagcagaggaggatattaataatcaagtccataggatgacccgttctgtggacaccattcggcctctatccgcagccacccgtgtcatcgcccaatgggctcatgaacatagtagccatggtggcagtaatggaggtgatgcctgggctcagcaacatggacttccacttaccaaggctgacgtgactattgatgaacgactgcatatgggggggccaatgaccctgttccagattcagttcctgaatagtgttggagatctattggatctgattccctcactctctcccacaaaaaacggcagcctaaaggtttttaagagatgggacatgggacattgctccgctcttatcaaggtggcagatatctacctagcatctcagtacacatcctatgccataagtggtcccacagtacaaggtggcctccctgtttttcgctgggaccgtttcaacaaaactctacatcagggcatgccagaggtctacaactttgattttattaccatgaaaccaattttgaaacttgatataaaatga

SEQ ID NO: 136493 - DNA, 1893 bp, Homo sapiens
  misc_feature (1)...(1893): n = a,t,c or g
ggggccgcctgtatcccgcagaggaaggtcgcggccgtggagcgatgacccgcggcggtccgggcgggcgcccggggctgccacagccgccgccgcttctgctgctgctgctgctgctgcagctgttgttagtcaccgcggagccgccgaaacctgcaggagtctactatgcaactgcatactggatgcctgctgaaaagacagtacaagtcaaaaatgtaatggacaagaatggggacggcttatggcttttacaataactctgtgaaaaccacaggctggggcatcctggagatcagagctggctatggctctcaaaccctgaagcaatgagatcatcatgtttgtggctggctttttggaagggttacctcacttgccccacacatggaatggaccactaacacaaacctcttacccacagctgattcacgaaaccttccatcatggataaagttgcaggattttaatgggagaagcaagataagtggacccggaaaaatatcaaagaatacaagactgattcattttggaagacattacaggctatgtgatggcaccaatagatggcctcctatgtagggagccaagaagagggctatatttagaagggacaaagccaatgaccctgttccagattcagttcctgaatagtgttggagatctattggatctgattccctcactctctcccacaaaaaacggcagcctaaaggtttttaagagatgggacatgggacattgctccgctcttatcaaggttcttcctggatttgagaacatcctttttgctcactcaagctggtacacgtatgcagccatgctcaggatatataaacactgggacttcaacatcatagataaagataccagcagtagtcgcctctctttcagcagttacccagggtttttggagtctctggatgatttttacattcttagcagtggattgatattgctgcagaccacaaacagtgtgtttaataaaaccctgctaaagcaggtaatacccgagactctcctgtcctggcaaagagtccgtgtggccaatatgatggcagatagtggcaagaggtgggcagacatcttttcaaaatacaactctggcacctataacaatcaatacatggttctgggacctgaagaaagtaaagctgaaccacagtctttgacaaagggcactctgttacattgtgggagcaaattcctacatatgtaggaatatttctggaacaaacttgatgtttctacggggaaagggtttttgggccctcctacaatgttcctttccatgaaaaaatctacaactggagtggcctatcccactgttagttcagaaagctgggcttgggacctaccccttatgattttaggccccacgagccaaaaattttccggcgtgacccaagggaaagtgactgatacggcatcccatgaaatatatcatgcgatacaaccaattataaggaaggatccttacagtagaggtgacccccctgtaaatacccatcctgnctgcccgtgaggaccctgaaactcaccctaaccccaagtccccggaggttgttatgaccacaaaggtggcagatatcctaccctagcatcctcagtacacatccctatgcccataagtggtccccacagtacaaggtggcctccctgtttttcgctgggaccgtttcaacaaaactctacatcagggcatggcagaggtctacaactttgattttattaccatgaaaccaattttgaaacttgatataaaatgaaggagggagatgacggactagaagactgtaaataagataccaaaggcactattttagctatgtttttcccatcagaattatgcaataaaatatattaacttgtcactttcaaaaaaaaaaaaaa

SEQ ID NO: 136494 - DNA, 306 bp, Homo sapiens
attatagggggctatgcagaattcctgtaccaaattggcttgttggatgagaagcaaaaaaagtacttccagaagcagtgccatgaatgcatagaacacatcaggaagcagaactggtttgaggcctttgaagaacctgaggatcagctttactatgtgaaatttttgtcactcccagaggtgagacaagccatccacgtggggaatcagacttttaatgatggaactatagttgaaaagtacttgcgagaagatacagtacagtcagttaagccatggttaactgaaatcatgaataattataag

SEQ ID NO: 136495 - DNA, 1793 bp, Homo sapiens
gtaagttaaggtccccgtgcctgggtggggctgcctcacttctgcctgatttgggaatcgcttcaaggacaaccggctggggtccttgcgcgccgcggctcagggaggagcaccgactgcgccgcaccctgagagatggttggtgccatgtggaaggtgattgtttcgctggtcctgttgatgcctggcccctgtgatgggctgtttcgctccctatacagaagtgtttccatgccacctaaggggagactcaggacagccattatttctcaccccttacattgaagctggggagatccaaaagggaggagaattgagttcggtctggccctttcccaggactgagcatgaagaggtatcgccggcttcctcaccgtgaataacacttacaacagccacctcttcttctgggtcttcccaactcacatacagccagaagatgccccagtagttctctggctacagggtgggccgggaggttcatccatgtttggactctttgtgggaacatggggccttatgtttgttcacaagtaacatgacctttgcgtgacagagacttaccctggaccacaacgctctccatgctttatcattgacaatccagtgggcacagggcttcagttttactgatgatacccacggatatggcagtcaatgaggacgatgtaggcacgggatttatacagtgcactaatttcagtttttccagatatttcctgaatataaaaataatgacttttatgtcactggggagtcttatgcagggaaatatgtgccagccattgcacacctcatccattccctcaaccctgtgagagaggtgaagatcaacctgaacggaattgctattggagatggatattctgatcccgaatcaattatagggggctatgcagaattcctgtaccaaattggcttgttggatgagaagcaaaaaaaagtacttccagaagcagtgccatgaatgcatagaacacatcaggaagcagaactggtttgaggcctttgaaatacttggataaactacttagatggcgacttaacaagtgatcccttccttacttcccagaatgttacaggatgtagttaattactataactttttgcggtgcacggaacctgaggatcagctttactatgtgaaatttttgtcactcccagaggtgagaccagcccatcccacgttggggaatccagacttttaatggatggacctatagtttgaaaagtaccttgcggagaagataccagtaccagtccagttaagccatgggttaactgaaatccatgaataattatagggttctgatctaccaatggcccaactgggacatccatccgtggcagctgcccctgaccagagcgctcccttgatgggccatggactggaaaggatcccccggaatacaagaaggcagaaaaaaaaagtttggaagatctttaaatcctgacagtgaagtggcctggttacatcccggcaagtgggtgacttcccatcaggtaattattcgaggtggaggacatattttaccctatgaccagcctctgagagcttttgacatgattaatcgattcatttatggaaaaggatgggatccttatgttggataaactaccttcccaaaatgagaacatcaaagagttttcatttgctgaaagagaaaatcggtaaaaacacgaacaatgtcataggaaataaaaaaacttatcttttcaatatctgcaagattttttttcatgcaataaaaattatccttgaaaccacaaaaaaaaaaaaaagggcggccgct

SEQ ID NO: 136496 - DNA, 654 bp, Homo sapiens
tcagtggcactcaacacccgaaaattgtggagcatgcaccttcatgttcaagcaaagttgctccaagaaatagttcgctctttctctggcacaacctgccagcccattcaacatatgttacggcgtatttgtgttcaattgtgtgaccttgcctcaccaactgcacttctgattatgagaactgtgttggatttgattgtagaagacttgcaaaggtattttcattttgcattaaaaattttttcctcaaattatttttgacacatatattttttcccttacaatttggaaactagggtttggaatgcccagataacatatatacatgtaaatatacacatatacctacatatgcacacatatgaatatatgaatacttgtagacttttaaaattagaaagctttatttcatcatttcatgtgcaagatatcttgaaggtcttgatttgggattttcaaatggtgaatcctaaagaagtactgtgatttaagaaaatatattattagaaacctgaatttataaaatttttgcagtcattgtaaaattccagagaatttgtcattatacccaaggaattaaatgttttatgcaaaatttgtgtaagttgatgtgtattgacaaataaatactagtttaccaatgaaaatatatag

SEQ ID NO: 136497 - DNA, 3378 bp, Homo sapiens
atggacaacttcttcgccccggttttcaccatgggcaaatattatacgcaaggcgacaaggtgctgatgccgctggcgattcaggttcatcatgccgtttgtgatggcttccatgtcggcagaatgcttaatgaattacaacagtactgcgatgagtggcagggcggggcggattttgccgatttcggaaccaccatcaaacaggattttcgcctgctggggcaaaccagcgtggaccgcttgctgcaactctctcagggccaggcggtgaagggcaatcagctgttgcccgtctcactgagaaaacagaacacaagtagaccaccatctatgcatgtggatgactttgttgctgctgaaagtaaagaagtggttcctcaagatggaatacctccaccaaaacggccactcaaagtatcacagaagatttcttcccgtgtggaaaatctgaatacattgaacctgccaaaagagctcatgttgtgccaccaccaagaggaaggggcaggggaggatttggacagggtatacgacctcatgatatttttcgtcagagaaaacagaacacaagtagaccaccatctatgcatgtggatgactttgttgctgctgaaagtaaagaagtggttcctcaagatggaatacctccaccaaaacggccactcaaagtatcacagaagatttcttcccgtggtgggttttcaggcaatagaggaggacggggtgctttccacagtcagaataggtttttcacaccacctgcttcaaaaggctttgcagaactttcagcggtataccggcatacagcatgtgcatcgcataggaatggcggaacgtatgtggtgtgaccggaacagagaacgtcacaccgtcagcagcagcggcggcaaccgcctccccaatccagggccaggcggtgaagggcaatcagctgttgcccgtctcactggtgaaaagaaaacccaccctggcgcccaatacgcaaaccgcctctccccgcgcgttggccgattcattaatgcagctggcacgacaggtttcccgactggaaagcgggcagtgagcgcaacgcaattaatggattttgccgatttcggaaccaccatcaaacaggattttcgcctgctggggcaaaccagcgtggaccgcttgctgcaactctctcagggccaggcggtgaagggcaatcagctgttgcccgtctcactggtgaaaagaaaaaccaccctggcgcccaatacgcaaaccgcctctccccgcgcgttggccgattcattaatgcagctggcacgacaggtttcccgactggaaagcgggcaggattttgccgatttcggaaccaccatcaaacaggattttcgcctgctggggcaaaccagcgtggaccgcttgctgcaactctctcagggccaggcggtgaagggcaatcagctgttgcccgtctcactggtgaaaagaaaaaccaccctggcgcccaatacgcaaaccgcctctccccgcgcgttggccgattcattaatgcagctggcacgacaggtttcccgactggaaagcgggcaggattttgccgatttcggaaccaccatcaaacaggattttcgcctgctggggcaaaccagcgtggaccgcttgctgcaactctctcagggccaggcggtgaagggcaatcagctgttgcccgtctcactggtgaaaagaaaaaccaccctggcgcccaatacgcaaaccgcctctccccgcgcgttggccgattcattaatgcagctggcacgacaggtttcccgactggaaagcgggcaggattttgccgatttcggaaccaccatcaaacaggattttcgcctgctggggcaaaccagcgtggaccgcttgctgcaactctctcagggccaggcggtgaagggcaatcagctgttgcccgtctcactggctatcagagatgccgagaaagcagggcgactcccgcacccggatatggaaattcgaggacgggttgagcaacgtgttggttatacaattgaacaaattaatcatatgcgtgatgtgtttggtacgcgattgcgacgtgctgaagacgtatttccaccggtgatcggggttgctgcccataaaggtggcgtttacaaaacctcagtttctgttcatcttgctcaggatctggctctgaaggggctacgtgttttgctcgtggaaggtaacgacccccagggaacagcctcaatgtatcacggatgggtaccagatcttcatattcatgcagaagacactctcctgcctttctatcttggggaaaaggacgatgtcacttatgcaataaagcccacttgctggccggggcttgacattattccttcctgtctggctctgcaccgtattgaaactgagttaatgggcaaatttgatgaaggtaaactgcccaccgatccacacctgatgctccgactggccattgaaactgttgctcatgactatgatgtcatagttattgacagcgcgcctaacctgggtatcggcacgattaatgtcgtatgtgctgctgatgtgctgattgttcccacgcctgctgagttgtttgactacacctccgcactgcagtttttcgatatgcttcgtgatctgctcaagaacgttatcttaaagggttcgagcctgatggattttgccgatttcggaaccaccatcaaacaggattttcgcctgctggggcaaaccagcgtggaccgcttgctgcaactctctcagggccaggcggtgaagggcaatcagctgttgcccgtctcactggtgaaaagaaaaaccaccctggcgcccaatacgcaaaccgcctctccccgcgcgttggccgattcattaatgcagctggcacgacaggtttcccgactggaaagcgggcaggattttgccgatttcggaaccaccatcaaacaggattttcgcctgctggggcaaaccagcgtggaccgcttgctgcaactctctcagggccaggcggtgaagggcaatcagctgttgcccgtctcactggtgaaaagaaaaaccaccctggcgcccaatacgcaaaccgcctctccccgcgcgttggccgattcattaatgcagctggcacgacaggtttcccgactggaaagcgggcaggattttgccgatttcggaaccaccatcaaacaggattttcgcctgctggggcaaaccagcgtggaccgcttgctgcaactctctcagggccaggcggtgaagggcaatcagctgttgcccgtctcactggtgaaaagaaaaaccaccctggcgcccaatacgcaaaccgcctctccccgcgcgttggccgattcattaatgcagctggcacgacaggtttcccgactggaaagcgggcagtga

SEQ ID NO: 136498 - DNA, 651 bp, Homo sapiens
gagtgtctctgcgtctcgacggctgtacgaattcggcacgagcttaaaactatgttaacggaactcctgagaggtggatcctttgagtttaaggacatgcgtgttccttcagcgcttgttactttacatatgctcctgtgctctatccccctctcaggtcgtttggatagtgatgaacagaaaattcagaatgatatcattgatattttactgacttttacacaaggagttaatgaaaaactcacaatctcagaagagactctggccaataatacttggtctttaatgttaaaagaagttctttcttcaatcttgaaggttcctgaaggatttttttctggactcatactcctttcagagctgctgcctcttccattgcccatgcaaacaactcaggtatcacttccatataacatgcatcttataaatgactgcagtaacactttttaaaaagccagtgattctgttaaaaaacaaaaaccctcatctcccttcctcccaaaaagacataaaataaccggatgagggggagataaaactgaaacaagttggtcattgaggaaatatgggggtaaaaattttaaataaatttttgttaaagtgagttttattttgctgttttgtatgtttgtacttacatttttctgttat

SEQ ID NO: 136499 - DNA, 3175 bp, Homo sapiens
cgtcagccaacgcgcccccgtacgtgtgtctgaatgttgatgcccaccttcttttgttgaaggtcaccagaaagatctgaagggaggtgttgccgttattcagcttttttctgctgaaggaatggacacgtttattcgagttctgcaaaaattgaacagtattctgactcagccttggaggctccatgtcaacatggggactacccttcacagagttactactatttcaatggctcgctgcacactcactcttcttaaaactatgttaacggaactcctgagaggtggatcctttgagtttaaggacatgcgtgttccttcagcgcttgttactttacatatgctcctgtgctctatccccctctcaggccgtttgaatagtgatgaacagaaaattcagaatgatatcattgatattttactgacttttacacaaggagttaatgaaaaactcacaatctcagaagagactctggccaataatacttggtctttaatgttaaaagaagttctttcttcaatcttgaaggttcctgaaggatttttttctggactcatactcctttcagagctgctgcctcttccattgcccatgcaaacaactcaggttattgagccacatgatatatcagggggcactcaacaccccgaaaattgtggagcatgcaccttcatgttcaagcaaagttgctccaagaaatagttcgctctttctctggcacaacctgccagcccattcaacatatgttacggcgtatttgtgttcaattgtgtgaccttgcctcaccaactgcacttctgattatgagaactgtgttggatttgattgtagaagacttgcaaagcacttcagaagataaagaaaaacagtatactagccaaaccaccaggttgcttgctcttcttgatgctctggcttcacacaaagcttgtaaattagctattttgcatctaattaatggaactattaaaggtgatgaaagatatgcagagatattccaggatcttttagctttggtgcggtctcctggagacagtgttattcgccaacagtgtgttgaatatgtcacatccattttgcagtctctctgtgatcaggacattgcacttatcttaccaagctcttctgaaggttctatttctgaactggagcagctctccaattctctaccaaataaagaattgatgacctcaatctgtgactgtctgttggctacgctagctaactctgagagcagttacaactgtttactgacatgtgtcagaacaatgatgtttcttgcagagcatgattatggattatttcatttaaaaagttctttaaggaaaaacagtagtgctctgcataagttactgaaacgagtggtcagcacatttagtaaggacacaggagagcttgcatcttcatttttagaatttatgagacaaattcttaactctgacacaattgggatgctgtgggagatgataatgggtctcatgggaagtaggaggggagctcatacatcacggacgatgagtattaatgctgcagagttaaaccagcttctacagagcacagaagaaagtccagaggacttgttccttgaactagagaagcttgatttggaacattcaaaagatgatgacaatctgtattctttgttggactagtgacgtggacttaagcagatgctggagtcatcaggtgaccctttacctctcagtgaccaggatgtagaaccagtactttcagctccagaatctcttcagaatctgtttaacaataggactgcctatgtgcttgctgatgtcatgggatgatcagttgaaatctatgtggttcactccatttcaggctgaaggagataggtacagatctggatttggtaaaggttgacttaattgaactctctgaaaaatgctgtagtgactttgatttgcactcagaatttagagcgctcatttttgtcagaaccatcatctccaggaagaaccaagactactaaaggattcaaacttgggaagcacaagcatgagacctttataacgtcaagtggaaaatctgaatacattgaacctgccaaaaaagagttcatgttgtgcccaccaccaagaggaaggggcaggggaggatttggacagggtatacgacctcatgatatttttcggtcagagaaaacagaacacaagtagaccacccatctatgcatgtggatgactttggttgctgctgaaaagtaaagaagtggttcctcaagatggaatacttcccacccaaaccgcccactcaaagtatcacagaggatttcttcccgtgtggggttttcaggcaatagaggaggacggggtgctttccacagtcagaataggtttttcacaccacctgcttcaaaaggaaactacagtcgtcgggaaggaacaagaggctccagttggagtgctcagaatactcctcgaggaaattacaatgaaagtcgtggaggccagagcaattttaacagaggccctcttccacaattaatgaccccttaagttccctacaggttaacccgcccccaagtccctcgggacccgtgcttcctagatggtccgtgggggaccttgggaccttccctgggcttagtgcaaaattagcggcaagtggaggctcaagaggaaagtttgttagtggaggtcagtggtagaggtccgtcatgtacgtctcctttacacgataaaaatccttttgggaacatcttaactgtatatgaacatttcacgaggacaataaaaataagacattgaaggaccaatttagacttagcagttatctggagacatctgagagaatatttttatctgaagaaagcagaatttgtttggatacctaacaagatttcaataaaaatcccaaactttgtatgtacgtttgtatatattttcccttttttgtatgactatttatttagaaaatttctaggtgaaaaactaaatgatgttttgtatttttcttgcctatagcacagatattctcaaactttctcagctcatgacactatttagtgcctcagtacttttttcacagcatacctggtccaaaagaaatatctaatacttgtgtttattaagcagttagatccaacagcttaataagaatgtacatcatcaccactagtaactgtggacactgcatgtctcaaaccttggaatcagt

SEQ ID NO: 136500 - DNA, 3293 bp, Homo sapiens
gtttttttttttttttttggagacagtcttactctgtcgggggtggggtgggggggaaagagaaaaataatacttcctaatatgttgcaaacaaagacctttaccaatccaagtgttaaaaagaagcctgttgctacagtgccatttacaattaggtttgtttatatgaagcaaattttacatgtggactgggaaattagaagactttttgtttccagtctgccctgttttactttgtttttttctgagtctcggctctactgctaactagctatatgattttggctaaggcacttgaaatcccatgggccacaagatgatgcaatgggaaatgaatttcatcctttcttacagcctgacaatctgacaatatttgcaacctctatttgtttcaatggcaaactggttgtgacatgatacatgtgcgaaaggtgattttttttgttccaaattagtatccttttaggtaaattctgtattgcccatatgctgtaattgtagttaaaatattagtgttaataaaataaaaaatttaataatgtcacgttagagtggtaagggcttaggggtagttataggtagtattaggagtagttagaaattacttatttttgtaggcttgtttccaagttatcagcagttgaaagggatgtttccaaaaggacgtggtaaatggcaataaaacaggataaaggaaagatcaaaacaaggctgtggaccaaactataaatccaagagctttgattattatttttttttttctttttggagacagtcttactctgtcgcccaggctggagtgcaatggcgcaatctctgctcactgcaagctccgcctcccgggctcaggtcattctcctgcctcagcctcccgagttcccaagtagctgggactacaggcacccaccaccacgcccggccagttttttgtatctttagtacagacagggtttcactgtgttagccagggatggtctccatctcctaacctcgtgatccgcccgcctcagcctcccaaagtgctggggattacaggcgtgagccaccgcggcccagccagctttgactatttttatacttcctcacaattcttaaggcacttcttaggcagagcacaaaaacaaaaacaaaaaaaaaaaacttagaaatatatgaatgcaagagatgggaagaggaaagaccatttcccaactagctcagagtaggcctgatcgtaactccaaacagttcacaaaattctcttaggctgaaactattcatctttcctaaatgtccctcatgtctgctaaaatcactttcccaaatgccttgtatctaggaatctgatgcctactgagcataccttttatcaaattaatagtgactcaatctcccattactggaaagcaggcactttaaccttgtagctctaaacagaaatagtttttactgattcagttggaaaacccagcaatttaacaaaaagggggaggggcagcccaatagcatttggaaaatgttaaattttattatttaacattctttaccattatagttactgcacataagactattactactaaaggtcacttcagagtccctgcaaaatggcctggaattttggcagcacccattttacacaatatttctttttccacaaaataacagacataccagggaaaatcatttcagctaaaaatatgagtgaggtggtagaagaaatatcatcccttataaagcgcaatgttaggaataggtacttgaggaaagcagggattgttttaaggttcccaaggattttaaccaaactttactggttcaggcatcatattcaaggcctaaaagggaaggatagggattttcaaggatatatttcccaacttctttaacatggcaccatggatgaaatgtttcctcaagcactgtgctgcttcacttggaaattaaggatgaaattgggaaggagacagtatgacataggtgggtatgttgggtggtgaggggaaccaagttctcaatagtcctcaactccactccagctgttccctgttccacacgggtccactgagctggcccagtccctttcactcagtgtgtcaccaaaggcagcttcaaggctcaatggcaagagaccacctataacctcttcaccttctgctgccctctttctgctgccactgaactgccatggccatctgcctatagcccgcattgtcctcagtgtgtccaggccccagacaaggaaggggagcccatggtgagactccaattccccagggccttaaacccttaaccctagaacctgttgcctctagcatccatttatttatctacctacctaatagctatctaccagtcactaaaccatggtgagattctaaccatgtctagcacctgatgctagagataattttgttgaatcccttcaattataaacagctgagttagctggacaaggactagggaggcaatcagtattatttattcttgaacaccatcaagtctagacttggtggcttcatatttctatcataatccctgggggtaagaaatcatatagtcccaggttgggaaggggaaaacggtttgcaacattcgtcctccttgtaggaggcgagctctgtctcactagctatgcccctccatcaattcaccctatactcagatcagaagctgagtgtctgaattacagtatattttctaaattcctagcccctgctggtgaatttgccctcccccgctcctttgacaattgtccccgtgttcgtctccgggccctgagactggccctgcttatcttgctgaccttcatcctctgctggacaccttattacctactgggtatgtggtactggttctccccccaccatgctaactgaagtccctcccagcctgagccacatccttttcctcttgggcctcctcaatgctcctttggatccctctccctcctatggggccttcacccttggctgccgaagagggcaccaagaacttagtatagactcttctaaagaagggtctgggagaatgctccaagaggagattcatgcctttagacagctggaagtacaaaaaactgtgacatcaagaagggcaggagaaacaaaaggcatttctataacatctatctgatcctaacagagtatgtaggaacagaatagtaagtctttagtgccataagatcttaacatctcacttctactcctgctctcctagttccccccaaaaaagaaatactgaccagtgtctctactttaaaccctacctgaaacttgagactatgtctaatatagaaactcacataactagcc

SEQ ID NO: 136501 - DNA, 409 bp, Homo sapiens
ccttgtcttctgcgcagaaagatgatgccaactgagtgtgttctccactgagtggcacagaggcttttaacacatggggcagcataatgacacagggaagggatgactgtcttcggagacattcactcactgcggttgctgttgacagtcagtgattctctgctcggggtgttcagggacagatgccttagttactaactagaaggggaagatcctgtttctgaatactgacttgggtttcattgcagtgttattaaggaaaagcgggatgcctatgtgagccgcctgaatgccatctatcaaaacaatctcaccaaggtgtgtatgctgggtttttaactttgagaaagagctgttcccttcttgagtactcagctaagtcttgccagactgtagccctggttagttg

SEQ ID NO: 136502 - DNA, 1452 bp, Homo sapiens
atggccctgctgccccgagccctgagcgccggcgcgggaccgagctggcggcgggcggcgcgcgccttccgaggcttcctgctgcttctgcccgagcccgcggccctcacgcgcgccctctcccgtgccatggcctgcaggcaggagccgcagccgcagggcccgccgcccgctgctggcgccgtggcctcctatgactacctggtgatcgggggcggctcgggcgggctggccagcgcgcgcagggcggccgagctgggtgccagggccgccgtggtggagagccacaagctgggtggcacttgcggcctggggaacttgcggtcctgggttcctgctgagtgtactgattctgtgataagaataaccaggttcctgtggttttggcgagtagtacttaccaatgagagttgggtagtaagggttgatcatgtgacaaaagttcatgattgccaagtcacagtgaactatgctgcacagcagcagttggagaggcctaggggagagagaggtcagctagagcagcagtccccagcctttttggcaccaggaaccagttttgtggaagacaatttttccacggaccagcagtggggcacctggcggtcagggagccctgagctagagaaaggggaaagaaggctgagtgcggtggctcatgcttgtaattccaacttttgggaggctaacgtgaatgttggatgtgtacccaaaaaggtaatgtggaacacagctgtccactctgaattcatgcatgatcatgctgattatggctttccaagttgtgagggtaaattcaattggcgtgttattaaggaaaagcgggatgcctatgtgagccgcctgaatgccatctatcaaaacaatctcaccaagtcccatatagaaatcatccgtggccatgcagccttcacgagtgatcccaagcccacaatagaggtcagtgggaaaaagtacaccgccccacacatcctgatcgccacaggtggtatgccctccacccctcatgagagccagatccccggtgccagcttaggaataaccagcgatggattttttcagctggaagaattgcccggcgtcattgttggtgcaggttacattgctgtggagatggcagggatcctgtcagccctgggttctaagacatcactgatgatacggcatgataagatcaaccatggcacagtgggaacagatgacggcacaaggtctgaatatcgggagagagggatcgttgaggtctgtcttggaggctggctcccactctgctctctatcccccaaaaatccacagtcctcccacatgatgagtacagtgtccacagttattcctatgtcctccagcgactggcctccctccactgccagaggccgtctgggaaaggaagtagaaaggctgtatagagatatgtggtacccaattctcgtcatccagtcaaataagacctag

SEQ ID NO: 136503 - DNA, 2007 bp, Homo sapiens
atggccctgctgccccgagccctgagcgccggcgcgggaccgagctggcggcgggcggcgcgcgccttccgaggcttcctgctgcttctgcccgagcccgcggccctcacgcgcgccctctcccgtgccatggcctgcaggcaggagccgcagccgcagggcccgccgcccgctgctggcgccgtggcctcctatgactacctggtgatcgggggcggctcgggcgggctggccagcgcgcgcagggcggccgagctgggtgccagggccgccgtggtggagagccacaagctgggtggcacttgcggcctggggaacttgcggtcctgggttcctgctgagtgtactgattctgtgataagaataactaggttcttgtggttttggcgagtagtacttaccaatgagagttgggtagtaagggttgatcatgtgacaaaagttcatgattgccaagtcacagtgaactatgctgcacagcagcagttggagaggcctaggggagagagaggtcagctagagcagcagtccccagcctttttggcaccaggaaccagttttgtggaagacaatttttccacggaccagcagtgggtcagaggcgctgaagtcatgtcatgttgctggcatgtaaataggcctctaaaagcagtggaaatccctggaggcctgttcacaggagctggcaaaataggacagtggtatttcagggtcataggcttcctttcaaccagtgccccaggccccaaagtgaatgttggatgtgtacccaaaaaggtaatgtggaacacagctgtccactctgaattcatgcatgatcatgctgattatggctttccaagttgtgagggtaaattcaattggcgtgttattaaggaaaagcgggatgcctatgtgagccgcctgaatgccatctatcaaaacaatctcaccaagtcccatatagaaatcatccgtggccatgcagccttcacgagtgatcccaagcccacaatagaggtcagtgggaaaaagtacaccgccccacacatcctgatcgccacaggtggtatgccctccacccctcatgagagccagatccccggtgccagcttaggaataaccagcgatggattttttcagctggaagaattgcccggcgtcattgttggtgcaggttacattgctgtggagatggcagggatcctgtcagccctgggttctaagacatcactgatgatacggcatgataaggtacttagaagttttgattcaatgatcagcaccaactgcacggaggagctggagaacgctggcgtggaggtgctgaagttctcccaggtcaaggaggttaaaaagactttgtcgggcttggaagtcagcatggttactgcagttcccggtaggctaccagtcatgaccatgattccagatgttgactgcctgctttgggccattgggcgggtcccgaataccaaggacctgagtttaaacaaactggggattcaaaccgatgacaagggtcatatcatcgtagacgaattccagaataccaacgtcaaaggcatctatgcagttggggatgtatgtggaaaagctcttcttactccagttgcaatagctgctggccgaaaacttgcccatcgactttttgaatataaggaagattccaaattagattataacaacatcccaactgtggtcttcagccacccccctattgggacagtgggactcacggaagatgaagccattcataaatatggaatagaaaatgtgaagacctattcaacgagctttaccccgatgtatcacgcagttaccaaaaggaaaacaaaatgtgtgatgaaaatggtctgtgctaacaaggaagaaaaggtggttgggatccatatgcagggacttgggtgtgatgaaatgctgcagggttttgctgttgcagtgaagatgggagcaacgaaggcagactttgacaacacagtcgccattcaccctacctcttcagaagagctggtcacacttcgttga

SEQ ID NO: 136504 - DNA, 1631 bp, Homo sapiens
gagcgccggcgcgggaccgagctggcggcgggcggcgcgcgcttccgaggcttcctgctgcttctgcccgagcccgcggcctcacgcgcgccctctcccgtgccatggcctgcaggcaggagccgcagccgcagggcccgccgcccgctgctggcgccgtggcctcctatgactacctggtgatcgggggcggctcgggcgggctggccagcgcgcgcagggcggccgagctgggtgccagggccgccgtggtggagagccacaagctgggtggcacttgcgtgaatgttggatgtgtacccaaaaaggtaatgtggaacacagctgtccactctgaattcatgcatgatcatgctgattatggctttccaagttgtgagggtaaattcaattggcgtgttattaaggaaaagcgggatgcctatgtgagccgcctgaatgccatctatcaaaacaatctcaccaagtcccatatagaaatcatccgtggccatgcattctttatcgagtgatcccaagcccacaatagaggtcagtgggaaaaagtacaccgccccacacatcctgatcgccacaggtggtatgtcccttccacccctcattgagagccgagatcccgcggtgccagcttatgaataaccagcgatggattttttcagctggaagaaattgtcccggccgcagcgtcattggttggtgcacggttaccattgtctgtggagatggcagggatcctcgtcagccctgggttctaagacatcactgatgatacggcatgattaaggtacttagaagttttgattcaatgatcagcaccaactgcacggaggagctggagaacgctggcgtggaggtgctgaagttctcccaggtcaaggaggttaaaaaggctttggtcgggtttggaagccagcatggttactgcagttcccggtaggctaccagtcatgcccatgattccagatgttgactgcctgctctgggccattggcggggtcccgaataccaaggacctgagtttaaacaaactggggattcaaaccgatgacaagggtcatatcatcgtagacgaattccagaataccaacgtcaaaggcatctatgcagttggggatgtatgtggaaaagctcttcttactccagttgcaatagctgctggccgaaaacttgcccatcgactttttgaatataaggaagattccaaattagattataacaacatcccaactgtggtcttcagccacccccctattgggacagtgggactcacggaagatgaagccattcataaatatggaatagaaaatgtgaagacctattcaacgagctttaccccgatgtatcacgcagttaccaaaaggaaaacaaaatgtgtgatgaaaatggtctgtgctaacaaggaagaaaaggtggttgggatccatatgcagggacttgggtgtgatgaaatgctgcagggttttgctgttgcagtgaagatgggagcaacgaaggcagactttgacaacacagtcgccattcaccctacctcttcagaagagctggtcacacttcgttgagaaccaggagacacgtgtggcgggcagtgggacccctagatcttctgaattgaaacaaataatcacattgac

SEQ ID NO: 136505 - DNA, 464 bp, Homo sapiens
  misc_feature (1)...(464): n = a,t,c or g
ttgacccgtcgcctgagtagaggccctaattccgggctatcaggacgnnnttgcgggcgcgcgcacgcaaggacgtacttcttctatcgtgcctactaaaaccgatccactggccgactcattacaccaggaannnnnnnnnnnnnnnnnnnnnnnnnnnnnnnnnnnnnnnnnnnnnnnnnnnnnnnnnnnnnnnnnnnnnnnnnnnnnnnnnnnnnnagaccgaattccagaaaaggctgtctgatttcaaactctacgaaagcgaactgactctgttcagctccccgttctccacgaagatcgacagtgtgcacgaggagctccagatggaggttatcgacctgcaatgcaacacggtcctgaagacgaaatacgacaaggtgggaataccagaattctacaagtacctctggggtagctacccgaaatacaagcaccattgcgcaaagattctttccatg

SEQ ID NO: 136506 - DNA, 1184 bp, Homo sapiens
attccactccgctggtcccttcagaagaaccaaatgaggaccctgaagccgaggtgaaaatcgaaggaaacacaaattcatccagtgttacaaattctgcagcaggtgttgaagatcttaacatcgttcaagtgactgttccagataatgagaaggaaagattatcaagcattgaaaagattaaacagctaagagaacaagttaatgacctctttagccgaaaatttggtgaagcaattggcgtggatttccctgtgaaagttccctacaggaagatcacattcaaccctggctgtgtggtgattgatggcatgcccccgggggtggtattcaaggcccccggctatctggaaatcagttccatgaggaggatcttggaggcagctgagtttatcaaattcacagtcatcagaagctctttaaaatacctaggaatccaacttacaagggatgtgaaggacctcttcaaggagaactacaaaccactgctcaaggaaataaaagaggacacaaacaaatggaagaacattccatgctcatgggtaggaagaatcaatatcgtgaaaatggccatactgcccaaggtaatttacagattcaatgccatccccatcaagctaccaatgactttcttcacagaattggaaaaaactactttaaagttcatatggaaccaaaaaagagcccgcattgccaagtcaatcctaagccaaaagaacaaagctggaggcatcacactacctgacttcaaactatactacaaggctacagtaaccaaaacagcatggtactggtaccaaaacagagatatagatcaatggaacagaacagagccctcagaaataatgccgcatatctacaactatctgatctttgacaaacctgagaaaaacaagcaatggggaaaggattccctatttaataaatggtgctgggaaaactggctagccatatgtagaaagctgaaactggatcccttccttacaccttatacaaaaatcaattcaagatggattaaagatttaaacgttaaacctaaaaccataaaaaccctagaagaaaacctaggcattaccattcaggacataggcgtgggcaaggacttcatgtccaaaacaccaaaagcaatggcaacaaaagacaaaattgacaaatgggatctaattaaacatattatcaaataa

SEQ ID NO: 136507 - DNA, 1015 bp, Homo sapiens
agctacaaatgtatttttctttttttaaaaaatattctttatttcttctaaaaaaaaaaagggggggatacatctgcagaatgtgcaggtttgtttcctaggcacatgtgtgccacaatggcttgctgcacctattggcccatcctctaagttccctcccctcacccaaattcaagttttgtttttttttttttgagacggagtcttgctcagtcgcccagtctggagtgcagtggcgcgatctccgctcactgcaagctccacctcccgggttcacgccattctcctgcctcagacacccgagtagctgggactacaggcgcccgccaccacgcccggctaatttttttttgtatttttagtacagactgggcttcaccgtgttagccaggatggtcgcgatctcctgacctttgtgatccacctgcctcagcctcccaaagtgctgggattacaggtgtgagccatcacgcccggcccccaattcaagttttaatgaagaagaagtggttcagcagctcagaagagccaccaaacctgagaagctgtcacttacccagctgactctctggtcctaggaagggtctgcaagaaaagcaacaccattacccagcacggaccaatgaaaaaagcatgacacatctgaacagtcagctctgaaacgcagcaggcgggatgcacgagtgaattaaaattaggctattggtttcatctttaaatgaactgaaggggcgggggtgcagagtgtgtcacctatttatgatgaatgaaatccctgctttgttctccaaaatccatttcagggttgcaaggtcgtaattctcagggtgttgaaaggcaacgccttccggaagcccctgcactaccacagccgactggtctcgcagcatcttctcatagggaacaggcaccatcactgttgtccctaaggctttacctacaagaagacgcaaacgtctttggatggtgtgaacctaacgttctacccgtttttttttgtttgttttttgttttt

SEQ ID NO: 136508 - DNA, 3789 bp, Homo sapiens
atggtgtggggaatgtctcccaacaagacaccttatcaagcgctctctctccactctgctgttcctaccacatattcccaggcagatgatgattattctccaccgtctaagagaccaaaggccaatgagctaccgcagccaccagtcccggaacccgccaatgctgggaagcggaaagtgagggagttcaacttcgagaaatggaatgctcgcatcactgatctacgtaaacaagttgaagaattgtttgaaaggaaatatgcggaagccttggggagcactgaagccaaggctgtaccgtaccaaaaatttgaggcacacccgaatgatctgtacgtggaaggactgccagaaaacattcctttccgaagtccctcatggtatggaatcccaaggctggaaaaaatcattcaagtgggcaatcgaattaaatttgttattaaaagaccagaacttctgactcacagtaccactgaagttactcagccaagaacgaatacaccagtcaaagaagattggaatgtcagaattaccaagctacggaagcaagtggaagagatttttaatttgaaatttgctcaagctcttggactcaccgaggcagtaaaagtaccatatcctgtgtttgaatcaaacccggagttcttgtatgtggaaggcttgccagaggggattcccttccgaagccctacctggtttggaattccacgacttgaaaggatcgtccacgggagtaataaaatcaagttcgttgttaaaaaacctgaactagttatttcctacttgcctcctgggatggctagtaaaataaacactaaagctttgcagtcccccaaaagaccacgaagtcctgggagtaattcaaaggttcctgaaattgaggtcaccgtggaaggccctaataacaacaatcctcaaacctcagctgttcgaaccccgacccagactaacggttctaacgttcccttcaagccacgagggagagagttttcctttgaggcctggaatgccaaaatcacggacctaaaacagaaagttgaaaatctcttcaatgagaaatgtggggaagctcttggccttaaacaagctgtgaaggtgccgttcgcgttatttgagtctttcccggaagacttttatgtggaaggcttacctgagggtgtgccattccgaagaccatcgacttttggcattccgaggctggagaagatactcagaaacaaagccaaaattaagttcatcattaaaaagcccgaaatgtttgagacggcgattaaggagagcacctcctctaagagccctcccagaaaaataaattcatcacccaatgttaatactactgcatcaggtgttgaagaccttaacatcattcaggtgacaattccagatgatgataatgaaagactctcgaaagttgaaaaagctagacagctaagagaacaagtgaatgacctctttagtcggaaatttggtgaagctattggtatgggttttcctgtgaaagttccctacaggaaaatcacaattaaccctggctgtgtggtggttgatggcatgcccccgggggtgtccttcaaagcccccagctacctggaaatcagctccatgagaaggatcttagactctgccgagtttatcaaattcacggtcattagagtcttcctgaaacacagctacacccgtattatccatggctgctttcctgtcacagctcagaggctcaggcaagagctacagatgctcatgaccgaatgtctcacctgggccaggaatggcagcagcaagcaccctctcagcctagcccagaagccagagttcctatttcatcagttgcaaagcagagacaatgccatctgcccgatagcagagcaaaaggcaggtaaagccttagggacaacagtgatggtgtctgttccctatgagaagatgctgcgagaccagtcggctgtggtagtgcaggggcttccggaaggcgttgcctttcaacaccctgagaattacgaccttgcaaccctgaaatggattttggagaacaaagcagggatttcattcatcataaatagacccttcctaggaccagagagtcagctgggtggccctgggatggtaacagatgcggagagatccatagtatcaccaagtgaaagctgcggccccatcaatgtgaaaactgaacccatggaagattctggaagccacccttcttccacaagcaatgaagtaatagaaatggaattaccaatggaagattccactccgctggtcccttcagaagaaccaaatgaggaccctgaagccgaggtgaaaatcgaaggaaacacaaattcatccagtgttacaaattctgcagcaggtgttgaagatcttaacatcgttcaagtgactgttccagaacctgctaaggccatcaaacctattgatcggaagtcagtccatcagatttgctctgggccggtggtactgagtctaagcactgcggtgaagaagatagtaggaaacagtctggatgctggtgccactaatattgatctaaagcttaaggactatggaatggatctcattgaagtttcaggcaatggatgtggggtagaagaagaaaacttcgaaggcttaactctgaaacatcacacatctaagattcaagagtttgccgacctaactcgggttgaaacttttggctttcgggggaaagctctgagctcactttgtgcactgagtgatgtcaccatttctacctgccacgtatcggcgaaggttgggactcgactggtgtttgatcacgatgggaaaatcatccagaaaaccccctacccccaccccagagggaccacagtcagcgtgaagcagttattttctacgctacctgtgcgccataaggaatttcaaaggaatattaagaaggtaattgcgcgacgtattatcgattatcgctacgacatgccctatgtacgggaaacgtatcaggacagcggcctgacttttacgatcgagcagcatgaagatttaaactgtgcgaccttgccattgtacttctccaaagctagtgtcttcaccgctctgcaaaatatggcaaagtcaacggtagctctcatcaccactgcggcccgagaccggagctcggccggcgcgggggcggcggcgcgggcgggccgacaaaagggaggagcccgccaattgcaaggggagcgcgggcgagggagcagcgccgcagagcagcagccgaggggcgagcggcggagcagccggcgcgcgggtgccggcgcggggagcagctggtgttcgctgtaacaaacaacttgccactcaaacgccggtccccgctgcgcatgcgcggtccgcgcgcggcctgccaggacttgtagtccgcctgggggggctcccccggtgctgctgctgctgctgctgttgctgctgttgctgccgcgggggctgggcggccggagctaccggcagcccggtgcacgggaaatgcaggagcgcgggcaccctcaggaccacggggaaggccgaggggaggcacggggcgggtggagccagcctgagcctaggcgcgccctctggcacccactcaggctcggtactaggcgcttggagtgtaaagcgagcaaaccagacgactccggtgctggagaaggcccgagtctgggagcgccaagatgtagggcaatcggtcatgagagtgcagagaagccaaaccaaaaagcttgcacgtgatcttgtcggcccgccttcatcttccactatgataggaggcttcctgcggtcctcactagcagcagatgctggcaccat

SEQ ID NO: 136509 - DNA, 541 bp, Homo sapiens
  misc_feature (1)...(541): n = a,t,c or g
ccgcgcggggctctcggccgccgccctcggccatcggctgctccccggtggcccaggcctcggactccgcggccggcccggcgcggcccagcgccctcagggatcatggcccaggtagcaagtgtcccaccctgngcctgttgaagaagagatcctccctcagagaccaggatggtggtgacattcctcgtgtctgccctcgaatccatgtgtaaagaactggccaagtccaaggcagaagtggcctgcatcgcagtgtacgaaacagacgtgtttgtcgtcggaaccgagagaggatgcgcttttgttaatgccaggacggattttcagaaagattttgcaaaatactgtaggtgttttaattttatcctttgtattcccaatctcaaaaggatcgcaggcaagacttccacagtattttcttctaagctatcataagcattctcctagaaacgatcctaacacatcttcttggattcagcttaccaaataaacactgcttaacactgcagagtccaagaaaaaaaaaaaaaaaaaattt

SEQ ID NO: 136510 - DNA, 3756 bp, Homo sapiens
atgcctggctaccgtgctgggcctttcgaggaggcatttgacagggaagatgagagacaaattgagtgtcagggaaggggtgttgatagaaaaattacaggagagcacacaactttcagcgggagatcaggtccggaccatgagctgaccctggactcaggcaagggctgtacaagaagcatggtgccagcatctgctgctagtgaggaccgcaggaagcttcctatcatagtggaagatgaaggggggccgacaagatcacgtgcgtgctcgtcccccgcgcggggctctcggccgccgccctcggccatcggctgctccccggtggcccaggcttcggactccgcggccggcccggcgcggcgcaccgcccttcagtcacttagtagctggctcggttatcagatcgaccgtcacagtgtcccagtgtatgtgttcaagtcacccttattttccgtcataatggccccaaagcacaagagtagtgatgctgggaatttggataggccaaagagaagccgtaaagtgcttcctctaagtgaaaaggtgaaagttctcgacttaatcaggaaagacaaaaaatcctatgctgaggttgctaagatctacgggaagaatgaatcttccatccgtgaaattgtgaagaaggaaaaagaaattcgtgctagttttgctgtctcacctccaactgctaaagtgacggccacagtgcgtgataagtgcttagttaagatggaacaggcactgcatttgtgggtggaagagatgaacagaaaacgtgttcccattgacagcaacatgttgcgccagaaagctttgagcctataccaagacttctgcaagggatgctctgaaactgacaccaagccatttactgcgagtaagggatggttacacagattcaggcatagattctcacatcattacaagaagaagaagaaggggatcatggcccaggtagcagtgtccaccctgcctgttgaagaagagtcctcctcagagaccaggatggtggtgacattcctcgtgtctgccctcgaatccatgtgtaaagaactggccaagtccaaggcagaagtggcctgcatcgcagtgtacgaaacagacgtgtttgtcgtcggaaccgagagaggatgcgcttttgataatgccaggacggattttcagaaagattttgcaaaatactgtaaagccttagggacaacagtgatggtgcctgttccctatgagaagatgctgcgagaccagtcggctgtggtagtgcaggggcttccggaaggcgttgcctttcaacaccctgagaattacgaccttgcaaccctgaaatggattttggagaacaaagcagggatttcattcatcataaatagacccttcctaggaccagagagtcaactgggtggccctgggatggtaacagatgcggagagatccatagtatcaccaagtgaaagctgcggccccatcaatgtgaaaactgaacccatggaagattctggaagccacccttcttccacaagcaatgaagtaatagaaatggaattaccaatggaagattccactccgctggtcccttcagaagaaccaaatgaggaccctgaagccgaggtgaaaatcgaaggaaacacaaattcatccagtgttacaaattctgcagcaggtgttgaagatcttaacatcgttcaagtgactgttccagataatgagaaggaaagattatcaagcattgaaaagattaaacagctaagagaacaagttaatgacctctttagccgaaaatttggtgaagcaattggcgtggatttccctgtgaaagttccctacaggaagatcacattcaaccctggctgtgtggtgattgatggcatgcccccgggggtggtattcaaggcccccggctatctggaaatcagttccatgaggaggatcttggaggcagctgagtttatcaaattcacagtcatcaggccgcttccagggcttgagctcagtaatggtgagtattctacagtgggaaaacgcaagatagaccaggagggccgtgtgtttcaagaaaagtgggagagagcgtatttcttcgtggaagtacagaatattccaacatgtctcatatgcaaacaaagcatgtctgtgtccaaagaatataacctaagacgccactatcaaaccaatcacagcaagcattatgaccagtatatggaaagaatgcgtgacgagaagcttcacgagctgaaaaaagggctcaggaagtatctcttaggcttgtcagacaccgagtgtcccgagcaaaaacaagtgtttgcaaacccaagtccaacccagaaatcccccgtgcagcctgtagaggacctagctgggaacttatgggagaagttacgtgaaaaaatcaggtcttttgtggcatattctatcgcaatcgatgagatcacgggtattaaataataccacccagttggccatattcatccgtggtgccgatgagaatttcgatgtgcccgaagaacttctggacacggtgcccatgacgggtacaaaatctggcaacgagatcttttcgcgtgttgagaaaagcctgaaaaacttctgtatcgactggccgaaattatttagcgtggcctccactggcaccccagcgatggtggatgccaataacgggcttgtcacaatactgaagtccagggtggcgacgttctgcaagggtgcggaactgaagtccatctgttgtataattcatccgggaatcacctctgtgctcaagaagttgaagattgggcaacgtcatggacgtggtagtgaagtccgtgaactggatatgctcccggggactgaaccacagcgagttcagaaccttgctctatgagctggacagccagtatggtagcctcctgtactacacggagattaagtggctcagtcgcgggctcgtgctaaagagatttttcgaatccttggaagaaatcgactccttcatgtcatccagagggaaacccctgcctcaactgagctccatagattggatccgagacctggccttcttggttgacatgacgatgcatctgaacgctttgaacatctctctccaaggacactcccaaatcgtcacgcagatgtatgacctgatccgggcgttcctagcaaaactgtgcctctgggagactcatttgactaggaatatatctggcccactttcccaccctgagattggcttccagaaatgaaagcgatggcctgaactacattcccaaaatcgcggaactcaagaccgaattccagaaaaggctgtctgatttcaaactctacgaaagcgaactgactctgttcagctccccgttctccacgaagatcgacagtgtgcacgaggagctccagatggaggttatcgacctgcaatgcaacacggtcctgaagacgaaatacgacaaggtgggaataccagaattctacaagtacctctggggtagctacccgaaatacaagcaccattgcgcatagattctttccatgttcgggagcacctacattctgcgaacagctgttctccattatgaaactgagcaaaacaaaatactgctcccagttaaaggattcccagtgggattctgtactccacatcgcaacgtgatggagagaaaactcctggcagggccctatggtacagctgggtctggcaagctcagcgctcttttggagaaggaatcccagataggctggtttataacgggagttggaggggagtccaggtcttggtggaagtga

SEQ ID NO: 136511 - DNA, 493 bp, Homo sapiens
ctgtggtagagctacgatgtcaagacaaagaagggaatccagctcctgaatacacatggtttaaggatggcatccgtttgctagaaaatcccagacttggctcccaaagcaccaacagctcatacacaatgaatacaaaaactggaactctgcaatttaatactgtttccaaactggacactggagaatattcctgtgaagcccgcaattctgttggatatcgcaggttcctgggaaacgaatgcaagtagatgatctcaacataagtggcatcatagcagccgtttgtggccttggtgtatgctatgctcagaggaaaggctacttttcaaaagaaacctccttccagaagagtaattcttcatctaaagccacgacaatgagtgaaaatgatttcaagcacacaaaatcctttataatttaaagactccactttagagatacaccaaagccaccgttgttacacaagttattaaactattataaaactctg

SEQ ID NO: 136512 - DNA, 208 bp, Homo sapiens
caatttaatactgtttccaaactggacactggagaatattcctgtgaagcccgcaattctgttggatatcgcaggtgtcctgggaaacgaatgcaagtagatgatctcaacataagtggcatcatagcagccgtagtagttgtggccttagtgatttccgtttgtggccttggtgtatgctatgctcagaggaaaggctacttttcaa

SEQ ID NO: 136513 - DNA, 581 bp, Homo sapiens
tttttttttttttttttaggctttaaacttgagtttattaaaagggaaataaatgctttggttactaaatgaactgattagaggaaggtattacacagaaagctacttggattattactaacatcaatgtcttctttttctaaaaggtgattttaaaaatcgagctgagatgatagatttcaatatccggatcaaaaatgtgacaagaagtgatgcggggaaatatcgttgtgaagttagtgccccatctgagcaaggccaaaacctggaagaggatacagtcactctggaagtattaggtgatgtgcatgtatgtgtgtgactacgtctcccactccttctccaccacccagccctgggggcaagcaagcactggtccataaacatgccagcatcaactgggagcctcaaccagtcaagttacagagaccataagcatcaccttcctggcaatctcctggccatttctccccctctcctcattggctgctgaaattttagtaatgcgttatcacaaagtatctctttgttaaaggtggaggcaattcctaatgatcctacaatatacataggagtatctt

SEQ ID NO: 136514 - DNA, 1430 bp, Homo sapiens
  misc_feature (1)...(1430): n = a,t,c or g
ccacacccccaaaacagaacagacccccatccctgggctggaggacccgcctcttggcagccagctgagaaggcgccccggggagggggaaactgacatcccatctagagccgtccctcctcttcctcccctcccgactctctgctcctttcccgccccagaagttcaagggcccccggcctcctgcgctcctgccgccgggaccctcgacctcctcagagcagccggctgccgccccgggaagatggcgaggaggagccgccaccgcctcctcctgctgctgctgcgctacctggtggtcgccctgggctatcataaggcctatgggttttctgccccaaaagaccaacaagtagtcacagcagtagagtaccaagaggctattttagcctgcaaaaccccaaagaagactgtttcctccagattagagtggaagaaactgggtcggagtgtctcctttgtctactatcaacagactcttcaaggtgattttaaaaatcgagctgagatgatagatttcaatatccggatcaaaaatgtgacaagaagtgatgcggggaaatatcgttgtgaagttagtgccccatctgagcaaggccaaaaacctggaagaggatacagtcactctggaagtattaggtgatgtgcatgtattggctccagcagttccatcatgtgaagtaccctcttctgctctgagtggaactgtggtagagctacgatgtcaagacaaagaagggaatccagctcctgaatacacatggtttaaggatggcatccgtttgctagaaaatcccagacttggctcccaaagcaccaacagctcatacacaatgaatacaaaaactggaactctgcaatttaatactgtttccaaactggacactggagaatattcctgtgaagccccgcaattctgttggataatcggagggtccttgcgaaacgaatgccagtagatgatctcaacataaagtgggcatcataggcagccgtagttagttgtgggccttagttgattttccttttgtgggcctggtgtatggntatggctcagagggaaaggctactttttcaaaagaaacctccttccagaagagtaattcttcatctaaagccacgacaatgagtgaaaatgatttcaagcacacaaaatcctttataatttaaagactccactttagagatacaccaaagccaccgttgttacacaagttattaaactattataaaactctgctttgtccgacatttgcaaagaggtacacgaggaaatggaattggtatttcattttaattttcatgactactaactcacctgaacttgctattttaaacaaatagttctgtcgacacctaaaatataatctggcttcttgtgtctggactaagttaaaagaattaaaatactttgtaatgtcaaaaaaaaa

SEQ ID NO: 136515 - DNA, 382 bp, Homo sapiens
cccatgacttcttctccccctcaggtgggaggtcaatcccctttactgtgacacagtgaaacagatctacccgtacaacaacagccagcggctcctcaatgtcatcgacatggccatcttcgacttcttgatagcctcagaagtggcggaggtcccagaggacagaaggtaacaggctcccctctcttcaaagaactggaagaagctcaaggggtcgtcactcataaggcaggcatctcaccctgccacgggcctgagtgggcgtcagattggaagctgtatgttcacttcaccaagtgaggggaaaccagggaatatggaccggcaccattatgagatgttcaccaaagttcgggatgatgggttcctattcaccttgaca

SEQ ID NO: 136516 - DNA, 682 bp, Homo sapiens
atgccggggctgcgccgggaccgcctactgactctgctactgctgggcgcgctgctctccgccgacctctacttccacctctggccccaagtacagcgccagctgcggcctcgggagcgcccgcgggggtgcccgtgcaccggccgcgcctcctccctggcgcgggactcggccgcagctgcctcggaccccggcacgatcgtgcacaacttttcccgaaccgagccccggactgaaccggctggcggcagccacagcgggtcgagctccaagttgcaggccctcttcgcccacccgctgtacaacgtcccggaggagccgcctctcctgggagccgaggactcgctcctggccagccaggaggcgctgcggtattaccggaggaaggtggcccgctggaacaggaggctaatgcagacttgttcatatagtggcaacagggttgcaaaagagggtagaagcctccacagcctcttgaagtacaggccagaacctgttaaatgtcatttctgccatactatgttggccaacataaatcaaaggctatctggggagattcaggaatcctggccattgaagagaaagtggtctacacaacttagttctcttctactgagcaaaagctcaagggaaatcccttctgctggtgagttgtccagcagtgggcagacagctgatagtg

SEQ ID NO: 136517 - DNA, 2223 bp, Homo sapiens
gacgggcgaactcctgtgaccccgccacgatcgtgcacaacttttcccgaaccgagccccggactgttcctgtttggcggcagccacagcgggtcgagctccaagttgcaggccctcttcgcccacccgctgtacaacgtcccggaggagccgcctctcctgggagccgaggactcgctcctggccagccaggaggcgctgcggtattaccggaggaaggtggcccgctggaacaggcgacacaagatgtacagagagcagatgaaccttacctccctggaccccccactgcagctccgactcgaggccagctgggtccagttccacctgggtattaaccgccatgggctctactcccggtccagccctgttgtcagcaaacttctgcaagacatgaggcactttcccaccatcagggctgattacaggcaagaagagaaaagccttgctgggggcatgtgactgcacccagattgtgaaacccagtggggtccacctcaagctggtgctgaggttctcggatttcgggaaggccatgttcaaacccatgagacagcagcgagatgaggagacaccagtggacttcttctacttcattgactttcagagacacaatgctgagatcgcagctttccatctggacaggattctggacttccgacgggtgccgccaacagtggggaggatagtaaatgtcaccaaggaaatcctagaggtcaccaagaatgaaatcctgcagagtgttttctttgtctctccagcgagcaacgtgtgcttcttcgccaagtgtccatacatgtgcaagacggagtatgctgtctgtggcaaaccacacctgctggagggttccctctctgccttcctgccgtccctcaacctggcccccaggctgtctgtgcccaacccctggatccgctcctacacactggcaggaaaagaggagtgggaggtcaatcccctttactgtgacacagtgaaacagatctacccgtacaacaacagccagcggctcctcaatgtcatcgacatggccatcttcgacttcttgatagggaatatggaccggcaccattatgagatgttcaccaagttcggggatgatgggttccttattcaccttgacaacgcccagagggttcggacgacactcccatggatgaaatcccaatcctctcgcttctctcccagtgtggcatgataaaaaagaatacacttttgcacctgcaggctgctggcccaagctgactacagactcagcggatgtgatgcgagaatcactgctggaagaccagcttcagccctgtcctcactgaaccccacctccttgccctgggatcgaaggctccaaaccatcctaaggacagtgggaggggtgcatagtgggcccatgggacagcagagtgttcattagttcgacgggcccagtgggaacagttcgggccccagacttttgggccagggttaaattttgacaaggttaaggggctgggcaggagttccagttttcaggaaaataacgctggggagccagaggcagtcgactcgagtgccgaccctgcgtcctcactccccacctgttactgctgggagtcaagtcagctaggaaggaagcaggacattttctcaaacagcaagtggggcccatggaactgaatctttactccttggtgcaccgcttctgtcgtgcgttgccttgctccgtttttcccaaaaagcactggcttcatcaaggccaccgacgatctcctgagtgcactgggaaatctgggtataggtcaggcttggcagccttgatcccaggagagtactaaatggtaacaagtcaaataaaaggacatcaagtggatacctgacttctcaggatccttattctagctacaagtcaaagataactcctggtccagacaaaacacctggcctatcacaagctgactaaaaatctgcactttgggccagcgcaggccaacagtaactctgacaggttcaaattagacctcacgactttctactcatattctagtcactggacccatctgaatcagtaatccctactgcccggtcctggagtaactttttaaagatattataacaagtggcaaaaataaaagagggatttgctaagaatatcagaaaaggagtgttccaatttgaagagtattacaattgaaataacatcaaatatgtcacactaagcagccagtaacagaataaataattacaacg

SEQ ID NO: 136518 - DNA, 424 bp, Homo sapiens
  misc_feature (1)...(424): n = a,t,c or g
cggacgcgtgggtgtatctgcagtgatagtacgcgcctggattactcacaaatacagtggcagagactggaatgttaaatgggaggaaaacttgctccatgctgtagcaaagaattataccctcctgcagaccatcccgccttttgaacgccctttcaaagatcatcaagtgtgccttgagtggaacatgggttatatttggaaccttcgggcaaacaggattccacagtgtcctctggaaaatgcttccgggaggatttccattataatgacacagctgggtacttcattattggagggagcaggtatgtggctggcattgaagggttttttggacccctgaagtactatcgccttcgcagtctgcaccccgcccagatttttaatcccctccttgagaagcaacttgctgaacaaataagtn

SEQ ID NO: 136519 - DNA, 496 bp, Homo sapiens
  misc_feature (1)...(496): n = a,t,c or g
aaaagaaaagaattttcgcncgcctgcaggaactcggcacgagaagaatcccgaagcagcaattgagtggtacgccaagggcgccctggagacggaggatcctgcgttaatctatgactatgccattgtgctattcaagggtcaaggagtaaaaaagaacagacggcttgccttagagctgatgaagaaagcagcttccaagggattgcatcaggcctccccagacactgccacgtccactgcaagtccagctgtgactccagctgcagatgcctctgaccaagaccagcccacagtaactaataacccggagccacgtgggtgaactgtgcactccagttctctccagatgagagagaatcttttcaacagctggtattgggaagctggggccagggcatgatcctgataaacaccttaaatgtcttgtcaactggnnnnnnnnnnnnnnnnnnnnnnnncctcgggggggggccgggacccaatttcccctttt

SEQ ID NO: 136520 - DNA, 317 bp, Homo sapiens
agttgtctgtgcagatgtacgcccaagccgccctggatggagactcccagggattttttaacctggccctgctaatcgaggaaggaactgtacgaaaggtgctggagccacagtaacgaggagtccttcagcccctgctccttggcctggctttacctgcacttgcggcttctctggggtgctatcctgcactcagccctgatctactttctgggaacctttctgctatccatattgatcgcctggactgtgcagtatttccagtctgtctcaggtaaagatttataaaaagcgaaagcaatatattaaaaaaaaaa

SEQ ID NO: 136521 - DNA, 351 bp, Homo sapiens
atgattgcgacatacgatggttgtgaaagtcctggagtatgcaacctgggattttttaacctggccctgctaatcgaggaaggtacgataatcccacaccatatcttggatttcttggaaattgactcaactctccattctaataacatctccattctccaggaactgtacgaaagaggggcgcttatttctgtcgcccaggctggagggcagaaccctgttctcgccatcctgccctctcccccttttggcggacaacgacattcctcggtgccaaccttattgactagcttgttaatctcagactccgtgctcccagacgccgaccaattagctgtctctcttcgataa

SEQ ID NO: 136522 - DNA, 741 bp, Homo sapiens
atggtgctattgcactccagcctggttgacagagcatatgttgaaacaattagactaaaagatgatgaaatactcaaggtacaaaccaaagaagatggagatgtctttatgtggttgaagcatgaagctacccgaggcaatgcagcagctcagcaacgattggcccagatgctgttctgggggcagcaaggtgtggccaagaatcccgaagcagcaattgagtggtacgccaagggcgccctggagacggaggatcctgcgttaatctatgactatgccattgtgctattcaagggattgcatcaggcagtcaatggcctgggatggtattaccacaaattcaagaaaaattacgccaaagcagcaaagtactggttaaaagcagaagaaatggggaacccagatgcgtcatacaatcttggagtcctgcatttggatggcatcttccctggagttcctggaaggaatcaactggaggccgcttcagagctggagaccgcttcagagctggagactgtttcagagctggagaccgcttcagagctggagattgtttcagagctggagaccgcttcagagctggagattgtttcagagctggagatcgtttcagagctggagaccgcttcagagctggagatcgcttcagagctggagaccgcttcagagctggagatagcttcagagctggagaccgcttcagagctggagaccgcttcagtcagaactggaagccactag

SEQ ID NO: 136523 - DNA, 510 bp, Homo sapiens
atgcctacttcatctgggcctctggatctagcagggaccagatttgtgtcactgaaacactcttcaggagtggagatactgactttagctggtgaatatttccataaggctgcgcaaggtggacacatggaagggaccttgtggtgttctctctactatatcacaggcaacctggagacattccctagagatcctgagaaagctgttgtatgggcaaaacatgtagctgagaaaaatggctacttgggccatgtcatccgcaaaggcctcaatgcctacctggaagttcatgcatatttgaagatgggagacctttactactatggccaccaaaaccagtcacaagacctggagttgtctgtgcagatgtacgcccaagccgccctggatggagactcccagcacgcggatttgcttctggggaaacacccctctgccactcgtagtccatacattttggatggtggcaccactgcccttaacttcagagagcccttgtcactgacctaa

SEQ ID NO: 136524 - DNA, 4367 bp, Homo sapiens
cggccgctctgcctgcgcgctgctcctgctctgctacctgaatgttgtaccatctttgggtaggcagacttccctgacgacatcagtgatacccaaagctgagcagagcgtggcttacaaagactttatttattttactgtctttgaaggaaacgttcgcaacgtttcctgaaagtcctcggttgaagtattttatgcctcctcagcccttgtgttgtccaatttgggaagccagttgtttccatcctgagttccagaagtaggcattccccgtgtacaaaaaaagggtgggaaggaatgaggaaacatcttcacaccaggcagggacacaaataggtacatgtggaaatttccaaggcattatgggtttacaggggatggattattttcatccggacatttccatcttctgtaatctggcagtgatagtacgcgcttgggattactcacaaatacaggggcagagactggaatgttaaatgggaggaaaacttgctccatgctgtagcaaaagaattatacccttctgcagaccatcccgccttttgaacgccctttcaaagatcatcaagtgtgccttgagtggaacatgggttatatttggaaccttcgggcaaacaggattccacagtgtcctctggaaaatgatgtggttgccctgcttggctttccttatgcctccagtggagaaaacacaggcattgtcaagaagttcccgaggtttcggaaccgagagctggaggccactcgacgccagaggatggattacccagtgtttactgtttcattgtggctttatttactccattattgcaaggccaacctctgtgggattctgtactttgttgactctaatgagatgtacggcacaccttctgtatttcttacggaagagggctatttgcatattcagatgcatcttgtcaaaggggaagaccttgctgtaaaaactaaattcatcatacctttgaaggagtggtttcgactggatatctcttttaacggaggccagatagtagtaaccactagcattggacaggatttgaaaagctaccacaatcagaccattagcttccgggaggatttccattataatgacacagctgggtacttcattattggagggagcaggtatgtggctggcattgaagggttttttggacccctgaagtactatcgccttcgcagtctgcaccccgcccagatttttaatcccctccttgagaagcaacttgctgaacaaatcaagttatattatgaaaggtgtgctgaggttcaagaaatagtatctgtgtatgcatctgcagcaaagcacgggggcgagagacaagaagcatgccacctccacaactcctacctggacctccagcgcaggtatgggagaccctcgatgtgcagagccttcccctgggagaaggagctgaaagacaaacaccccagcttgttccaggcattgctggagatggatctgctgaccgtgccaaggaaccaaaatgaatctgtatcagaaatcggtgggaagatatttgagaaggctgtaaagagactctctagcattgatggtcttcaccaaattagctctatccgtcccctttctgacggattccagctgctgtggataccataaagcatcctactaccttgcagtcttttatgagactggattaaatgttcctcgggatcagctgcagggcatgttgtatagtttggttggaggccaggggagtgagaggctgtcttcaatgaatcttgggtataaacactaccagggtattgacaactacccccctggcttggaacttgtggtatgcctactacagcaccattgccaccaagacaccccttgaccagcacacactgcaaaggagatcaggcatatgttgaaacaattagactaaaagatgatgaaatactcaaggtacaaaccaaagaagatggagatgtctttatgtggttgaagcatgaagctacccgaggcaatgcagcagctcagcaacgattggcccagatgctgttctgggggcagcaaggtgtggccaagaatcccgaagcagcaattgagtggtacgccaagggcgccctggagacggaggatcctgcgttaatctatgactatgccattgtgctattcaagggtcaaggagtaaaaaagaacagacggcttgccttagagctgatgaagaaagcagcttccaagggattgcatcaggcagtcaaatggcctgggatggtattaccacaaattcaagaaaaattaccgcccaaagcagccaaagtactgggttaaaagcaggaagaaattggggaacccagatgcgtcatacaatcttggagtcctgcatttggatggcatcttccctggagttcctggaaggaatcaaactttagctggtgaatatttccataaggctgcgcaaggtggacacatggaagggaccttgtggtgttctctctactatatcacaggcaacctggagacattccctatagatcctgagaaagctgttgtatgggcaaaacatgtagctgagaaaaatggctacttgggccatgtcatccgcaaaggcctcaatgcctacctgggaaggttcatgggcatgaagctttgctgtattatgttttagcagcagaaactgggaattgaagtgtcacagacaaatttagcacacatctgtgagggagaggccagacctggccaggagatacttgggtgttaactgtgtttggagatactataaatttctctgtttttcaaatccatgctccttcctttgcatatttgaagatgggagacctttactactatggccaccaaaaccagtcacaagacctggagttgtctgtgcatatgtacgcccaagccgccctgggatggagactcccagggattttttaacctggccctgctaatcgaggaaggtacgataatcccacaccatattcttggatttcttggaaattgactcaactctccattctaataacatctccattctccaggaactgtacgaaaggtgctggagccacagtaacgaggagtccttcagcccctgctccttggcctggctttacctgcacttgcggcttctctggggtgctatcctgcactcagccctgatctactttctgggaacctttctgctatccatattgatcggcttgaactgtgcagtatttccagtctgtctcagcaagcgattccccctccaaagaccatcccagggcctccccagacactgccacgtccactgcaagtccagctgtgactccagctgcagatgcctctgaccaagaccaagcccacagtaactaataaccccggagcccctgtgggtgaactgtgcactccaagttctctccagatgagagagaatcttttcaacagctgggtattgggaaagctgggggccaaggggatgatcctgataaacaccttaaaatgtctttgtcaactggatgcaaattttgcaattggtgtcattttttttaaagtcaaattacaaggaagtacccagattaaggcagtgggtaataccaaaggtcatcaaacacatacaaggaacatcttgatcatagggcatgtggggaagtttactgggccatcacagacttttgttctagtgattgtatgtattaggagtcatagcatgcccctacggcagatctggattcttatacactaagatgtgtcttaagaatcacagtgcgtgcttcatccctttattgaagaacagaaaattatgactactctacaaggtggataatattttggtacctgtggctggccacagccctggttcctcaaagctgaattgatagatttctctttgacttccaagacctagcagttataaggcaccttgaaataaattgttttgtgcctggaaatgccagggagggccaatggctttgtaaattggtttaccatttttctccttgaatttttctagggtcctagtgcttcccgaatccatttaatggccattggtcggatatccttttacatttccaattgccaatcccatgaaattaccatttagaagattcttagtacttaactgtagtcttctcccatgaattacacgttaagaatagactggcagcaacggaatatgcagcaagtaaagcctctagcttctagcttatagtttcatccctacccctcaatgcctgcgtgagtctgtacagggatatgtgtgtgtgtgtgtgtgtgtgtgtgtgtgtgtgttagagaggaagaggaagagcagaatgtctgtatactacatgctgctaaggtagtgaataaatcagtaatgcaatattgtgggtccaaactactctttgcactactttatttacagtagtaaataaaattatttttatac

SEQ ID NO: 136525 - DNA, 153 bp, Homo sapiens; identical to SEQ ID NO: 133559

SEQ ID NO: 136526 - DNA, 653 bp, Homo sapiens
accgagccggagttcccgggacgacgatttcgtccgaggatggccgtcatggcgcccccgaaccctggtcctgctactctcgggggccctggccctgacccagacctgggcaggctcccactccatgaggtatttctccacatccgtgtcccggcccggccgcggggagccccgcttcatcgccgtgggctacgtggacgacacgcagttcgtgcggttcgacagcgacgccgcgagccagaggatggagccgcgggcgccgtggatagagcaggaggggccggagtattgggacgaggagacagggaaagtgaaggcccactcacagactgaccgagagaacctgcggatcgcgctccgctactacaaccagagcgaggccggttctcacaccctcttcccacgctgacctgtgctccctccccaatcatctttcctgttgcagagaggtggggctgaggtgtctccatctctgtctcaacttcatggtgcactgagctgtaacttcttccttccctattaaaattagaacctgagtataaatttactttctcaaattcttgccatgagaggttgatgagttaattaaaggagaagattcctaaaatttgagagacaaaataaatggaacacatgagaaccttccagagtcc

SEQ ID NO: 136527 - DNA, 824 bp, Homo sapiens
atggcggtcgtggcgccccgaaccctcctcctgctactctcgggggccctggccctgacccagacctgggcgggctcccactccatgaggtatttctccacatccgtgtcccggcccggcagtggagagccccgcttcagcgcagtgggctacgtggacgacacgcagttcgtgcggttcgacagcgacgccgcgagccagaggatggagccgcgggcgccgtggatggagcaggaggagccggagtattgggaccggcagacagagatctccaagaccaacgcacagattgacctagagagcctgcggatcgcgctccgctactacaaccagagcgaggacgacccccccccaagacacatatgacccaccaccccatctctgaccatgaggccaccctgaggtgctgggccctgagcttctaccctgcggagatcacactgacctggcagcgggatggggaggaccagacccaggacacggagctcgtggagaccaggcctgcaggggatggaaccttccagaagtgggcgtctgtggtggtgccttctggacaggagcagagatacacctgccatgtgcagcatgagggtctgcccaagcccctcaccctgagatgggagccgtcttcccagcccaccatccccatcgtgggcatccttgctggcctggttctctttggagctgtgatcgctggagctgtggtcgctgctgtgatgtggaggaggaagagctcagatagaaaaggagggagctactctcaggctgcaagcagtgacagtgcccagggctctgatgtgtctctcacagcttgtaaagtgtga

SEQ ID NO: 136528 - DNA, 1717 bp, Homo sapiens
  misc_feature (1)...(1717): n = a,t,c or g
aattcccgggtcgacgatttcgtggccgtcatggcgccccgaacccttcctcctgctactctcgggggccctggccctgacccagacctgggcgggctcccactccatgagggatttgcttcacatccgtgtcccggcccggtgcgctgagagccccgcttcatcgcagtgggctacgtggacgacacgcagttcgtgcggtttcgacagcgacgccgcgagccagaggatggagccgcgggcgccgtggatagagcaggaggggccggagtattgggaccaggagacacggaatatgaaggccccactcacagactgaccgagagaacctgcggatcgcgcttccgctaacttacaaccagagcgaggccggttcttcacaccctccagatgatgtttggctgcgaacgtgggggttcggacggggcgctttccttccgcgggttaccaccagttacggcttacgaacggcaaaggatttacattcgccctgaacgaggaacttgcgctcttggacccgcggcggacatggcggctcagatcacccagcgcaagtgggagactccgcccatgtggcggagcagcaagaagaagcctacctggaagggcacgtgcgttgaacgggctccgcagataccttggagaacgggaaggaagacgctgcagcgcaacggaccccccccaagacacatatgacccaccaccccatctcttgaccatgaaggccactctgaagatgctggggccctgggctttctacccctgcggagatcacacctgaccctggcagcgggatgggggaggaccagacccaaggacacggagcttgttggagaccaggcctgcaggggatggaaccttcccacaagtgggcggctgtggtggtgccttctggagaggagtcagagataacacctgccaatgtgcagcaatgaagggtcttgcccaagcccctcaccctgaagatggggagccatcttccccagcccacccatcccccatcgtggggcatcatttgcttgccctggttcttccttgggagcttttgatcacttgaagctgtgggtcgctgctgtgatgttgaaggaaggaacagctcaggtggggaaggggtgaaagatagaaaagggggggagctactcttcaaggctgccaagccagtgaccagtccccaggggctctgaatgtgtctctccacaagctttgtaaaagtgtgaagaaaaacctgcccttgtgtggggacctgagaggccaaagagtttgttccctgcccctttccccttttgtgaactttgaaggaaccctgaactttgttttctgcaaaaggcaccctgccatgtgtctgtgttccgtgtaggcattaatgtgaaggaggtgggggagacccacccccaccccccatgtcccacccatgaccctcttccccacgctgacctgtgctccctccccaatcatctttccctgttcccagagaggtggggctgaaggtgtctccatcttctgtcttcaacttcatgggtgcaatgnagctgtaacttcttccttccctgattatagattagaacctgagtataaatttactttctcgaaattcttggccatgaggaggtttatgagttaattaaagggagaggaattcctaaaaatttgaagagacaaaataaatggaagacatgacgaacctttcaaaaaaaaaaaaaaaaaaaattgcggcgaa

SEQ ID NO: 136529 - DNA, 487 bp, Homo sapiens
ggcggtgaattcctgcgatggggctggagacggagaaggcggacgtacagctcttcatggacgacgactcctacagccaccacagcggcctcgagtacgccgaccccgagaagttcgcggactcggaccaggaccgggatccccaccggctcaactcgcatctcaaggattttaatgccttttgtaaagacctgcctaatggttctgccttcagtgcagacaatatggaagagtgtgacagatgttatcattgctccattgtgtacgagcgtaggacgatgcttctcttctgtcagcctgcaactgagccaggattgaatacttggaccccaggtctgggagattgggatactgtaatacttctttgttattataacataaaagcaccactgttctgttcatttcctagctgttctaattaagaaaactattaagatgagcaaccacatgtagaaatgtttattgacaggtcttttcaaataatgct

SEQ ID NO: 136530 - DNA, 2108 bp, Homo sapiens
tgcgtccgcgcaccaaggctgcgatggggctggagacggagaaggcggacgtacagctcttcatggacgacgactcctacagccaccacagcggcctcgagtacgccgaccccgagaagttcgcggactcggaccaggaccgggatccccaccggctcaactcgcatctcaagctgggcttcgagggatgtgatcgcagagccggtgactacggcactcctttgacaaagtgtgggatctgcagccatgccctctttgaaatcaggcaaataccgtatggtacaggtccctgacaggtgttcctggggcattccccctgggctttcatttgcggggaattctcttttgccaccctcaagctgtctggcacatctgggattttaatggccttttgtaaatgacctgcctaatgggttcttgccttcagtgcagacaatatgggaagagtgttgacagatggttaatcattggctccattgtgtaacgagcgtagggacgatgctttctctttctgttcagcctggcaactgagcccaggaatgggatacttggaccccaggtctggagattgggatactgtaatacttcctttgttattataacataaaagcaccactgttctgttcatttcctagctgttctaattaagaaaactattaagatgagcaaccacatttagaaatgtttattgacaggtcttttcaaataatgcttttctaattaatagccaaagatttcatatctaactttgtaaccagaattatacagtaagttgacaccacttagatttaaaggcagacagttttgctttagtacaaaaagtatacattttaaacagaatgaacttataatgattaagggacatttctataaaaatactacaatagttttatgcacaacttcccattaaaaatgagatttcttatttgtttgtctgtttttactctggggggtaatactttttaaattacctttacatatatagtcactggcatactgagaatatacaatgatcctgggaaatagcaggtaacaacaagctccacaccggtttatagtagctataagatgcaatacgacgaataaatgtgaaagtagattccatgaaaatgtattcctttaaaatattgtttccctacaggcctatttaacaagatgtttcattttactgtatattttgtagttaatataaatgttgctctaatcagattggcttaaaagcatttttattatatttatgttgttgaactaatatatgaaataagtaaatgtagctcccacaaggtaaacttcattgggtaagtttgcactgttctgattatgtaagcatttgtacatcttctttggaaataaaagataaaagagcgatacacaaagctttcttttctaacttttccaagcaaaatctaaaatgttttatgacatttttctggctgtgatcttaaaataattcatatctaaatagtattttgtctaggagatgctttctctctagtagttagaaattaaatctgtgtcagcattcctattaatgtctcactttactttcaagtaatattggtgctatttaacattttacagtaaatgttacttctgatactttagtacaatttcaactacagtgattcatgtagagagacaggggagttgtcaacttgggctactgaactacatgcataaactaaaaactaacagctacaaacttttaagatttctctaatattggtatgtaacacaggataaagttattcttgtcattttgaactgtagagtcctatttcagtgtgatggaatcactgtttgcttttgaaaaatctccatttatttctgggggccgggcatgggtggctcacccctgtaattccccggcacttttgggaggccaaggcgggtggatcatgaggtcaggagatccaagaccatcctggccaacatggtgataccccgtctctactaaaaatacaaaaaaattagttgggcatggtggcatgcacctgtagtcccagctacctgggaggctgaggcaggagaattgcttgaacctgggaggcagaggttgcagtgagccaaaatcatgccactgcactcccgcctgggcaacagagcaa

SEQ ID NO: 136531 - DNA, 432 bp, Homo sapiens
tggagcacggattcctcaagctcggctcatgcccttcctcctcctcctcacgccctggtgcgacctccgcaggtacgcttcaacctccgcacggcgctgagccacaagagaccagctaaaagcaaaaccagaaaacttacttggctccatatcaagagactcgggacggacgcaggaaggaattcccgcccgggtcccgtatcccccgccgccactacgcgcgaacctccacagtccacgtaaccagggaggaacggactcctcgggtgtctcgggggcggcgccccgcgcccaggctggctggactcggaagctggaggagcgcccgcgttccactgccccgggtgatgcccacgccggcacaggagagggggcacacggttaaaacagctcccacctcccccaaccacagtccacgaccagcctctcaga

SEQ ID NO: 136532 - DNA, 1485 bp, Homo sapiens
tttttttttcagcccaaactcatgttctcaactttattccccatcccagtggtggctcttctgtacagtggagaaagaagggggaccccaccagggctatggagagacagtagaggcaggactgaaccgtccagcaaagattacaaggatgacctgaggctggcaaccacaaaaaccaaaaagccagcgggggctgccccttccaagtctcaccaatgacccagagcaggttccagagcccaaaggcccaaaagtgcaattcccaaaagccaagggctggggacccttcaaggatctcccagagatcccagcgacgtttcagaggggcaagggtgtctttgatgagcctgcgcatgggtgggtgggtgactgaggtgcccagggcatcagtgatctggaaggagatcttgtacaggtagggctgcacgtcccgcaagcctgtgtcaaacacgttatccacctccgactgtgtgggcatcttgggcaagtactcatgccgattcatcacctccacgatgttgatgatcttctcgcagagtttctcacccaccttctcccggcagatctgccgctcctgctccggtggccagggctaccacatgcaccttgaccgtccacacttcccatgggatgcactcgtctgagaatggccagcgagacttcttcttctggtagaactccaaggacatctgccccagcccatcgccaccagagttgcgcggtgcatccttgaactccccacaaaccttgcgcagggcacgatccagttcctcagaagagacacgcacattaagtgaaagtcgatgaagtcacagtcaaacatcttggttgccaacggtgccaatggagtaggtgccctccttcttgtagtggaacttgcctgtgctgcggtgcagaagcaccgtgtgcagcacagccagcatggcctcctccacctgccgcccctccaccgacacctccagcacctccgagcgacaagttcatcctgcacccagtaacccacaccaaggtgtggaacttaggataaagacaaggggatcttcaccctacccaagggccacccttgagtgtagagtttggagcacggattcctcaagctcggctcatgcccttcctcctcctcctcacgccctggtgcgacctccgcaggtacgattcaacactccgcacggcgctgagccacaaagagaccagctcccacagtccacgtaacccagggaggaacggactcctcgggtgtcctcgggggcggcgccccgcgcccaggctggctggactcggaagctggaggagcgcccgcgttccactgccccgggggatgcacacgccggcacagaagagggggcacacggttaaaacagctcccacctcccccaaccacagtccacgaccagcctttcagatgccaccactctcccggcaggctcaagaccacctgggtcgaaggctgagccgcgcacgcgtgggcggcccgtatctcaagac

SEQ ID NO: 136533 - DNA, 1501 bp, Homo sapiens
gtggctccaattgccctctcaggcaggcagacccagggcctccccgccacaccttgttcatggattttgtcgctggagccatcggaggcgtctgcggtgttgctgtgggctaccccctggacacggtgaaggtcaggatccagacggagccaaagtacacaggcatctggcactgcgtccgggatacgtatcaccgagagcgcgtgtggggcttctaccggggcctctcgctgcccgtgtgcacggtgtccctggtatcttccgtgtcttttggcacctaccgccactgcctggcgcacatctgccggcttcggtacggtaaccctgacgccaagcccaccaaggccgacatcacgctcttgggatgcggcctccggactcgtccgcgtgttcctgacgtcgcccactgaggtggccaaagtccgcttgcagacgcagacacaggctttttaagcagcagcggcggctttcggctctcggcgcttttggctgcgccccccatgtgtcctgtgcccccagcctgcccagagcccaagtaccgcgggccactgcactgcctggccacggtagcccagtgaggaggggctgtgcggcctctacaagggcagcttggccctggtcttacgggacggccactcctttgccacctactttctttcctacgcggtcctctgcgagtggctcagccccgctggccacttccggccagatgtcccgggcgtgctggtggccgggggctgtgcaggagtcctggcctgggctgtggccacccccatgggacgggatcaaatcgagactggaagcaaacgggcagggccagaagcggctaccggggtctcctgcactgtatggtgaccagcgttcgagaggagggaccccgggtccttttcaaggggctggtactcaattgctgccgcgccttccctgtcaacatggtggtcttcgtcgcctatgaggcagtgctgaggcttcgcccggggtctgctcaccatagccggtccccaacgcccaggggggccacccaccaacaacttgtttgagggtggtaatgggttggaggaaggaaaggggtagttgtggcttgggttccgggaaccccaacaaggcccttttgcccaggagaatgaggagcctccctgcagtgttgtcggccgaggcctgagctcgccctgcccagctactgacctcaggtcgaggggcccgccagccatcagccagggttggcctagggtggcaggagccagggaggagtgggcctcttttgatgaaagcgttgagttgcatggagccggttgttcattccagcctccccatgggcccttcccttccatggtctttgaaaccacccctcccaggagatcaagtggtgtggtcaaaccaccccttttggcccctttccttaaaaccttacccccccaccactggtttctggtggttttaacgaaactgggtccctttacagggcaaggagctttcccccccaggcattgggagggccccg

SEQ ID NO: 136534 - DNA, 453 bp, Homo sapiens
  misc_feature (1)...(453): n = a,t,c or g
taatcgcangagcccgtattnctgatatttgcngncccgttttcatctatccaagaaaaatatgatgtctccatccctagccttactcttattcttaaatgtatgtatttttgtttgtggagaagctgtacaaggtaactgtgtacatcattctacggactcttcagtagttaacattgtagaagatggatctaatgcaaaagatgaaagtaaaagtaatgatactgtttgtaaggaagactgtgaggaatcatgtgatgttaaaactaaaattacacgagaagaaaaacatttcatgtgtagaaatttgcaaaattctattgtttcctacacaagaagtaccaaaaaactactaaggaatatgatggatgagcaacaagcttccttggattatttatctaatcaggtaatgtgtgacatggattacagaggaggtggatggactgtgataca

SEQ ID NO: 136535 - DNA, 427 bp, Homo sapiens
ctatctattgaagtgctgtatctatccaagaaaaatatgatgtctccatcccaagcctcactcttattcttaaatgtatgtatttttatttgcggagaagctggacaaggtaactgtgtacatcattctacggactcttcagtaattaacattgtagaagatggatctaatgcataagatgaaaggaaaagtaatgatactgtttgtaaggaagactgtgaggaatcatgcgatgttgaaactaaaattacacgagaagaacaacatttcatgtgtagcaatgtgagacatggattacagacgaggtggatggactgtgatacatagaaaaattggtgggagaatcgatttccagagggtgcggtgagattatctgcatggatacgcagatcttttacgagaattttggctctgactggcaaagatt

SEQ ID NO: 136536 - DNA, 427 bp, Homo sapiens
atgcccaagctgctgaagtggaactatgaagggggagcttgctggggaaatctatggaaactgccgaatgtggaacgactctgcttttctgaagctactgtcttcaggtctgcagcccagtgcctggtggtcggcctagggctgctgttggtcagcagggcctgtagtcatgaagatgctatagagtggagaggagactcttcagtagttaacattgtagaagatggatctaatgcaaaagatgaaagtaaaagtaatgatactgtttgtaaggaagactgtgaggaatcatgtgatgttaaaactaaaattacacgagaagaaaaacatttcatgtgtatcttccacaatgttcagtcactgggaacagtctgcggggagaaaggcattgatgtgaacaccatggtggatgcaggaggtacagcag

SEQ ID NO: 136537 - DNA, 1004 bp, Homo sapiens
ggtcgacccacgcgtccgatttgaagaagtgttttcatctatccaataaaaatatgatgtctccatcccaagcctcactcttattcttaaatgtatgtatttttatttgtggagaagttgtacaaggtaactgtgtacatcattctacggactcttcagtagttaacattgtagaagatggatctaatgcaaaagatgaaagtaaaagtaatgatactgtttgtgaaggaagactgtgaggaatcatgtgacgttaaaactaaaattacacgagaagaaaaacatttcatgtgtagaaatttgcaaaattctattgtttcctacacaagaagtaccaaaaaactactaaggaatatgatggatgagcaacaagcttccttggattatttatctaatcaggttaacgagctcatgaatagagttctccttttgactacagaagtttttagaaaacagctggattccttttctctcacagaccctgtcccagtacacctggtttagattgcactgatattaaggataccattggctctgtacaccaaaacaccgagtggtttatacataattcacccagaaggatctagctacccatttgaggtaatgtgtgacatggattacagaggaggtggatggactgtgatacagaaaagaattgatgggataattgatttccagaggttgtggagcgattatctggatggatttggagatcttgtaggagaattttggctaggactgaaaaagattttttatatagtaaatcagaaaaataccacttttatgctgtatgtgggtttggaatcggaagacgaccctcctgcttatgccttatatgataatttttcgggctgaggatgaaacgagatttttttaaaatgcccttaagacggtattcaggaaaatgcttgtgatgcctttcggggttctcaaaaaggaagataatcaaaatgcaatgccttttagcacatcagaagttgaataatggagggggccgccctgcg

SEQ ID NO: 136538 - DNA, 1682 bp, Homo sapiens
tgcctatactcattatagggctggaccggccggtcggacaggtgaagaagtgttttcatctatccaagaaaaatatgatgtctccatcccaagcctcactcttattcttaaatgtatgtatttttatttgtggagaagctgtacaaggtaactgtgtacatcattctacggactcttcagtagttaacattgtagaagatggatctaatgcaaaagatgaaagtaaaagtaatgatactgtttgtaaggaagactgtgaggaatcatgtgatgttaaaactaaaattacacgagaagaaaaacatttcatgtgtagaaatttgcaaaattctattgtttcctacacaagaagtaccaaaaaaactactaaggaatatgatggatgagcaacaagcttccttggattatttatctaatcaggttaacgagctcatgaatagagttctccttttgactacagaagtttttagaaaacagctgtatccttttcctcacagacctgttcagtcacatggtttagattgcactgatattaaggataccattggctctgtcaccaaaacaccgagtggtttatacataattcacccagaaggatctatttatcccatttgaggtaatgtgtgacatggattacagaggaggtggatggactgtgatacagaaaagaattgatgggataattgatttccagaggttgtggtgtgattatctggatggatttggagatcttctaggtgatgcattcctttgtcttataaaaagaagataatcaaaatgcaatgccttttagcacatcagatgttgataatgatgggtgtcgccctgcatgcctggtcaatggtcagtctgtgaagagctgcagtcacctccataacaagaccggctggtggtttaacaagtgtggtctagcaaatctaaatggcattcatcacttctctggaaaattgcttgcaactggaattcaatggggcacggggaaccaaaaacaacttacctggcaagaataaatctgtttcaatgaaaattagaagaatgtacaatccatattttaaataatctcatttaacattgtaatgcaagttctacaatgataatatattaaagatttttaaaagtttatcttttcacttagtgtttcaaacatattaggcaaaatttaactgtagatggcatttagatgttatgagtttaattagaaaacttcaattttgtagtattgctataaaagaaaacatggcttattgtatgtttttacttctgactatattaacaatatacaatgaaatttgtttcaagtgaactacaacttgtcttcctaaaatttatagcgatgttaaagggatttggccttttcttttgaagccatttttaaacccttaatatgttggtaagggaaaaattgaagggaatattttacttatttttatactttatatgattatataatctacagataatttctactgaagacagttacaataaataactttatgcagattaatatataagctacacatgatgtaaaaaccttactatttctaggtgatgccataccattttaaaagtagtaagagtttgctgcccaaatagtattttcttgttttcatatctaatcatggttaactattttgttattgtttgtaataaatatatgtacttttatatcctgtaaaaaaaaa

SEQ ID NO: 136539 - DNA, 3282 bp, Homo sapiens
atgagccaccgcgcccggccctgccctgccccctttcttttctggatgctgggtgtgaagacagagcccgcaggccaagaccgcaggaaaaaggcacgcagccgctgttgtatcttcagagtccacgcctctggcctctggggcctccggttcccctctgtggaatggggcaaaccttccagagataaggcacagctctcagaatcccctccccaatcggtgtatttgttcgctgaaaccgccctctctgccattgttcctggagatggggtggcggggggggggggcacaggggacggcggcccgggagccccgtacccgggggcggtggctgacatggaggagctgaccatctgggaacagcacacggccacactgtccaaggacccccgccggggctttggcattgcgatctctggaggccgagaccggcccggtggatccatggttgtatctgacgtggtacctggagggccggcggagggcaggctacagacaggcgaccacatcgtcatggtgaacggggtttccatggagaatgccacctccgcgtttgccattcagatactcaagacctgcaccaagatggccaacatcacagtgaaacgtccccggaggatccacctgcccgccaccaaagccagcccctccagcccagggcgccaggactcggatgaagacgatgggccccagcgggtggaggaggtggaccagggccggggctatgacggcgactcatccagtggctccggccgctcctgggacgagcgctcccgccggccgaggcctggtcgccggggccgggccggcagccatgggcgtaggagcccaggtggtggctctgaggccaacgggctggccctggtgtccggctttaagcggctgccacggcaggacgtgcagatgaagcctgtgaagtcagtgctggtgaagaggagagacagcgaagagtttggcgtcaagctgggcagtcagatcttcatcaagcacattacagattcgggcctggctgcccggcaccgtgggctgcaggaaggagatctcattctacagatcaacggggtgtctagccagaacctgtcactgaacgacacccggcgactgattgagaagtcagaagggaagctaagcctgctggtgctgagagatcgtgggcagttcctggtgaacattccgcctgctgtcagtgacagcgacagctcgccattggaggacatctcggacctcgcctcggagctatcgcaggcaccaccatcccacatcccaccaccaccccggcatgctcagcggagccccgaggccagccagaccgactctcccgtggagagtccccggcttcggcgggaaagttcagtagattccagaaccatctcggaaccagatgagcaacggtcagagttgcccagggaaagcagctatgacatctacagagtgcccagcagtcagagcatggaggatcgtgggtacagccccgacacgcgtgtggtccgcttcctcaagggcaagagcatcgggctgcggctggcagggggcaatgacgtgggcatcttcgtgtccggggtgcaggcgggcagcccggccgacgggcagggcatccaggagggagatcagattctgcaggtgaatgacgtgccattccagaacctgacacgggaggaggcagtgcagttcctgctggggctgccaccaggcgaggagatggagctggtgacgcagaggaagcaggacattttctggaaaatggtgcagtcccgcgtgggtgactccttctacatccgcactcactttgagctggagcccagtccaccgtctggcctgggcttcacccgtggcgacgtcttccacgtgctggacacgctgcaccccggccccgggcagagccacgcacgaggaggccactggctggcggtgcgcatgggtcgtgacctgcgggagcaagagcggggcatcattcccaaccagagcagggcggagcagctggccagcctggaagctgcccagagggccgtgggagtcgggcccggctcctccgcgggctccaatgctcgggccgagttctggcggctgcggggtcttcgtcgaggagccaagaagaccactcagcggagccgtgaggacctctcagctctgacccgacagggccgctacccgccctacgaacgagtggtgttgcgagaagccagtttcaagcgcccggtagtgatcctggggacccgtggccgacattgctatgcagaagttgactgctgagatgcctgaccagtttgaaatcgcagagactgtgtccaggaccgacagcccctccaagatcatcaaactagacaccgtgcgggtgattgcagaaaaagacaagcatgcgctcctggatgtgaccccctccgccatcgagcgcctcaactatgtgcagtactaccccattgtggtcttcttcatccccgagagccggccggcccttcaaggcactgctgccagtggctggcccttgccttcccgccgcagcacccgtcgcctcttacgcacaagcccagaagctggcgaaaacacagcagccacctttttacagccaccattcccttttgatgggcacgagttgacacctgggtaccaggagttcaaaggccatcatttcgagagcagcagacgcgccccatctggacggcgaaagatcagctggatggctccttggaggacaacctagacctccctcaccacggcctgggccaacagcttccgctgaaccttcagcttgcgacagccgcgtttaacagcgattacggaggacggacggcgaggggcggcgcgttacacggatgggcgagggttacacagacgggcgaggggggggccttacacggatgtggatgatgagcccccggctccagccctggcccggtccctcggagcccgtgcaggcagataagtccccaaagcccgagcggatcgtgggaaaatctcggctcatcagggggcccccaggtggacagccgccacccccagggacagtggcgacaggacagcatgcgaacctatgaacgggaagccctgaagaaaaagtttacgcgagtccatgatgcggagtcctccgatgaagacggctatgactggggtccggccaatgacctttgaccttctcgcaggctgccagctggtccgtcctccttctccctccctggggctgggactcagtttcccatacagaacccacaaccttacctcccacccgcctggtctttaataaacagagtattttccaaaaaaaagaggaaaaggaaaaaaaaaacc

SEQ ID NO: 136540 - DNA, 335 bp, Homo sapiens
  misc_feature (1)...(335): n = a,t,c or g
acaggatctgctcgccacccttcatggagctcacgagcctgtgcggggatgacaccatgcggctgctggagaagaacggcttgactttcccattcagtgcgtaccatcccagctccacctgagggcaggcgttgtagaccgcaggccagcataggggaggggctgggtttatagtgccctctggatttaagctcacccgaggatggatgagcacatggccctgggtcccacctccacccactcctcccgcttcatccctctcaagtaatggctcagctaataaaggcgcacatgactccnnnnnnnnnnnnnnannannnaaanaaaaataaggg

SEQ ID NO: 136541 - DNA, 657 bp, Homo sapiens
cccccccccccgctcttctgaggatccggcaaagatggcagaagtagagcacgaagaaggaagcggacccttccgcaagttcaccttaccggcggccgtggacctcggaccagccgcctggacatttcctacgaccagctggagcagccgatgcaggctgtaccagtggcgcgcccagcggccggcggcctgaacccgggggcctgcgggcggaagcagccactcccctgcttgaaagcgcctgctgcaagggccaagcaagggaggcgccgccccatgtcataagccggaagctggtgaagacgccaccctgcgggactatgatcattcctacccgagatgtggggcagccatggtgggcgtctaccacaggaaagaccttcaaaccaggtggaagatcaaggtgtgtgcggccgtccctgccggctggggtgggctggggtcgcctgatgcaggcgggatcagctgacacccagctttgctcttggtctcccgcagcccgagatgatcggccactacctgggcgagttctccatcacctacaagcccgtaaagcatggccggcccggcatcggggccacccactcctcccgcttcatccctctcaagtaatggctcagctaataaaggcgcacatgactccaaaaaaaaaaaaaa

SEQ ID NO: 136542 - DNA, 527 bp, Homo sapiens
ggtcgacgatttcgttgtattgtggtctcaagacttgccccaaattaacctgtgccttcccagtctctgttccagattcctgctgccgggtatgcagaggagatggagaactgtcatgggaacattctgatggtgatttcttccggcaacctgccactagagaagcaagtcattcttgccaccgctctcactatgatcctccaccaagccgacaggctggaggtctgtcccgctttcctggggccagaagtcaccggggagctcttatggattcccagcaagcatcaggaaccattgtgcgatttgtcctcaataacaaacacaagcatggacaagtgtgtgtttccaatggaaggacctattctcatggcgagtcctggcacccaaacctcagggcttttggcattgtggagtgtgtgttatgtactcccacccccatcgattgtgccgcaaggcgattaaggaaagtgtcgccacgggtgtcccaccctacactatgtcgactagctgcctaagtatactagatc

SEQ ID NO: 136543 - DNA, 1979 bp, Homo sapiens
gtcgactccacgcgtccggagcgccccggggagctcggagcgcgtgcacgcttggcagacggataaggccagtgcccagcttgaagggtctgtcaccttttgcagaggcccaaatgagaaaaaaagtggaaaatgggaggcatgaaatacatcttttcggtggtggtctttcttttgctagaaggaggcaaaacagagcaagtaaaacattcagagacatattgcatgtttcaagacaaaaagtacagagtgggtgagagatggcatccttacctggaaccttatgggttggtttactgcgtgaactgcatctgctcagagaatgggaatgtgctttgcacccgagtcagatgtccaaatgttcattgcctttctcctgtgcatattcctcatctgtgctgccctcgctgcccagaagactccttaccctcagtgaacaataaggtgcccagcaagtcttgcgagtccaatgggacaacttaccaacatggagagctgttcgtagcggaagggctcattcagaatcggcaacccaatcaatgcacccagtgcagctgttcggagggaaacgtgtattgtggtctcaagacttgccccaaattaacctgtgccttcccagtctctgttccattttctccttatttctttttaataaacaggagatggagaactgtcatgggaacattctgatggtgatatcttccggcaacctgccaacagagaagcaagacattcttaccaccgctctcactatgatcctccaccaagccgacaggctggaggtctgtcccgctttcctggggccagaagtcaccggggagctcttatggattcccagcaagcatcaggaaccattgtgcaaattgtcatcaataacaaacacaagcatggacaagtgtgtgtttccaatggaaagacctattctcatggcgagtcctggcacccaaacctccgggcatttggcattgtggagtgtgtgctatgtacttgtaatgtcaccaagcaagagtgtaagaaaatccactgccccaatcgatacccctgcaagtatcctcaaaaaatagacggaaaatgctgacaaaattctacttgcttcctgattccagaagaacttccaggccaaagctttgacaataaaggctacttctgcggggaagaaacgatgcctgtgtatgagtctgtattcatggaggatggggagacaaccagaaaaatagcactggagactgagagaccacctcaggtcatttgctccactttttgcttggccctagggcattctccagcacttccatattgagaagatctccaagaggatgtttgaggagcttcctcacggccactttgcgtttgtttgccttttaggccagtggaagatcttcaccgaaggagaagctcagatcagccagatgtgttcaagtcgtgtatgcagaacagagcttgaagatttagtcaaggttttgtacctggagagatctgaaaagggccactgttaggcaagacagacagtattggatagggtaaagcaagaaaactcaagctgcagctggactgcaggcttattttgcttaagtcaacagtgccctaaaactccaaactcaaatgcagtcaattattcacgccatgcacagcataatttgctcctttgtgtggagtggtgtgtcagcccttgaacatctcctccaaagagactagaagagtcttaaattatatgtgggaggaggagggatagaacatcacaacactgctctagtttcttggagaatcacatttctttacaggttaaagacaaacaagaccccagggtttttatctagaaagttattcaagtgaaagaaagagaagggaattgcttagtaggagttctgcagtatagaacaattacttgtatgaaattatacctttgaattttagaatgtcatgtgttcttttaaaaaaattagctccccattcccccactccagataaagcttcagtta

SEQ ID NO: 136544 - DNA, 480 bp, Homo sapiens
atggatccgccggcgggagccgctcgccgcctgctctgccccgcgctgctgctgctgctgctgctgctgacgccggcgctcctgccgccgccggcgccgcccgcgaacgccaggctcgccgccgccgtcgaccccccaggtagaatacacatcttatatcaccctgacactgagtacgcccggccttctttcatcagcggccgtccgccaatcgcggatcggccagcgaagagtgacaccatcgacggctttgagcgttttcggcggttgccagaaccactgtttgccatctttgatttcaaagtgcactttaagatcggcgatttcaaggaggacttttcttccttcagttacagcattcataacagttcctccaccggtttaaagcaagcacgcagacggccaggcgtaaactcttccagcggcgcaaataaagatggagctcctaaccagcgccagattgtgaagagctttgagtga

SEQ ID NO: 136545 - DNA, 297 bp, Homo sapiens
atgaaggatcagggtgaacatacaaccaaagcgggccaaggagtaggcaaggtcaatgaaatctaccatgacgagtccttgggtgcccacatcaacgtggtcctggtgcggatcatcctcctgagctatggaaaggaacacgaacggtcaagaatggctgagacagctgcggaacccaagcaaggaagagacatcctccaaaggaacatgaacggtcaagcatggctgagacagctgcggaacccaagcaaggaagagacttcctccaaagcaacatggacggtcaagaatggctga

SEQ ID NO: 136546 - DNA, 4043 bp, Homo sapiens
atgggccggattgatttctggatggatctgacgacttacaaccgaaagcaaatgagtattctttacaagcatgggggagcatttacaaaaattgatcccggcctcccctgcctgcctggcctgaatcccccaagcctgtcagccgtagcctcccaccccacctgcctggcaatgcagaaacctgagattgctgcttctcggcaccaagaaccaagaggtgaagttggcgggcccctggggcacggagcggagcgcatcctggcggtgcccgtgcgcactgacgcccagggccgcttggtgtcccacgtggtgtcggcagctacgtccagagcaggggtacgagcccgcagggccgccccggtccggaccccgagcttccccggaggcaacgaggaggagcctggcagtcacctcttctacaatgtcacggtctttggccgagacctgcacctgcggctgcggcccaacgcccgcctcgtggcgcccggggccactatggagtggcagggcgagaagggcaccacccgcgtggagcccctgctcgggagctgtctctacgtcggagacgtggccggcctagccgaagcctcctctgtggcgctcagcaactgcgatgggctggctggtctgatccggatggaggaggaggagttcttcatcgaacccttggagaaggggctggcggcgcaggaggctgagcaaggccgtgtgcatgtggtgtatcgccggccacccacgtcccctcctctcggggggccacaggccctggacacaggggcctccctggacagcctggacagcctcagccgcgccctgggcgtcctagaggagcacgccaacagctcgaggcggagggcacgcaggcatgctgcagacgatgactacaacatcgaggtcctgctgggcgtggatgactctgtggtgcagttccacgggaaggagcacgtacagaagtacctgctgacactcatgaacattgtcaatgaaatctaccatgacgagtccttgggtgcccacatcaacgtggtcctggtgcggatcatcctcctgagctatggaaagtccatgagcctcatcgagatcgggaacccctctcagagcctggagaatgtctgccgctgggcctacctccagcagaagccagacacgggccacgatgaataccacgatcacgccatcttcctcacacggcaggactttgggccttccggcatgcaaggctatgctcctgtcaccggcatgtgccatccggtccgcagctgcaccctgaaccatgaggacggcttctcctcagcgtttgtggtggcccatgagactggccacgtgctgggcatggagcacgacgggcagggcaaccgctgtggcgacgaggtgcggctgggcagcatcatggcgcccctggtgcaggccgccttccaccgcttccactggtcccgctgcagccagcaggagctgagccgctacctgcactcctatgactgcctgctggatgaccccttcgcccacgactggccggcgctgccccagctcccgggactgcactactccatgaacgagcaatgccgctttgacttcggcctgggctacatgatgtgcacggcgttccggacctttgacccctgcaagcagctgtggtgcagccatcctgacaacccctacttttgcaagaccaagaaggggccccccttggacgggactatgtgtgcacctggcaagcattgttttaaaggacactgcatctggctgacacctgacatcctcaaacgggacggcagctggggcgcttggagtccgtttggctcctgctcacgtacctgtggcacgggcgtgaagttcaggacccgccagtgtgacaacccacacccggccaacgggggccgcacctgctcgggccttgcctacgacttccagctctgcagccgccaggactgccccgactccctggctgacttccgcgaggagcagtgccgccagtgggacctgtacttcgagcacggcgacgcccagcaccactggctgccccacgagcaccgggatgccaaggagagatgccacctgtactgcgagtccagggagaccggggaggtggtgtccatgaagcgcatggtgcatgatgggacgcgctgctcctacaaggacgccttcagcctctgtgtgcgcggggactgcaggaaggtgggctgtgacggtgtgatcggctccagcaagcaggaagacaagtgtggcgtgtgcggaggggacaacagccactgcaaagtggtcaagggcacgttcacacggtcacccaagaagcatggttacatcaagatgtttgagatccctgcaggagccagacacctgctcattcaggaggtagacgccaccagccaccatctggccgtcaagaacctggagacaggcaagttcatcttaaatgaagagaatgacgtggatgccagttccaaaaccttcattgccatgggcgtggagtgggagtacagagacgaggacggccgggagacgctgcagaccatgggccccctccacggcaccatcaccgttctggtcatcccggtgggagacacccgggtctcactgacgtacaaatacatgatccatgaggactcactgaatgtcgatgacaacaacgtcctggaagaggactctgtggtctacgagtgggccctgaagaagtggtctccgtgctccaagccctgtggcggagggtcccagttcaccaagtatggctgccgccggaggctggaccacaagatggtacaccgtggcttctgtgccgccctctcgaagcccaaagccatccgcagagcgtgcaacccacaggaatgctcccagccagtgtgggtcacaggcgaatgggagccatgtagccagacctgtgggcggacaggcatgcaggtgcgctccgtgcgctgcattcagccgctacacgacaacaccacccgctccgtgcacgccaagcactgcaatgacgcccggcccgagagccgccgggcctgcagccgcgagctctgccctggtcgttggcgagccgggccctggtcccagtgctcagtaacctgtggcaacggcacccaggagcggccagtgccctgccgcaccgcggacgacagcttcggcatctgccaggaggagcgtcctgagacagcgaggacctgcaggcttggcccctgtccccgaaacatctcagatccctccaagaagagctacgtagttcagtggctgtcccgcccggaccccgactcgcccatccggaagatctcgtcaaagggccactgccagaggcgacaagtcaatattctgtaggatggaagtcttgtcacgctattgctccatccaaggctacaaaagcgttgttgcaaaagtcctgtaacctgtacaacaaccccaccaacgtggagggcaggatagagccaccgcctgggaagcacaacgacattgacgtgttcatgcctaccctcccagtgcccactgtagccatggaggtgcggccatcaccaagcacccccctggaggtccctctcaatgcctccagcaccaatgccacagaggatcacccagaaaccaatgccgtagatgaaccctacaaaatccatggcctggaagatgaagtccagccacccaacctaatccctcgacgaccgagcccctatgaaaagaccagaaaccaaagaatccaagagctcattgatgagatgcggaagaaagagatgctcggaaaagatattccatgggatagcaaatcctgtgtcatggagatgaagtcaaaattcctgattccaaaaggttttgagaaaacaaagagggggaatgactccatgagcctcatcgagatcgggaacccctctcagagcctggagaatgtctgccgctgggcctacctccagcagaagccagacacgggccacgatgaataccacgatcacgccatcttcctcacacggcaggactttgggccttccggcatgcaagactctcgactcgagaagctaactgctgtaagactcaccgagaacatcagacccaaccagataaggtctgaatga

SEQ ID NO: 136547 - DNA, 1415 bp, Homo sapiens
tcctattttttctaaggtgtgactgcctcgataggggtgggacgacaacaggagaaaaggtgagaggtaaattaattctggttaacgagaaggataaagtaaaatctagtcacttacaatccttctcctagtctcggccctgacactacctcctctgtgaagtcttccttagcaagcactaggtttgccttctctgctcgctgtccttgcgctgagtactactgatcgcgctagtttctctgctgtcatctcacggtctccccagcggactgtgagctccacgaggaaagaacagcgccctttagtatttgcgttctcagcgttgcgcctcggcaccaacgcttgcaagatggatggcttttgtagcactttccttggcgcgcctgggattcgcctaaaacttctgactccagcagggactcacaagtctgagagggatcgcaccgccactcccacaagacaccacgagaaacgcctcttttgcagcagtttaagtatagggcggcaagcggaggaggcgtggcgagcggatcatccgcttccggagtcgaggttgttcgggcttgtaccgcttggcggtgcggcctggtgtcggcttgcaggttctttctgtgtttgttctctgcgcctgccaaggccgatagagctggtgcgtgcggctagcggggctctcctaggagccgtacgccggcggaaccatggtccacctcactgcttttctacagctactctcctctgcaaggcctaccgtgggggccacttaaccatccgccttgcccttggttggcgcacccaatcggccgttctaccgcattgtggctgctcaaaacaagtgtcccagggatggcccgttcccgtagagcaagctgggccccccctatgatccccattgccccccaacagtcatggagaaaaaactccgtgccccctcaaccctagacaggatcccgtcattggattggcctgcggggccccacctctcctaagccctatggaaaagcttctgggtcttgctggctttttcccctctgcatccctatgatgatcacaaatgctgagagactgcgaaggaaacgggcacgtgaagtcctgttagcttctcagaaaacagatgcagaagctacagatacagaggctacagaaacataaatgagctgacttcagtgagcatagcagtgggaacaaggtcaaggtccttttgaaacactgcagcgatcttaattttgttagatttggagttcaataaatggagtatcactgaaaaaaaaactctcccaatgctgagtgcttgaagagaggaaagaacacagccctggagtcagagaccggggtttaagttcgtgctccacctcttattagctagctatggactcctgtttgagcctcgattccctcttttgtgaagtggggtaatg

SEQ ID NO: 136548 - DNA, 5675 bp, Homo sapiens
ggcgggggcaacgacagcgctggagttgccggggcagccttcggtgactggggtgccagagttgccagggctgccttcggcaactagggcactggagttgtcggggcagcctgtggcaactggggcactagagttgcctgggccgctcatggcagctggggcactggagttctcggggcagtctggggcagctggagcactggagcttttggggcagcctctggcaacaggggtgctggagttgccagggcagcctggggcgccagagttgcctgggcagcctgtggcaactgtggcgctggagatctctgttcagtctgtggtgacaacatcggagctgtcaacgatgaccgtgtcgcagtccctggaggtgccctcgacgacagcgctggaatcctataatacgaacgttccatgatgtcatcttacgaacgctctatgatgtcttatgagcggtctatgatgtcccctatggctgaacgctctatgatgtcagcctacgagcgctctatgatgtcagcctacgagcgctctatgatgtcccctatggctgagcgctctatgatgtcagcttatgaacgctccatgatgtcagcttatgaacgctccatgatgtccccaatggctgatcgatctatgatgtccatgggtgctgaccggtctatgatgtcgtcatactctgctgctgaccggtctatgatgtcatcgtactctgcagctgaccgatctatgatgtcatcttatactgctgatcgttcaatgatgtctatggctgctgattcttacaccgattcttacactgacacatatacagaggcatatatggtgccacctttgcctcctgaagagcccccaacaatgccaccgttgccacctgaggagccaccaatgacaccaccattgcctcctgaggaaccaccagagggtccagcattgcccactgagcagtcagcattaacagctgaaaatacttggcctacagaggtgccatcattaccatctgaagagtctgtatcgcagcctgagcctcctgtgagtcaaagtgagatttcggagccttcagcagtgcctactgattattcagtgtcagcatcagatccctcagttttagtatcagaggctgctgtgactgttccagaaccaccaccagagccagaatcttcaattacgttaacacctgtagagtctgcagtagtagcagaagaacatgaagttgttccagagagaccagtgacttgtatggtatctgaaactcccgccatgtcagctgaaccaactgtgttagcatcagagcctcctgttatgtcagagacagcagaaacatttgattccatgagagcctcaggacatgttgcctcagaagtatctacatccttgttggttccagcagtaactactccagtgctggcagagagcattctggagccgccagccatggctgccccagagtcttcagctatggctgtcctggagtcttcggctgtgaccgtcctggagtcttcgactgtgactgtcctggagtcttcgactgtaactgtcctggagccttcggttgtgactgtcccggagcctcctgttgtggctgagccagactctgttaccattcctgtgccagttgtttctgcgctggagccttctgtgcctgttctggaaccagcggtgtcagtccttcaaccttctatgattgtttcagaaccatctgtttctgtccaggaatcgactgtgacagtttcagagcctgctgtcacagtctcagagcagactcaagtaataccaactgaggtggctatagagtccacaccaatgatactggaatctagtatcatgtcatcacatgttatgaaaggaattaatctatcctctggtgatcaaattcttgctccagagattggcatgcaggagattgcattgcattcaggtgaagaaccacatgctgaggaacacctgaaaggtgacttttacgaaagtgaacatggtataaatatagaccttaatataaatagtcatttaattgctaaagagatggaacataatacagtgtgtgctgctggtactagtcctgttggggaaattggtgaagagaaaattttgcccaccagtgagactaaacagcgcacagtattggatacctaccctggtgttagtgaagctgatgcaggagaaactctatcttctactggtccttttgctctggaacctgatgcaacaggaactagtaagggtattgaatttaccacagcatctactctcagtttagttaataaatatgatgttgatttatctttaactactcaagatactgaacatgacatggtaataatttccaccagtcctagtggtggtagtgaagctgacattgaagggcctttgcctgctaaagatattcatcttgatttaccatctaataataaccttgttagtaaggatacagaagaaccattacctgtaaaagagagtgaccagacaatagcagccttgctcagccctaaagaaagtagtggaggagaaaaagaagtacctccccctcctaaagagacactgcctgattcaggattttctgccaatattgaggatattaatgaagcagatttagtgagaccgttacttcctaaggacatggaacgtcttacaagccttagagctggcattgaaggacctttacttgcaagtgatgttggacgtgacagatctgctgccagcccggttgtaagtagtatgccagaaagagcttcagagtcttcttcagaggaaaaagatgattatgaaatttttgtaaaagttaaggacactcacgaaaaaagcaagaaaaataagaaccgtgataagggggagaaagagaagaaaagagatcctcatttaagatctcgaagtaagcgttccaaatcttctgaacacaaatcacgcaagcgtaccagtgaatctcgttctagggcaagaaagagatcatctaagtccaagtctcatcgctctcagacacgttcacggtcacgttcaagacgcaggaggagaagcagcagatcaagatcaaagtctagaggaagaagatctgtatcaaaagagaagcgcaaaagatctccaaagcacagatccaagtctagggaaagaaaaagaaaaagatcaagctccagggataaccgaaagacagttagagctcgaagtcgaaccccaagtcgtcggagtcggagtcatactccaagtcgtcgacgaaggtctagatctgtgggtagaagaaggagctttagcatttccccaagccgccgcagccgcacccccagccgccgcagccgcacccccagccgccgcagccgcacccccagccgccgcagccgcacccccagccgccggagccgcacccctagccgtcggagccgcaccccaagccgccggagaagatcaaggtctgtggtaagaagacgaagcttcagtatctcaccagtcagattaaggcgatcaagaacacccttaagaagaaggtttagcagatctcccatccgtcgtaaaagatccaggtcttctgaacgaggcagatcacccaaacgtctgacagatttggataaggctcaattacttgaaatagccaaagctaatgcagctgccatgtgtgctaaggctggtgtccctttaccaccaaacctaaagcctgcacctccacctactatagttgagaaagttgctaaaaagtcaggaggagctactatagaagaactaactgagaaatgtaaacagatcgcacagagtaaagaagatgatgatgtaatagtgaataaacctcatgtttcggatgaagaggaagaagaacctcctttttatcatcatccctttaaactcagtgaatttaaacctatttttttcaatctgaatattgctgcagcaaaaccaactccaccaaaaagccaggtaacattaacaaaagaattccctgtatcatctggatctcaacatcggaaaaaagaagcggatagtgtttatggagaatgggttcctgtggagaaaaatggtgaagaaaacaaagatgatgataatgttttcagcagcaatttgccctcagagcctgtggacatctctacagcaatgagtgaacgggcacttgctcagaaaagactcagtgagaatgcatttgatcttgaagccatgagcatgttaaatagagctcaggaaaggattgatgcctgggctcagctgaactctattcctggccagttcacaggaagtacaggagtacaggttttgacacaagaacagttggccaatactggtgcccaagcctggattaaaaaggatcagttcttaagagcagccccggtaactggaggaatgggagccgttttgatgagaaaaatgggctggagagaaggagaaggattaggaaaaaacaaagaaggcaacaaggaacccatcctagttgattttaagacagaccgaaaaggtcttgttgcagtaggagaaagagcacaaaagaggtctgggaacttctctgctgcaatgaaagatctgtcaggcaaacatcctgtgtctgctttgatggagatctgtaataaaagaaggtggcaaccacctgaatttctattggtccatgatagtggccctgatcatcgcaaacattttctctttagggtattgataaatggaagcgcttaccagcccagctttgccagccctaataagaagcatgctaaagccacagcagctactgtggttcttcaagcaatgggccttgtaccaaaggacctcatggctaatgcacttgcttcaggagtgcctcacgtagatagattgaggttttataataatcatttcagaattttactctgcatcacaatgtatttcctctttaatgttgtaaatatttggcaatttaagacattgtgtaaaaagcaatctgtaaaaacatctccaggctttgatttttgtaccatggaaattgtatttaaccatacagggttttggtatgtttatattgtttaccttagtgatgtatttgtttaagtggctaacatccaaacgactgtttgaaggcatcagagtaatcttcagtgtggaatgttaaataacgcttttatactgtattttgtactatgatgtaactccccttccttatggctaggctactgtaacacttgcctgtaatcagtgaagggctgtgcaccttgtactatttcacaatgggttctgctggacagataatgggccagtgttattgaggtgatcaagatctgttccacagggctaatgcaccatctcccctcaaaattttgtagaggttctaaaaagaaagtggtatgttgtgtgatgatcagcactaagtcctgcattcctgttaaagccacttgggtcataagaagggagtaaaaaatgaagtctgactagaattctattggcagaggccaagtacatttagtatggcattgagttgtgatatagttttactttgatgtgcattttgaatttcagctacacctagatagacgtaaaatgataattaaaatgctgtaaccaacttatctaataaaattggcaaccagccactattttgttgactatgagaaagttaaaagtttatgttaatttttagggtctgatagaatatttcatgtgtattacagtggtattcatatgctatgtctctaaactttattttcaaaagcttaaggcccaaatacaaacttctctggaat

SEQ ID NO: 136549 - DNA, 469 bp, Homo sapiens
tttagatatcatattgagctttaattaagaaacactttattttttagattgctgcagcaaaaccaactccaccaaaaagccaggtaacattaacaaaagaattccctgtatcatctggatctcaacatcggaaaaaagaagcggatagtgtttatggagaatgggttctatagattagttgtcatcgcctcttgcccttggtttccaaagcccagacttttgccaaggactggactaggtatctgatgcccatctggacatttttcttgcagttcttggatatgtagatcagagacacctgtactcttcactgtaggttcccttccttggcttggccatatcatcatcttccagtaaacacctccaattctacaaataaatcctttctttctttggataggatcagttcttaagagcagccccggtaactggaggaatgggagccgttttgatgagaaaaatgggtttg

SEQ ID NO: 136550 - DNA, 814 bp, Homo sapiens
taattaagaaacactttattttttagattgctgcagcaaaaccaactccaccaaaaagccaggtaacattaacaaaagaattccctgtatccatctggacctcaacatcggaaaaaagaagcggatagtgtttatggagaatgggttcctgtggagaaaaatggtgaagaaaacaaagatgatgataatgttttcagcagcaatttgccctcagaggtaagtaggaggaatattatgtatttttccttttttatacctgaatctgcccatttcattgttatgttatgtctgatttgggattctgtttcactcttccttagggccggggttaaacggcagggccgggtttaggacggacagatggaaacaacccgcagcttctcattttgacagtaactcggatggcaattcactttgtgggaaccaaggccacaaagtggaaaaggcttcgatttgcagagaacagtgttattcacatccctacccaacattgggccctccctgcacttgtgggaaggtagtccttggtactccattcccttctccttcccctctttgctactattaaaagtcggagaagtggaattcaaacgttgaaatttccacggggctatagttgtatcttaataatgccaagtgtcaaaacaaccccattaaaatgccgcctgattaaataatgtgctgctaaatatagtgcacatgaaaacagcaagactgtatatatatgtaaatatatatatatatctgtatctttgtatgtatctctgtatctgtacctttgctgtatcttttaataaacagtttacttttattt

SEQ ID NO: 136551 - DNA, 6149 bp, Homo sapiens
tttcgtctgagttgccagggccctctgtgacaccagtgccacagttgtcgcaggaattgccagggcttccagcaccatccatggggttggagccaccacaggaggtaccagagccacctgtgatggcacaggagttgccagggctgcctttggtgacagcagcagtagagttgccagagcagcctgcggtaacagtagcaatggagttgaccgaacaacctgtgacgacgacagagttggagcagcctgtggggatgacaacggtggaacatcctgggcatcctgaggtgacaacggcaacagggttgctggggcagcctgaggcaacgatggtgctggagttgccaggacagccagtggcaacgacagcgctggagttgccggggcagccttcggtgactggggtgccagagttgccggggctgccttcggcaactagggcactggagttgtcggggcagcctgtggcaactggggcactagagttgcctgggccgctcatggcagctggggcactggagttctcggggcagtctggggcagctggagcactggagcttttggggcagcctctggcaacaggggtgctggagttgccagggcagcctggggcgccagagttgcctgggcagcctgtggcaactgtggcgctggagatctctgttcagtctgtggtgacaacatcggagctgtcaacgatgaccgtgtcgcagtccctggaggtgccctcgacgacagcgctggaatcctataatacggtagcacaggagctgcctactacattagtgggggagacttctgtaacagtaggagtggatcccttgatggccccagaatcccatatattagcttctaacaccatggagacccatatattagcatccaacaccatggactcccaaatgctagcgtccaacaccatggactcccagatgctagcatccaacaccatggactcccagatgttagcgtctagcaccatggactcccagatgttagcaactagctccatggactcccagatgttagcaactagctccatggactcccagatgttagcaactagcactatggactcccagatgttagcaaccagttccatggactcccagatgttagcaaccagctccatggactcccagatgttagcaaccagctccatggactcccagatgttagcaaccagctccatggactcccagatgttagcaaccagcaccatggattctcagatgttagcaaccagcaccatggactcccagatgttggcaactagctcaatggattcccagatgttagcatctggcactatggactctcaaatgttagcttctggcaccatggatgctcagatgttagcgtctggtaccatggatgcccagatgttagcgtctagtacccaagactctgctatgttgggttcaaaatctcctgatccctataggttagctcaggatccttacaggttagctcaggatccctataggttgggccatgacccctatagattaggtcatgatgcttacaggttaggacaagacccttatagattaggccatgatccctacagactaactcctgatccctataggatgtcacctagaccctacaggatagcacccaggtcctatagaatagcacccaggccatataggttagcacctagacccctgatgttagcatctagacgttctatgatgatgtcctatgctgcagaacgttccatgatgtcatcttacgaacgctctatgatgtcttatgagcggtctatgatgtcccctatggctgaacgctctatgatgtcagcctacgagcgctctatgatgtcagcctacgagcgctctatgatgtcccctatggctgagcgctctatgatgtcagcttatgaacgctccatgatgtcagcttatgaacgctccatgatgtccccaatggctgatcgatctatgatgtccatgggtgctgaccggtctatgatgtcgtcatactctgctgctgaccggtctatgatgtcatcgtactctgcagctgaccgatctatgatgtcatcttatactgctgatcgttcaatgatgtctatggctgctgattcttacaccgattcttacactgacacatatacagaggcatatatggtgccacctttgcctcctgaagagcccccaacaatgccaccgttgccacctgaggagccaccaatgacaccaccattgcctcctgaggaaccaccagagggtccagcattgcccactgagcagtcagcattaacagctgaaaatacttggcctacagaggtgccatcattaccatctgaagagtctgtatcgcagcctgagcctcctgtgagtcaaagtgagatttcggagccttcagcagtgcctactgattattcagtgtcagcatcagatccctcagttttagtatcagaggctgctgtgactgttccagaaccaccaccagagccagaatcttcaattacgttaacacctgtagagtctgcagtagtagcagaagaacatgaagttgttccagagagaccagtgacttgtatggtatctgaaactcccgccatgtcagctgaaccaactgtgttagcatcagagcctcctgttatgtcagagacagcagaaacatttgattccatgagagcctcaggacatgttgcctcagaagtatctacatccttgttggttccagcagtaactactccagtgctggcagagagcattctggagccgccagccatggctgccccagagtcttcagctatggctgtcctggagtcttcggctgtgaccgtcctggagtcttcgactgtgactgtcctggagtcttcgactgtaactgtcctagagccttcggttgtgactgtcccggagcctcctgttgtggctgagccagactatgttaccattcctgtgccaggttgtttctgcgctggagccttctgtgcctgttctggaaccagcggtgtcagtccttcaaccttctatgattgtttcagaaccatctgtttctgtccaggaatcgactgtgacagtttcagagcctgctgtcacagtctcagagcagactcaagtaataccaactgaggtggctatagagtccacaccaatgatactggaatctagtatcatgtcatcacatgttatgaaaggaattaatctatcctctggtgatcaaaatcttgctccagagattggcatgcaggagattgcattgcattcaggtgaagaaccacatgctgaggaacacctgaaaggtgacttttacgaaagtgaacatggtataaatatagaccttaatataaataatcatttaattgctaaagagatggaacataatacagtgtgtgctgctggtactagtcctgttggggaaattggtgaagagaaaattttgcccaccagtgagactaaacagtgcacagtattggatacctaccctggtgttagtgaagctgatgcaggagaaactctatcttctactggtccttttgctctggaacctgatgcaacaggaactagtaagggtattgaatttaccacagcatctactctcagtttagttaataaatatgatgttgatttatctttaactactcaagatactgaacatgacatggtaatttccaccagtcctagtggtggtagtgaagctgacattgaagggcctttgcctgctaaagatattcatcttgatttaccatctaataataaccttgttagtaaggatacagaagaaccattacctgtaaaagagagtgaccagacattagcagctctgctcagccctaaagaaagtagtggaggagaaaaagaagtacctccccctcctaaagagacactgcctgattcaggattttctgccaatattgaggatattaatgaagcagatttagtgagaccgttacttcctaaggacatggaacgtcttacaagccttagagctggcattgaaggacctttacttgcaagtgatgttggacgtgacagatctgctgccagcccggttgtaagtagtatgccagaaagagcttcagagtcttcttcagaggaaaaagatgattatgaaatttttgtaaaagttaaggacactcacgaaaaaagcaagaaaaataagaaccgtgataagggggagaaagagaagaaaagagactcttcattaagatctcgaagtaagcgttccaaatcttctgaacacaaatcacgcaagcgtaccagtgaatctcgttctagggcaagaaagagatcatctaagtccaagtctcatcgctctcagacacgttcacggtcacgttcaagacgcaggaggagaagcagcagatcaagatcaaagtctagaggaagaagatctgtatcaaaagagaagcgcaaaagatctccaaagcacagatccaagtctagggaaagaaaaagaaaaagatcaagctccagggataaccgaaagacagttagagctcgaagtcgaaccccaagtcgtcggagtcggagtcatactccaagtcgtcgacgaaggtctagatctgtgggtagaagaaggagctttagcatttccccaagccgccgcagccgcacccccagccgccgcagccgcacccccagccgccgcagccgcacccccagccgccgcagccgcacccccagccgccggagccgcacccctagccgtcggagccgcaccccaagccgccggagaagatcaaggtctgtggtaagaagacgaagcttcagtatctcaccagtcagattaaggcgatcaagaacacccttaagaagaaggtttagcagatctcccatccgtcgtaaaagatccaggtcttctgaacgaggcagatcacccaaacgtctgacagatttggataaggctcaattacttgaaatagccaaagctaatgcagctgccatgtgtgctaaggctggtgtccctttaccaccaaacctaaagcctgcacctccacctactatagaagagaaagttgctaaaaagtcaggaggagctactatagaagaactaactgagaaatgtaaacagatcgcacagagtaaagaagatgatgatgtaatagtgaataaacctcatgtttcggatgaagaggaagaagaacctcctttttatcatcatccctttaaactcagtgaacccaaacctatttttttcaatctgaatattgctgcagcaaaaccaactccaccaaaaagccaggtaacattaacaaaagaattccctgtatcatctggatctcaacatcggaaaaaagaagcggatagtgtttatggagaatgggttcctgtggagaaaaatggtgaagaaaacaaagatgatgataatgttttcagcagcaatttgccctcagagggccgggttaaacggcagggccgggttagacgacagatgaaacaacccgcagcttctcatttgacagtaactcgatgcaattcactttgtggaaccaagccacaaaatgaaaaagcatcgaaatgcagaagaacagtgttatcacatccctacccaacattgggccctccctgcacttgtggggaaggtagtccaaggtacaactattttagcttcccgattttgctttcaaggctctatagctctagattttggtggtagcaaatttatcgggtggagggattgatcggagagggcagatcctcaggttcaacacaagaactggattggaaaaggtcattgtaggttgatgtgagcatcttgggtacatagcccattgcccttaatgatggtttcttactgtttctctgggttgtttgtcagatagcctttaattttaattatttttccttccctttgctaccttggcccttttaaattcttgtgtttaacctaatgctcagccttggtactccattcccttctccttcccctctttgctactattaaaagtcggagaagtggaattcaaacgttgaaatttccacggggctatagttgtatcttaataatgccaagtgtcaaaacaaccccattaaaatgccgcctgattaaataatgtgctgctaaatatagtgcacatgaaaacagcaagactgtatatatatgtaaatatatatatatatctgtatctttgtatgtatctctgtatctgtacctttgctgtatcttttaataaacagtttactttt

SEQ ID NO: 136552 - DNA, 6370 bp, Homo sapiens
atggccccagaatcccatatattagcttctaacaccatggagacccatatattagcatccaacaccatggactcccaaatgctagcgtccaacaccatggactcccagatgctagcatccaacaccatggactcccagatgttagcgtctagcaccatggactcccagatgttagcaactagctccatggactcccaaatgctagcgtccaacaccatggactcccagatgctagcatccaacaccatggactcccagatgttagcgtctagcaccatggactcccagatgttagcaactagctccatggactcccagatgttagcaactagctccatggactcccagatgttagcaactagcactatggactcccagatgttagcaaccagttccatggactcccagatgttagcaaccagctccatggactcccagatgttagcaaccagctccatggactcccagatgttagcaaccagctccatggactcccagatgttagcaaccagcaccatggattctcagatgttagcaaccagcaccatggactcccagatgttagcaactagctcaatggattcccagatgttagcatctggcactatggactctcaaatgttagcttctggcaccatggatgctcagatgttagcgtctggtaccatggatgcccagatgttagcgtctagtacccaagattctgctatgttgggttcaaaatctcctgatccctataggttagctcaggatccttacaggttagctcaggatccctataggttgggccatgacccctatagattaggtcatgatgcttacaggttaggacaagacccttatagattaggccatgatccctacagactaactcctgatccctataggatgtcacctagaccctacaggatagcacccaggtcctatagaatagcacccaggccatataggttagcacctagacccctgatgttagcatctagacgttctatgatgatgtcctatgctgcagaacgttccatgatgtcatcttacgaacgctctatgatgtcttatgagcggtctatgatgtcccctatggctgaacgctctatgatgtcagcctacgagcgctctatgatgtcagcctacgagcgctctatgatgtcccctatggctgagcgctctatgatgtcagcttatgaacgctccatgatgtcagcttatgaacgctccatgatgtccccaatggctgatcgatctatgatgtccatgggtgctgaccggtctatgatgtcgtcatactctgctgctgaccggtctatgatgtcatcgtactctgcagctgaccgatctatgatgtcatcttatactgctgatcgttcaatgatgtctatggctgctgattcttacaccgattcttacactgacacatatacagaggcatatatggtgccacctttgcctcctgaagagcccccaacaatgccaccgttgccacctgaggagccaccaatgacaccaccattgcctcctgaggaaccaccagagggtccagcattgcccactgagcagtcagcattaacagctgaaaatacttggcctacagaggtgccatcattaccatctgaagagtctgtatcgcagcctgagcctcctgtgagtcaaagtgagatttcggagccttcagcagtgcctactgattattcagtgtcagcatcagatccctcagttttagtatcagaggctgctgtgactgttccagaaccaccaccagagccagaatcttcaattacgttaacacctgtagagtctgcagtagtagcagaagaacatgaagttgttccagagagaccagtgacttgtatggtatctgaaactcccgccatgtcagctgaaccaactgtgttagcatcagagcctcctgttatgtcagagacagcagaaacatttgattccatgagagcctcaggacatgttgcctcagaagtatctacatccttgttggttccagcagtaactactccagtgctggcagagagcattctggagccgccagccatggctgccccagagtcttcagctatggctgtcctggagtcttcggctgtgaccgtcctggagtcttcgactgtgactgtcctggagtcttcgactgtaactgtcctggagccttcggttgtgactgtcccggagcctcctgttgtggctgagccagactctgttaccattcctgtgccagttgtttctgcgctggagccttctgtgcctgttctggaaccagcggtgtcagtccttcaaccttctatgattgtttcagaaccatctgtttctgtccaggaatcgactgtgacagtttcagagcctgctgtcacagtctcagagcagactcaagtaataccaactgaggtggctatagagtccacaccaatgatactggaatctagtatcatgtcatcacatgttatgaaaggaattaatctatcctctggtgatcaaattcttgctccagagattggcatgcaggagattgcattgcattcaggtgaagaaccacatgctgaggaacacctgaaaggtgacttttacgaaagtgaacatggtataaatatagaccttaatataaatagtcatttaattgctaaagagatggaacataatacagtgtgtgctgctggtactagtcctgttggggaaattggtgaagagaaaattttgcccaccagtgagactaaacagcgcacagtattggatacctaccctggtgttagtgaagctgatgcaggagaaactctatcttctactggtccttttgctctggaacctgatgcaacaggaactagtaagggtattgaatttaccacagcatctactctcagtttagttaataaatatgatgttgatttatctttaactactcaagatactgaacatgacatggtaataatttccaccagtcctagtggtggtagtgaagctgacattgaagggcctttgcctgctaaagatattcatcttgatttaccatctaataataaccttgttagtaaggatacagaagaaccattacctgtaaaagagagtgaccagacaatagcagccttgctcagccctaaagaaagtagtggaggagaaaaagaagtacctccccctcctaaagagacactgcctgattcaggattttctgccaatattgaggatattaatgaagcagatttagtgagaccgttacttcctaaggacatggaacgtcttacaagccttagagctggcattgaaggacctttacttgcaagtgatgttggacgtgacagatctgctgccagcccggttgtaagtagtatgccagaaagagcttcagagtcttcttcagaggaaaaagatgattatgaaatttttgtaaaagttaaggacactcacgaaaaaagcaagaaaaataagaaccgtgataagggggagaaagagaagaaaagagactcttcattaagatctcgaagtaagcgttccaaatcttctgaacacaaatcacgcaagcgtaccagtgaatctcgttctagggcaagaaagagatcatctaagtccaagtctcatcgctctcagacacgttcacggtcacgttcaagacgcaggaggagaagcagcagatcaagatcaaagtctagaggaagaagatctgtatcaaaagagaagcgcaaaagatctccaaagcacagatccaagtctagggaaagaaaaagaaaaagatcaagctccagggataaccgaaagacagttagagctcgaagtcgaaccccaagtcgtcggagtcggagtcatactccaagtcgtcgacgaaggtctagatctgtgggtagaagaaggagctttagcatttccccaagccgccgcagccgcacccccagccgccgcagccgcacccccagccgccgcagccgcacccccagccgccgcagccgcacccccagccgccggagccgcacccctagccgtcggagccgcaccccaagccgccggagaagatcaaggtctgtggtaagaagacgaagcttcagtatctcaccagtcagattaaggcgatcaagaacacccttaagaagaaggtttagcagatctcccatccgtcgtaaaagatccaggtcttctgaacgaggcagatcacccaaacgtctgacagatttggataaggctcaattacttgaaatagccaaagctaatgcagctgccatgtgtgctaaggctggtgtccctttaccaccaaacctaaagcctgcacctccacctactatagaagagaaagttgctaaaaagtcaggaggagctactatagaagaactaactgagaaatgtaaacagatcgcacagagtaaagaagatgatgatgtaatagtgaataaacctcatgtttcggatgaagaggaagaagaacctcctttttatcatcatccctttaaactcagtgaacccaaacctattttttttcaatctgaatattgctgcagcaaaaccaactccaccaaaaagccaggtaacattaacaaaagaattccctgtatcatctggatctcaacatcggaaaaaagaagcggatagtgtttatggagaatgggttcctgtggagaaaaatggtgaagaaaacaaagatgatgataatgttttcagcagcaatttgccctcagagcctgtgggacatctctacagcaatgagtgaacgggcacttgctcagaaaagactcagtgagaatgcatttgatcttgaagccatgagcatgttaaatagagctcaggaaaggattgatgcctggggcttcagctggaactctattcctgggccagttcacagggaagtacaggagtacaggtttttgacacaaggaacagttgggccaattactggttgcccaagcctgggtttaaaaaggatcagttcttaagagcagccccggtaactggaggaatgggagccgtttttgatgagaaaaatgggctggaggagaaggagaagggattaggaaaaaacaaagaaggcaacaagggaacccatcctagttgattttaagacagaccgaaaaggtctttgttgcagtaggagaaagagcacaaaagaggtctggggaacttctctgcttgcaatgaaagatcttgttcaggcaaacatcctgtgttctgctttgatggagatctgtaataaaagaaggtggcaaccacctgaatttctattggtccatgatagtggccctgatcatcgcaaacattttctctttaagggtattgataaatgggaagcgcttaccagcccaattgtatgtttttcttgaataggtattgataaatggaagcgcttaccagcccagctttgccagccctaataagaagcatgctaaagccacagcagctactgtggttcttcaagcaatgggccttgtaccaaaggacctcatggctaatgccacttgcttcaggagtgcctcacgtagatagattgaggttttataataatcatttcagaattttactctgcatcacaatgtatttcctctttaatgttgtaaatatttggcaatttaagacattgtgtaaaaagcaatctgtaaaaacagtctccaggctttgatttttgtacccatggaaattgtatttaaccatacagggttttggtatgtttatattgtttaccttaagtgatgtaattggtttaagtgggctaaccatccaaaccgactgggtttggaaggccatcagagtaaccctccagtgtggaatgttaaataacgcttttatactgtattttgtactatgatgtaactccccttccttatggctaggctactgtaacacttgcctgtaatcagtgaagggctgtgcaccttgtactatttcacaatgggttctgctggacagataatgggccagtgttattgaggtgatcaagatctgttccacagggctaatgccaccatctcccctcaaaatttgtagaggttctaaaaagaaagtggtatgttgtgtgatgatcagcactaagtcctgcattcctgttaaagccacttgggtcataagaagggaagtaaaaaatgaagtctgactagaaattctattgcagaggccaagtacatttagtatggcattgagttgtgatatagttttcatttgatgtgcattttgaatttcagctacacctagatagacgtaaaatgataattaaaatgctgtaaccaacttatctaataaaattggcaaccagccactattttgttgactatgagaaagttaaaagtttatgttaatttttagggtctgatagaatatttcatgtgtattacagtggtattcatatgctatgtctctaaactttattttcaaaagcttaaggcccaaatacaaacttccttta

SEQ ID NO: 136553 - DNA, 7657 bp, Homo sapiens
aatcagcgaggaggagttgagagaacggagcggacgccatggcgaccaacatcgagcagatttttaggtctttcgtggtcagtaaattccgggaaattcaacaggagctttccagtggaaggaatgaaggccagctgaatggtgaaacaaatacacccattgaaggaaaccaggcgggtgatgcagctgcctctgcccaggagtctaccaaatgaagaaatagtgcagaagatagaggaagtactttgctggggtcttagatacagaactacgatataagccagacttgaaagagggctccagaaaaagtagatgcgtatctgtacaaacagatcctactgatgaaattgcccactaaaaagtcaaagaagcataaaaagcacaaaaacaaaaagaagaaaaagaagaaagaaaaggaaaaaaaatataaaagacagccagaagaatctgagtcaaagacgaaatctcatgatgatgggaacatagatttagaatctgattcctttttaaagtttgattctgaaccttcagctgtggcgctggagcttcctacaagagcatttggcccatctgagaccaatgaatcccctgcagttgtgctagaacctcctgtagtatcaatggaggtatcagagccacacatcttagaaactctgaagccagctacaaaaactgcagaactgtcagttgtatctacatcagtaatctcagagcagtcagagcagtctgtggcagtaatgccagaaccatccatgacaaagattctggattcctttgcagcagcaccagtgcctactacaacactggtgttgaagtcatctgagccagttgtaacaatgtcagtggagtatcagatgaagtctgtgctgaaatctgtggagagcacatctccagagccatcaaagatcatgttggtagagcccccagtagcaaaagtgttagagccttcagaaacccttgtggtatcatcagagacacctactgaggtgtaccctgagccaagcacatcaacaacaatggattttccagagtcatctgcaattgaagcgctaagattgccagagcagcctgtagacgtaccatcggagattgcagattcatccatgacaagaccgcaggagttgccggagctgcctaagaccacagcgttggagctgcaggagtcgtcggtggcctcagcgatggagttgccggggccacctgcgacctccatgccggagttgcaggggccccctgtgactccagtgctggagttacctgggccctctgctaccccggtgccagagttgccagggcccctttctaccccagtgcctgagttgccagggccccctgcgacagcagtgcctgagttgccagggccctctgtgacaccagtgccacagttgtcgcaggaattgccagggcttccagcaccatccatggggttggagccaccacaggaggtaccagagccatctgtgatggcacaggagttgccagggctgcctttggtgacagcagcagtagagttgccagagcagcctgcggtaacagtagcaatggagttgaccgaacaacctgtgacgacgacagagttggagcagcctgtggggatgacaacggtggaacatcctgggcatcctgaggtgacaacggcaacagggttgctggggcagcctgaggcaacgatggtgctggagttgccaggacagccagtggcaacgacagcgctggagttgccggggcagccttcggtgactggggtgccagagttgccagggctgccttcggcaactagggcactggagttgtcggggcagcctgtggcaactggggcactagagttgcctgggccgctcatggcagctggggcactggagttctcggggcagtctggggcagctggagcacttggagcttttggggcagcctcttggaaacaggggtgcttggagtttgccagggcagcctggggcgcccagagtttgcctgggcagcctgttgcaacttgtggcgcttggagatctctgttcagtctgtggtgacaacattcggagctgtcaacgatgaccgtgtcgcagtccctggaggtgccctcgacgacagcgctggaatcctataatacggtagcacaggagctgcctactacattagtgggggagacttctgtaacagtaggagtggatcccttgatggccccagaatcccatatattagcttctaacaccatggagacccatatattagcatccaataccatggactcccaaatgctagcgtccaacaccatggactcccagatgctagcatccaacaccatggactcccagatgttagcgtctagcaccatggactcccagatgttagcaactagctccatggactcccagatgttagcaactagctccatggactcccagatgttagcaactagcactatggactcccagatgttagcaaccagttccatggactcccagatgttagcaaccagctccatggactcccagatgttagcaaccagctccatggactcccagatgttagcaaccagctccatggactcccagatgttagcaaccagcaccatggattctcagatgttagcaaccagcaccatggactcccagatgttagcaactagctcaatggattcccagatgttagcatctggcactatggactctcaaatgttagcttctggcaccatggatgctcagatgttagcgtctggtaccatggatgcccagatgttagcgtctagtacccaagattctgctatgttgggttcaaaatctcctgatccctataggttagctcaggatccttacaggttagctcaggatccctataggttgggccatgacccctatagattaggtcatgatgcttacaggttaggacaagacccttatagattaggccatgatccctacagactaactcctgatccctataggatgtcacctagaccctacaggatagcacccaggtcctatagaatagcacccaggccatataggttagcacctagacccctgatgttagcatctagacgttctatgatgatgtcctatgctgcagaacgttccatgatgtcatcttacgaacgctctatgatgtcttatgagcggtctatgatgtcccctatggctgaacgctctatgatgtcagcctacgagcgctctatggatgtcagcccacgagcgctctatgatggcccctatggctgagcgctctatgatgtcagcttatgaacgctccatgatgtcagcttatgaacgctccatgatgtccccaatggctgatcgatctatgatgtccatgggtgctgaccggtctatgatgtcgtcatactctgctgctgaccggtctatgatgtcatcgtactctgcagctgaccgatctatgatgtcatcttatactgctgatcgttcaatgatgtctatggctgctgattcttacaccgattcttacactgacacatatacagaggcatatatggtgccacctttgcctcctgaagagcccccaacaatgccaccgttgccacctgaggagccaccaatgacaccaccattgcctcctgaggaaccaccagagggtccagcattgcccactgagcagtcagcattaacagctgaaaatacttggcctacagaggtgccatcatcaccatctgaagagtctgtatcgcagcctgagcctcctgtgagtcaaagtgagatttcggagccttcagcagtgcctactgattattcagtgtcagcatcagatccctcagttttagtatcagaggctgctgtgactgttccagaaccaccaccagagccagaatcttcaattacgttaacacctgtagagtctgcagtagtagcagaagaacatgaagttgttccagagagaccagtgacttgtatggtatctgaaactcccgccatgtcagctgaaccaactgtgttagcatcagagcctcctgttatgtcagagacagcagaaacatttgattccatgagagcctcaggacatgttgcctcagaagtatctacatccttgttggttccagcagtaactactccagtgctggcagagagcattctggaagccgccagccatggctgccccagagtcttcagctatggctgtccctggaagtcttcgggctggtgaccgtcctggaagtcttcgactgtgactgtcctggagtcttcgactgtaactgtcctggaagctctcggttgtgactgtcccggagcctcctgttgtggctgagccagactattgttaccattcctgtgccagttgtttctagcgctggagccttctgtgcctgttctggaaccagcggtgtcagtccttcaaccttctatgattgtttcagaaccatctgtttctgtccaggaatcgactgtgacagtttcagagcctgctgtcacagtctcagagcagactcaagtaataccaactgaggtggctatagagtccacaccaatgatactggaatctagtatcatgtcatcacatgttatgaaaggaattaatctatcctctggtgatcaaaatcttgctccagagattggcatgcaggagattgcattgcattcaggtgaagaaccacatgctgaggaacacctgaaaggtgacttttacgaaagtgaacatggtataaatatagaccttaatataaataatcatttaattgctaaagagatggaacataatacagtgtgtgctgctggtactagtcctgttggggaaattggtgaagagaaaattttgcccaccagtgagactaaacagcgcacagtattggatacctaccctggtgttagtgaagctgatgcaggagaaactctatcttctactggtccttttgctctggaaccctgatgcaacagggaactagtaagggtattgaatttaccacagcatctactctcagtttagttaataaatatgatgttgatttatctttaactactcaagatactgaacatgacatggtaatttccaccagtcctagtggtggtagtgaagctgacattgaagggcctttgcctgctaaagatattcatcttgatttaccatctaataataaccttgttagtaaggatacagaagaaccattacccgtaaaaagagatgtaccagacattagcagctctgctcagccctaaagaaaagtagtggagagaaaaaagaagtacctcccccctcctaaagagagcacttgcctgaattcaggatttctgcccaatattgaggatattaatgaagcagatttagtgagaccggtttcttcccctaggacatggaacgtccttccaagccctagagctggcctttgaagggccttttacttgcaagtgattttggaccggtacagaatctttattccagccccggttgtaaagtagtatgccaggaaagagcttccgggtctttcttcgggggaaaaaggtggttagtgaaatttttgtaaaagttaaggacactcacgaaaaaagcaagaaaaataagaaccgtgataagggggagaaagagaagaaaagagactcttcattaagatctcgaagtaagcgttccaaatcttctgaacacaaatcacgcaagcgtaccagtgaatctcgttctagggcaagaaagagatcatctaagtccaagtctcatcgctcttcagacacgttcacggtcacgttccaagaccgcaggaggagaagcagcagatcaagatcaaagtctagaggaagaagatctgtatcaaaagagaagcgcaaaagatctccaaagcacagatccaagtctagggaaagaaaaagaaaaagatcaagctccagggataaccgaaagacagttagagctcgaagtcgaaccccaagtcgtcggagtcggagtcatactccaagtcgtcgacgaaggtctagatctgtgggtagaagaaggagctttagcatttccccaagccgccgcagccgcacccccagccgccgcagccgcacccccagccgccgcagccgcacccccagccgccgcagccgcacccccagccgccggagccgcacccctagccgtcggagccgcaccccaagccgccggagaagatcaaggtctgtggtaagaagacgaagcttcagtatctcaccagtcagattaaggcgatcaagaacacccttaagaagaaggtttagcagatctcccatccgtcgtaaaagatccaggtcttctgaacgaggcagatcacccaaacgtctgacagatttggataaggctcaattacttgaaatagccaaagctaatgcagctgccatgtgtgctaaggctggtgtccctttaccaccaaacctaaagcctgcacctccacctactatagaagagaaagttgctaaaaagtcaggaggagctactatagaagaactaactgagaaatgtaaacagatcgcacagagtaaagaagatgatgatgtaatagtgaataaacctcatgtttcggatgaagaggaagaagaacctcctttttatcatcatccctttaaactcagtgaacccaaacctatttttttcaatctgaatattgctgcagcaaaaccaactccaccaaaaagccaggtaacattaacaaaagaattccctgtatcatctggatctcaacatcggaaaaaagaagcggatagtgtttatggagaatgggttcctgtggagaaaaatggtgaagaaaacaaagatgatgataatgttttcagcagcaatttgccctcagagggccgggttaaacggcagggccgggtgtagacgacagatgaaacaacccgcagcttctcatttgacagtaactcgatgcaattcactttgtggaaccaagccacaaagtgaaaagcatcgaattgcagagaacagtgttatcacatccctacccaacattgggccctccctgcacttgtgggaagcaaatttatcgggtggagggattgatcggagagggcagatcctcaggttcaacacaagaactggattggaaaaggtcattcctgtggacatctctacagcaatgagtgaacgggcacttgctcagaaaagactcagtgagaatgcatttgatcttgaagccatgagcatgttaaatagagctcaggaaaggattgatgcctgggctcagctgaactctattcctggccagttcacaggaagtacaggagtacaggttttgacacaagaacagttggccaatactggtgcccaagcctggattaaaaaggatcagttcttaagagcagccccggtaactggaggaatgggagccgttttgatgagaaaaatgggctggagagaaggagaaggattaggaaaaaacaaagaaggcaataaggaacccatcctagttgattttaagacagaccgaaaaggcaaacatcctgtgtctgctttgatggagatctgtaataaaagaaggtggcaaccacctgaatttctattggtccatgatagtggccctgatcatcgcaaacattttctctttagggtattgataaatggaagcgcttaccagcccagctttgccagccctaataagaagcatgctaaagccacagcagctactgtggttcttcaagcaatgggccttgtaccaaaggacctcatggctaatgccacttgcttcaggagtgcctcacgtagatag

SEQ ID NO: 136554 - DNA, 2342 bp, Homo sapiens
gttcgatttctgataccattcataactggctgtgtgatctcaaataagaaaactgaagaaccagctgggcgcggtagtcacgcctgtaatcccagcactttgggaggctgaggcgggtggattacctgagaacctctaaaatgcagacctccagctctagatctgtgcacctgagtgaatggcagaagaattacttcgcaattacatctggcatatgtaccggaccgaaggcagatgcataccgtgcacagatattacgcattcagtatgcatgggcaaactctgagatttcccaggtctgtgctaccaaactgttcaaaaaatatgcagagaaatattctgcaattattgattctgacaatgttgaatctgggttgaataattatgcagaaaacattttaactttggcaggatctcaacaaacagatagtgacaagtggcagtctggattgtcaataaataatgttttcaaaatgagtagtgtacagaagatgatgcaagctggcaaaaaattcaaagactctctgttggaacctgctcttgcatcagtggtaatccataaggaggccactgtctttgatcttcctaaatttagtgtttgtggtagttctcaagagagtgactcattacctaactcagctcatgatcgagaccggacccaagacttcccggagagcaatcgtttgaaactccttcagaatgcccagccacctatggtgactaacactgctaggacttgtcctacattctcagcacctgtaggtgagtcagctactgcaaaattccatgtcacaccattgtttggaaatgtcaaaaaggaaaatcacagctctgcaaaagaaaacataggacttaatgtgttcttatctaaccagtcttgttttcctgctgcctgtgaaaatccacagaggaagtctttttatggttctggcaccattgatgcactttccaatccaatactgaataaggcttgtagtaaaacagaagataatggcccaaaggaggatagcagcctgcctacatttaaaactgcaaaagaacaattatgggtagatcagcaaaaaaagtaccaccaacctcagcgtgcatcagggtcttcatatggtggtgtaaaaaagtctctaggagctagtagatcccgagggatacttggaaagtttgttcctcctatacccaagcaagatgggggagagcagaatggaggaatgcaatgtaagccttatggggcaggacctacagaaccagcacatccagttgatgagcgtctgaagaacttggagccaaagatgattgaacttattatgaatgagattatggatcatggacctccagtaaattgggaagatattgcaggagtagaatttgctaaagccaccataaaggaaatagttgtgtggcccatgttgaggccagacatctttactggtttaaggggaccccctaaaggaattttgctctttggtcctcctgggactggtaaaactctaattggcaagtgcattgctagtcagtctggggcaacattctttagcatctctgcttcatccttaacttctaaatgggtaggtgagggggagaaaatggtccgtgcattgtttgctgttgcaaggtgtcagcaaccagctgtgatatttattgacgaaattgattccttgttatctcaacggggagatggtgagcatgaatcttctagaaggataaaaacagaatttttagttcaattagatggagcaacaacatcttctgaagatcgtatcctagtggtgggagcaacaaatcggccacaagaaattgatgaggctgcccggagaagattggtgaaaaggctttatattcccctcccagaagcttcagccaggaaacagatagtaattaatctaatgtccaaagagcagtgttgcctcagtgaagaagaaattgaacagattgtacagcagtctgatgcgttttcaggagcagacatgacacagctttgcagggaggcttctcttggtcctatttcggcagtttacaaactgctgacattgctaccataacaccggatcaagttcgacccatagcttacattgattttgaaaatgcttttataactgtgcgacctatagtttctccaaaagatttatagctttatgaaaactggaacaaaactttatgttgtggaaagtaagtgggatacttgtaatcaaggcatctctgtattcagtcttctttattttttagcatataaagtttgggtgtgttaatatgatttttaagactatcttctaaatactgtacttgaccatatatcacagattttacatctgattgacatagtgtatgttaacgtacgttaggcatcg

SEQ ID NO: 136555 - DNA, 652 bp, Homo sapiens
  misc_feature (1)...(652): n = a,t,c or g
ttttttttttcttttttccggcgttcaagatgtcgaagcgagggccgtgggtgggtcccttctgggtgccgaaaattcccggattttcccttgggtcttcccggtagggancctgtaatccaattggtgcttgacaaacaccaggagcccaaaaaaccctgtatatccatctcccgtgaagggggaatcaaggggaccggcttgaccagacttccccgcctgcctggtgtgggtgaacatggtgatggcccacagttcaagaaaggcaaacccagagcttcagaaaaaagggtacatcccagcaagtggtcattcgacaacgaaaagtcattaccgtaggaaaacgatggcgttgtttctttatttttgaagattaatgcaggagtcataggggaccaataaaggcggagatgaaaggttttgccattacaggaacccagagcaaaggagtgtgcagacttgtggccccgggattgcatccaaatgctgggcagcattgcatggttctcccagtatattttgtaaaaaataaaaaaaaaaactaaacccattacaaaaaaactaaaaaaaacctcgggggggggccggtgccccaattagccttatcgggaggcgttttacaattatgtggccgaccttttacaaggtagga

SEQ ID NO: 136556 - DNA, 1553 bp, Homo sapiens
atggcccatcggcttcggtttcattttggctctggtcgcagcaacacagcccccgaatcagacatcctagaccaggagagagaagacgacttcttcatggcattccacaccctaccgcggagaagcagcccgcaccccttcgcccagaacggaggggaggacggcggcggaggcctgcagggaggcgtgggtgcgcttaagcggagctcgtccatgttcatcccgcagctcttgaccagcatcgacgcccgccccacgtgcagctcctccgtgcagatctccctgcagcgcaaggccacggacggggccacggacgggtgcgggccgcccgagggcgccgacgatgggcctccatgcgcaacgcccgaccccagggaccaggcctccgccactgccaccacgagggcctcgccccagagtggctcccgggagccctcgccgagggacacccccgggagctcccctccgagggcagcccgggacccagggctccaggtcaacggcacgtgcggccgccgcgtgcggtgctccggccccgtggactgcgcggaggaggctgccccgggcctgcgcatccagcaccgcgcctccagcgccgacgtgcgccaggtgaggctgctgcccctgggccccgatggccagggcggcccggccgcggcagagcccaggcgctggtccctgcagcacgttccagatgcttctggaagctctgggaagcggtgttttgtcttccagttgcagcagccccaacaaggcgcttcggggccaggcagcgacctcaactttggcttcacgggcacaaagggggacaggttggtgaggtatcctcgcattcggctggagaggagcacctcgtaccccacgcagccccgaagcgagcgagggagccccacggaagatcggggagccctggaggcatcgcctcgagctggcaggatggctcctgaaatccgcaggacgaactccgcggagaggactccgcagggccaggggtgcacatttaagatcaggcaggatcagaacgcggggcagcagcattttagaattcttgtaacccgggggccggaagaagctccccagaatcccgaggagaaaagcgccaaaagccctgtttccacgggagctgacaccacggttagctatcctaaatacgtttttacctttttaactcttaattatattaagccatttgcaagaatgggaaaaagcaggaaattcataggtggtgttgaaattgctgattctacacaaaggtaccagaatgtctacatttcctctgtaaatgtcaaaggaaactttggaaacccacctcagagttggctggtgattattcggacaggttatcatcctgtctgcaaccttctagttctcttagttcataccaagcagcatgatattccatgtcctgcacaaaggagagcaccaaaacagccttcacctgctgcgtatgccccactctgaataaaaaaattagaaggccaaggacacgatgtgtaatattagcaaaagcagaatggagatgctatcattctgggccagggggattatgaaga

SEQ ID NO: 136557 - DNA, 1816 bp, Homo sapiens
cttctctgccagaagataccatttcaactttaacacagcatgatcgaaacatacaaccaaacttctccccgatctgcggccactggactgcccatcagcatgaaaatttttatgtatttacttactgtttttcttatcacccagatgattgggtcagcactttttgctgtgtatcttcatagaaggttggacaagatagaagatgaaaggaatcttcatgaagattttgtattcatgaaaacgatacagagatgcaacacaggagaaagatccttatccttactgaactgtgaggagattaaaagccagtttgaaggctttgtgaaggatataatgttaaacaaagaggagacgaagaaagaaaacagctttgaaatgcaaaaaggtgatcagaatcctcaaattgcggcacatgtcataagtgaggccagcagtaaaacaacatctgtgttacagtgggctgaaaaaggatactacaccatgagcaacaacttggtaaccctggaaaatgggaaacagctgaccgttaaaagacaaggactctattatatctatgcccaagtcaccttctgttccaatcgggaagcttcgagtcaagctccatttatagccagcctctgcctaaagtcccccggtagattcgagagaatcttactcagagctgcaaatacccacagttccgccaaaccttgcgggcaacaatccattcacttgggaggagtatttgaattgcaaccaggtgcttcggtgtttgtcaatgtgactgatccaagccaagtgagccatggcactggcttcacgtcctttggcttactcaaactctgaacagtgtcaccttgcaggctgtggtggagctgacgctgggagtcttcataatacagcacagcggttaagcccaccccctgttaactgcctatttataaccctaggatcctccttatggagaactatttattatacactccaaggcatgtagaactgtaataagtgaattacaggtcacatgaaaccaaaacgggccctgctccataagagcttatatatctgaagcagcaaccccactgatgcagacatccagagagtcctatgaaaagacaaggccattatgcacaggttgaattctgagtaaacagcagataacttgccaagttcagttttgtttctttgcgtgcagtgtctttccatggataatgcatttgatttatcagtgaagatgcagaagggaaatggggagcctcagctcacattcagttatggttgactctgggttcctatggccttgttggagggggccaggctctagaacgtctaacacagtggagaaccgaaacccccccccccccccccgccaccctctcggacagttattcattctctttcaatctctctctctccatctctctctttcagtctctctctctcaacctctttcttccaatctctctttctcaatctctctgtttccctttgtcagtctcttccctcccccagtctctcttctcaatccccctttctaacacacacacacacacacacacacacacacacacacacacacacacacacacacacacacacacagagtcaggccgttgctagtcagttctcttctttccaccctgtccctatctctaccactatagatgagggtgaggagtagggagtgcagccctgagcctgcccactcctcattacgaaatgactgtatttaaaggaaatctattgtatctacctgcagtctccattgtttccagagtgaacttgtaattatcttgttatttattttttgaataataaagacctcttaacattaaaa

SEQ ID NO: 136558 - DNA, 2994 bp, Homo sapiens
  misc_feature (1)...(2994): n = a,t,c or g
gacagatctgcgcgtatcctggagccggcccagttgtgaactaggagagctttgggacctctgtcccaagcaagagagatgaatggagagtatagaggcagaggatttggacgaggaagatttcaaagctggaaaaggggaagaggtggtgggaacttctcaggaaaatggagagaaagagaacacagacctgatctgagtaaaaccacaggaaaacgtacttctggtaggtgaggtcaatgattgttcaatttttttcacttaaggaagcaattcacgtctatcatacaaggcggtttccagaaagtagtaattcaggaagcagcaaccatccttatggctaagagactaaaagaagttctgaggttaccagaatgtgggaattcaaaggttggagaggtcacagcatagctgttattttgacttttgaggggcaccctacaaagctatgcttggacttctgtgataccagatatagcaactgaactaagagatgcacctgagaaaaccttggcttgcatgggtttggcaatacatcaggtaactatttgtcttatgcatacttttgtctaaacttttttaatgtttgcacacacatgcacaccttgtctaacaatggtaaatgtgccacatattcatgcaaggtgaggaatttgatgtattaaagtattacttagaatgggacattgaaggccatttaagaatgaaaacgctcatagagggacagtggttcgtgtcagtaatataaagcctctttgcaccaagatggcttttctttgtgctgcatgtggagaaattcagagctttcctcttccagatggaaaatacagtcttcccacaaaggtaatacgttctttaactgcttctttatttatcttggtaaagaaggcaaatcagaatacagaaaacatttcccggcagtcaatcaagtaagcgatcagactgttacataaaaggcaggctttagatgtcacactgttgagaaaatccataattttactgcatgatcttgtggatagctgtgtcccgggagacacagtgactattactggaattgtcaaagtctcaaatgcggaagaaggtagggtacaactcttttcattatttgtctctcaataatgattcatcaacgttcatcttttctaagatgctcccccccacatccttgttgttggagatccaggcctaggaaaaagtcaaatgctacaggtagacaatcagtcatttagtgtttgttcttttgcttgtaaaatgcgttaataattcacaagtgaattttctcctctttcaaaagatagttcctctggagattttgctttggaagctggtgccctggtacttggtgatcaaggtgagaggccaaagggaataattagtgattctgggactttttgaaaagccttttccttttcagttaatttcttaagtattagtcttgctaaggctggtgtggtttgtagccttcctgcaagaacttccattattgctgctgcaaatccagttggaggacattacaataaagccaaaacagtttctgagaatttaaagtaagtctcttcaaatatttatacctttaatgtattgaatcactttaattcaataagaaaaagaaatagttcacacttactctctgaacatgtgattgcaataagagctggaaagcagagaaccattagcagtgccacagtagctcgtatgaatagtcaagattcaaatacttccgtacttgaagtagtttctgagaagccattatcagaaagactaaaggtataaatgtttcttctccttattcagtttggttctgtttgaatgtcaaagttcagtgtgtggcttattgtagatgtgtacccaaggctatccacagaagctgctcgagttcttcaagatttttaccttgagctccggaaacagagccagaggttaaatagctcaccaatcactaccaggcagctggaatctttgattcgtctgacagaggtttgtttctttttatggtcatgctttttttggcttaaaggggaagggtgtgccttgacttctcttttgaagtataggtaagataaaaatttcaaattgttttaaatgaaataccagttatcttcccatctcaaattaggtaataggccaaacaggtcaacagcgaaaagatttatttctgctctcaacaacgttgctgaaagaacttataataatatatttcaatttcatcaacttcggcagattgccaaagaactaaacattcaggttgctgattttgaaaattttattggatcactaaatgacccagggttacctcttgaaaaaaggcccaaaagtttacccagcttcaaactatgtaaaagggacttcacccaagttagggcctcctgggtttattgcaagattaaagccatctcagtgaagagtagtgcgtgcacgcacagacagacagacacacacacacacacacacacacacacacacacacacacacacacacagtcaaatactgttctctgaaaaatgatgtcccaaaagtattataataggaaaaaagcgattaaatataataaactaatttaagaagtgataaagtctccagatgcagtagctcacactgtaatgcacagtgactcaggaggctgaggtgagaggattccttgaggccagggttcgagaccaaccttgggcaacatggcaagaccccatttcttaaaaaaaaaaaaaaaaaaatttaaacttagctgggtatggtggcacatgcctgtggtctcagctacttgtgaggctgaggcaggaggattctttgggcccagggagtttaaggttacggtgagccacaatcacaccaatcactgcactccagcctgggcaattaaagttaactctttggactcaaaaaaataaaaaaaattgtagtggtagccatgtgttnattgtttaaataaattctcccaaagggcttaaaagtaattactttttaatttttttattagtttgtattttttngaccct

SEQ ID NO: 136559 - DNA, 472 bp, Homo sapiens
cactgtggggagcagcagcggtagctccaccacgtgggtcttctgatggtatgtgtggtgaggcaagtgtgagtcagctcatgggacagacccacaccagcctctcacttccaaactcaccccctaccagggagggcgagctccgtggccagccagggaggcagggcaggggcctcaaaggcatacagtggtggcaggctccccagtacttgttgagcctacaaaagtgcagaggtgtttaggggagaggcagagacatggtagctgctgtcaccaaagtctctaactctgctccaatcaatcaccttttgggaagacaacatttacgggataacaaaacgagcagaagctactagctcaaaagtgtgtcgtccccattcacatcctatacaaattctggaaatccaccatttttaacttgaggtgatgtgttgggaaggttaacaggcattttcccccccctcctgcctcc

SEQ ID NO: 136560 - DNA, 503 bp, Homo sapiens
gggaggcttttggaaaggaatggggaagactatatctgcccaaactgcaccattctgcaagtgcaggatgagactcattcagaaacggcagatcagcaggaagctaaatggagacctggagatgctgatggcaccgattgtacaagtataggaacaatagagcagaagtctagcgaagaccaagggataaagggtagaattgagaaagctgcaaatccaagtggcaagaagaaactcaagatcttccagcctgtgatagaggcgcctggtgcctcaaaatgtattggccccgggtgctgtcacgtggcgcagcccgactcggtgtactgcagtaatgactgtatcctcaaacacgccgcagcgacaatgaagtttctaagctcaggtaaagaacagaagccaaagcctaaagaaaagatgaagatgaagccagagaagcccagtcttccgaaatgcggtgctcaggcaggtattaaaatctcttctgtgcacaagagaccagc

SEQ ID NO: 136561 - DNA, 2986 bp, Homo sapiens
gagagagtaagttggagggaaaggcggctcaggacatcaaagatgaggagcctggagacttgggccgaccgaagcctgaatgtgagggttacgaccccaacgccctgtattgcatttgccgccagcctcacaacaacaggtttatgatttgctgtgaccgctgtgaagaatggtttcatggcgattgtgtgggcatttctgaggctcgagggaggcttttggaaaggaatggggaagactatatctgcccaaactgcaccattctgcaagtgcaggatgagactcattcagaaacggcagatcagcaggaagctaaatggagacctggagatgctgatggcaccgattgtacaagtataggaacaatagagcagaagtctagcgaagaccaagggataaagggtagaattgagaaagctgcaaatccaagtggcaagaagaaactcaagatcttccagcctggtcccgggcctgtccccacccagctgcctgtcctctggcaggtattggaaattgctgtgtctagaagcatctctgccttcacactcttgcactgcattagctgcaaggtgatagaggcgcctggtgcctcaaaatgtattggccccggggtgctgtcacgtggcgcagccccgactcggtgtactgcaggtaatgactgtatcctcaaacacgccgcaagcgacaatgaagtttctaagctcaggtaaagaacagaagccaaagcctaaagaaaagatgaagatgaagccagagaagcccagtcttccgaaatgcggtgctcaggcaggtattaaaatctcttctgtgcacaagagaccagctccagaaaaaaaagagaccacagtgaagaaggcagtggtggtccctgcgcggagtgaagcactcgggaaggaagcagcttgtgagagcagcacgcccgtcgtgggcgagccgatcacaattacaatgcaagtaaagccagaaaagactgctgctccctcgcccgtcactgttgtataaatccacgaaggaagacaggaggtccgaggagaaagcggcagccacggcagcctcaaagaaaacagcccctccaggctccacggtgggcaagcagcctgcacctagaaacctcgtgccaaagaagtcttcttttgctaatgtggcagcagccacaccagccattaaaaagccaccctcaggtttcaagggcaccatccccaagaggccatggctctccgctaccccatcgagtggtgcttcagctgccaggcaggccggaccggcacctgcagcggcgacggctgcctccaagaagttccctggctccgctgctttggtgggagccgtaaggaagccagtggtaccttctgttccaatggcctcgccagccccaggacgccttggggctatgagtgctgcaccatcgcagccaaattcacaaattcggcaaaatatcagacgctccttaaaagagattttgtggaaaagagtcaatgacagcgatgacttaatcatgacagaaaacgaagtaggaaaaattgccctccatattgagaaggagatgtttaacttgtttcaagttacagataatcgctacaagagtaaatatcgcagcatcatgttcaacctgaaggaccctaaaaatcagggactcttccatcgtgttctgcgtgaggaaatctctttggcgaaacttgtgagactgaagccagaagaacttgtatctaaagagctttccacgtggaaagagaggccagcgagatctgtgatggagtccagaactaaactgcacaatgaaagcaagaagacggcccccaggcaggaggccatccccgatctggaggactctccgccagtgtcggattcagaggaacagcaagagtcagcacgtgctgtccctgagaagagcacagcgccgcttctcgacgtcttcagcagcatgttgaaagacaccaccagtcagcaccgcgcacacctcttcgatctcaactgtaaaatttgcacaggccaggttccctccgcagaagatgagccagctccgaaaaaacaaaaattgtcagcttctgttaagaaagaagacttaaaatcaaagcatgacagctctgcacctgacccagctccggattcagctgatgaggtgatgccggaggctgtgcctgaagttgcctctgagccaggcctagaaagtgcttctcatccaaatgtggacagaacgtatttccctgggcctccaggagatggccatcccgagccctccccgctggaagacctgtccccctgcccagcctcctgtgggagcggggtggtcaccaccgtcacagtgtccggccgggaccccaggaccgctccaagcagttcatgcacagccgtggcctccgcagcatcccgcccagacagcacccacatggtggaagccagacaggatgtgccgaagcctgtcttgacttctgtgatggtgcccaagtccatactagctaagccatcctcatctcctgacccaagatacctgtcagttcctccgtcaccaaatatcagcacttcagaatcacgttcccctccagagggagacacgaccctctttttgtctcgactcagcaccatttggaaaggatttattaacatgcagagtgtggcaaaatttgtcactaaggcgtatcctgtctctgggtgttttgattacctcagtgaggatttgcctgacacaattcacattggtgggaggatcgcaccgaagacagtttgggattatgttggcaaactcaagtcttctgtgtctaaggagctctgtctgatccgcttccaccccgccacagaggaagaggaggtcgcctatatctctctctactcctatttcagcagccgtggccgctttggtgttgtagctaataacaacaggcacgtcaaggacctctacctgatcccgctgagcgcccaggaccctgttccatccaaactcttgccctttgagggaccaggtaagcgccggctttctgggtggaggtga

SEQ ID NO: 136562 - DNA, 2332 bp, Homo sapiens
atggcggccgcggaagggaaggagcgggcgggcgggcgggcgagcgggcggggccggtcagagccgccgcggcctggggcgcgggcctcagacgccggccctggtgggctgcgtgaggtcgaggggactggcgagcactcggtggtcgcggctggaacggttccgagggtgggagtcggggcggccgctcgcggggaagagcgcagggctggcctgggcgagtgcggcccggggctcgggggctgcgtagctggcttgatttcagggaaaagtgtccaagctttcagtgttggagcagggaggtggcccctgctgcgcgtgtttggcggcaatgtcaccttttgttctgtggtcagttggtcactatgtgcttacactttaccgctaggtatggacgacaaaggcgacccgagcaatgaggaggcacctaaggccatcaaacccaccagcaaagagttcaggaaaacatggggttttcgaaggaccactatcgccaagcgagagggcgcaggggacgcggaggctgacccactggagccgccacccccacagcagcagctgggcctgtccctgcggcgcagtgggaggcagcccaagcgcactgagcgcgtggagcagttcctgaccattgcgcggcgccgcggcaggaggagcatgcctgtctccctggaggattctggtgagcccacgtcctgccccgccacagacgccgagacagcctccgagggcagcgtggaaagcgcttctgagaccagaagcggcccccagtctgcttccacagctgtgaaggaacgaccagcctcttctgaaaaggtgaaaggaggggatgaccacgatgacacctccgatagtgacagcgatggcctgaccttgaaagagcttcagaatcgccttcgcaggaagcgggaacaggagcccactgagaggcccctgaaagggatccagagtcgcctgcggaagaagcgccgggaggagggtcccgccgagactgtgggctccgaggccagtgacactgtggagggcgtcctgcccagtaagcaggagcccgagaacgatcagggggttgtgtcccaggctgggaaagatgacagagagagtaagttggagggaaaggcggctcaggacatcaaagatgaggagcctggagactttgggccgaccgaagcctgaatgtgagggttacgaccccaacgccctgtattgcatttgccgccagcctcacaacaacaggtttatgatttgctgtgaccgctgtgaagaatggtttcatggcgattgtgtgggcatttctgaggctcgagggaggcttttggaaaggaatggggaagactatatctgcccaaactgcaccattctgcaagtgcaggatgagactcattcagaaacggcagatcagcaggaagcttaaatgggagacctgggagatgcttgatggcaccgatttttacaagtatagggaacattaggagcagaagtcttagccgaagacccaaggggttaaagggtagaattgagaaagctgcaaatccaagtggcaagaaggaactcaagatctttccagcctgtattggaaattgctgtgtctagaagcatctctgccttcacactcttgcactgcattagctgcaaggtgatagaggcgcctggtgcctcaaaatgtattggccccgggtgctgtcacgtggcgcagcccgactcggtgtactgcagtaatgactgtatcctcaaacacgccgcagcgacaatgaagtttctaagctcaggtaaagaacagaagccaaagcctaaagaaaagatgaagatgaagccagagaagcccagtcttccgaaatgcggtgctcagcctgtccagtggctgctgctcctgtcatcttggcaacttggcacctcatcagggttgcaggtgactctgtgccagccgcccttcacggagcacaagtggttgaagttctcagttttgcacggggaaactgcgggcccaccgcgggcccaccgaatacgcaagctcaacaagtactggggagcctgccaccactgtatgcctttgaggcccctgccctgcctccctggctggccacggagctcgccctccctggtaggggctggatccctgccccggcatgcggtgcacctcaacgagccctgtcccctggccatctgtcccctggcacgccgtctgtcccctgctcgagggcctttgggctctgacgatctcacatggggttataaggtgtggctgctcttcctgtggttcaggtgtatgccagctttccatatttttattaatggcatcgcctccaatggactccagtctggaaggacaacgaagtga

SEQ ID NO: 136563 - DNA, 2004 bp, Homo sapiens
ggagcgagcagtggtgctgatgttgagagaagcccagggtaccactaattgagggagtgaggaagagagcagctcgcttctaactggactgcacgttggtgacagcgtcccaagctggtgacagacccactctgtaactttcagctagattcagccaccagatcccagaaacatgacccttgctgcctacaaagagaagatgaaggagctcccgctggtgtccttgttctgctcctgcttcctggccgatcccctgaataagtcgtcctacaaatatgaaggctggtgtgggagacagtgtaggaggaaggatgaaagccagcggaaagacagtgctgactgggagagaaagaagagctcaggcagacacggttggacctgaattggtgcgtcatttccgacatggaagtcatcgagctgaacaaatgcacctcgggccaatcctttgaagtcatcctgaagccaccctcctttgatggggttcccgagttcaacgcctccctgccaaggcggcgagacccatccctggaagagatccagaagaaactagaagcggctgaggagcgaaggaagcgtggcccagacttggtgatatacgaaatacactcccctgcttctctcccctttcactcctctgatgcctctgtcctcggagatattcccccaaccacttactctaacatatcaaattcgaatcaggagctgctcctgatgggaggatcccctgcccccgagcagccccactatgaagccaacattttagaaagatcagaaacgacctcgtatgacaacggctcagatgcagcacaatctttcaaggtggatggcagatgtgtcttctacataaacattcccattccctctaacgagggaaaagttctgtggaaagcccctgaaatagcaacagccaaggagccgacatggagtccactcggctccactgggcccagaccctgccaaatacttgtcgtcaagtcaccagtcgtacatgggaagggaccagtgctcagcggctgtggcttagacttactggagcagcccacttttgcactttgctttttggtggccggggctgtcactattacatttctgtcctgcagtggtgaggaggcaagagaagagtctgcacccaaagccatgagtgaaagacaagcacgccgaggaggtgcggaaaaacaaggagctgaaggaagaggcctccaggcagtgactactccagaattaccatataggatgggattaggagcagcatttctgttgaaagagaggtcgggggtcttacctggaagcttcatttgtgaggactttactgcagcactgaagcaggatgaggaaatagggacaatgaagggcaaaataagagaggcatattttaaatcctttgttcctacaccagtggctttcagtgggggtgtaatgcttcccacagggggcactttggaaatgtgtggcaataattttggtggacacaaggagcaggcaggcacagtgcttccagcctttgccatcgcactaagagttacaccatcagcttccttggtcctaaggcctttgaatttggaccaagccatgctacagggatccctgggtctccagcttgcagatggattattttgggacttagcctccataatggactggacagcatccaggattcagcccagtgtttcttcatccatgaagatttgtcaggcatttcctggcagacctcttgccattctcttggcacaatgtgcctacgtttatgggacgtggatgaagctggaagccatcatcctcaccaaactaacacaggaacagaaaacaaaacaccacttgttctcactcccctgttgcatgcctgctgatatctcctaccgacagcgctgccttggagaacctccgcactgtaccgtttggaacaggcatttggaaagtctggtaatgatgtccaacagcaccacctccccatgctcagagctgctgatctttgaagtgcccccagtggctccggagcagaaatga

SEQ ID NO: 136564 - DNA, 1697 bp, Homo sapiens
tttcgtattccctctttctttcttcctctccgccctcacccctctggttctccagctccacaggcagcagagaaagcaggctctttgtctgacatcatctttcactccctggcctgctaagagttactcactcaggcaatccctgctccaccagaggagactgtccaattgccaagcaacccactgctggccaatcacagagcttggaggtgatgtcatggcaagagcgagcagtggtgctgatgttgagagaagcccagggtaccactaattgagggagtgaggaagagagcagctcgctttctaactggactgcacgttggtgacagcgtcccaagctggtgacagacccactctgtaactttcagctagattcagccaccagatcccagaaacatgacccttgctgcctacaaagagaagatgaaggagctcccgctggtgtccttgttctgctcctgcttcctggccgatcccctgaataagtcgtcctacaaatatgaagcagacacggtggacctgaattggtgcgtcattttccgacattggaaggtcatcgaagctgaacaaatgcaccttggggccaattcctttgaagtcatcctgaagccaccctcctttgatggggttcccgagttcaacgcctccctgccaaggcgggcgagacccattccctgggaagagattccagtaaggaaactaggaaggcggctgagggagcgaagggaagttaccagggaagcggatccttgaaaacaacttgcagagaaacggggaacatgaggagagaggtgattccaaaagggcatttagggaaacaaccactttcatcaagatggctaagggaaaaacttggcccagaagatggaatccaacagggagaacagggaggcccacctcgccgccatgttggaacggctgcaagagaaaggacaagcacgccgaggaggtgcggaaaaacaaggagctgaaggaagaggcctccaggtaaagcctagaggccaaagaactttccaggtcagccggacagctccagcagctccacgttccaggcagcctcgccccgccggctgcgctcccagcactggggtttgggggaaggggggtggccaaggggcgttttccctctgcttttggtgtttgtaacatgtttaaaaaattgacccattgaaagcccatccctatttgtttcccggggaaacaatgaacggggtgggaaaaggggagaggagagaagtttgggaaagggagatggagaagaactcaagggacaattgcaaacccctgcccggcgcaagatctgattttcacatctcctaccctggacattgaagcctcccaggcacccatgttgaggagagatgaaaacccagggcggtagaacttcagggtgaaaggacagagtccctgggtggggcagcggctgcagggcgctcctgagatacccagccagagggtgttgagctaccagtggtgttgcttctaccttgcagcaggtgggatgatgtctgtgtgtgtgtgtgatccttcattttttgatcatcatgaccaatgaaacattgactccaagtgtccagttctttattttccaaatgtggcctttgggtaattgttaaaaaggtctcgaaacctgggtttcatccatttgaagggagaagcccctttgcttccttaattctgccattcaagcatctggg

SEQ ID NO: 136565 - DNA, 1110 bp, Homo sapiens
atgcggtcagctgcgggacacgcagccgaggctctccaggaagggttgattcagaatcatgagcgcccccatgcggtaggcaccattatggtccccatttggctgatgaggaagcgaaggcccacagaagtgcaatcatttgtgcaagatcccgcgggcgaaccggagggtgtgggattcacccacacagttgggttgggtctgtgctcgacggagcagacacctggatgctattcaccccagtgtggcactcttctgcgcaaaacagctgatgccattgaagtaaggagaacaaaagcatcaaactgtgtgaaactgagtggagaaaagaaacactttctgggtggacggcacgtggattatgtggtagatcaagttgttggtaaactgattgaagtagttaagaaaaagaacaaagctggtgtatcagtgaaaccatttcaagtaaaaaaccatatatgggtttttattaattgccttattgaaaatccaacttttgattctcagactaaggaaaacatgactctgcagcccaaaagttttgggtctaaatgccagctgtcagaaaaattttttaaagcagaaaaaaagtataaaaaccctgagtacttctcagactcagtaagtggttactcacttgcccgttctgagaatgctcatccggagttccgtatggcaatgaaagacggtgagctggtgatatgggatagtgttcacccttgttacaccgttttccatgagcaaactgaaacgttttcatcgctctggagtgaataccacgacgatttccggcagtttctacacatatattcgcaagatgtggcgtgttacggtgaaaacctggcctatttccctaaagggtttattgagaatatgtttttcgtctcagccaatccctgggtgagtttcaccagttttgatttaaacgtggccaatatggacaacttcttcgcccccgttttcaccatgggcaaatattatacgcaaggcgacaaggtgctgatgccgctggcgattcaggttcatcatgccgtttgtgatggcttccatgtcggcagaatgcttaatgaattacaacagtactgcgatgagtggcagggcggggcgtaa

SEQ ID NO: 136566 - DNA, 1416 bp, Homo sapiens
atgggaattcagcccatttcacagataaggagccagaggctagacccattgagagctcaaaaaggcacataccaggatgtccaggcaggcggccttcagcagggtaatttggtctgcgatggtcaagccagtgaaaccaggcagacgtttagcaaactccacgatcttaataatgcacttggtggccagttcactgaatttgtcccagaggcccaggtccagtcggactcgatgctgcggcaaatggagagccctggcctgcttgggttggtaatgaaggcggctgtggggagcaccagcgaagcgtggattttcagcagcatttctgagtgtgcagggaggaaaaccaacagagaaggagaagcagaaagtggggtggtgaggagtgacccttgctgtggtcgtaatggttatggtgcaaaactttgtaatattttcagtacaaagtttacagtagaaacagcttgcaaagaatacaaacacagttttaagcagacatggatgaataatatgatgaagacttctgaagccaaaattaaacattttgatggtgaagattacacatgcataacattccaaccagatctgtccaaatttaagatggaaaaacttgacaaggatattgtggccctcatgactagaagggcatatgatttggctggttcgtgtagaggggtcaaggtcatgtttaatggaaagaaattgcctgtaaatggatttcgcagttatgtagatctttatgtgaaagacaaattggatgaaactggggtggccctgaaagttattcatgagcttgcaaatgaaagatgggatgtttgtctcacattgagtgaaaaaggattccagcaaatcagctttgtaaatagtattgcaactacaaaagtaacatttgagtgtggtcagccagatggcaaaacaagaaaccccaggcctttctttccccatgaagacaaggattcaacaataacaaacaatccaactgcctttgtgataagttccagcaccccagccgaaagacctaaatacacatttgatttctcagaagaagaggatgatgatgctgatgatgatgatgatgacaataatgatttagaggaattgaaagttaaagcatctcccataacaaatgatggggaagatgaatttgttccttcagatgggttagataaagatgaatatacattttcaccaggcaaatcaaaagccactccagacacaatcagccttggtgccgtgaacagcagcaggaggcagacaggctacttggtgaaaacaagtaggtccctggtgaagccccaccttcaagccagggaaggcctggagcctgggggccgagctgctgatcctgtggaccagagtgggaacttgtgctttttccaggcctgccaatggctgcccgtggaccagttggcatga

SEQ ID NO: 136567 - DNA, 2787 bp, Homo sapiens; identical to SEQ ID NO: 127569

SEQ ID NO: 136568 - DNA, 1641 bp, Homo sapiens
aagacattagatcttctagggcttttgccagtgaaaaaggctgagctgagcaggtgtcttggggagttgtgcatgacagaagcccagttaagagggagaagcaaagatggacatgtattggggtttggaccttacttttgccaaaccttagctatcaaagaagggggtccagggataggggagacactggggtcaggaggtcagaaggaaaatggaagacaagaagtaggccagaattatgactcgggtgctgcatttagtaagaagaagattgatgacagaaaagaatggttaacaaattttatggaagaccggagacagcgtaggctacatggcttaccagagcaatttttatatggtactgcaacaaagcatttgacttataatgatttcatcaacaaggaattgattctcttctcaaactcagacaatgaaagatctataccatctcttgttgatggctttaaacctggccagcggaaagttttatttacctgtttcaagaggaatgataaacgtgaagtaaaagttgcccagttggctggctctgttgctgagatgtcggcttatcatcatggagaacaagcattgatgatgactattgtgaatttggctcagaactttgtgggaagtaacaacattaacttgcttcagcctattggtcagtttggaactcggcttcatggtggcaaagatgctgcaagccctcgttatattttcacaatgttaagcactttagcaaggctactttttcctgctgtggatgacaacctccttaagttcctttatgatgataatcaacgtgtagagcctgagtggtatattcctataattcccatggttttaataaatggtgctgagggcattggtactggatgggcttgtaaactacccaactatgatgctagggaaattgtgaacaatgtcagacgaatgctagatggcctggatcctcatcccatggttacccaccctcttctcctcatgttcttcctggcctattcctcatctcagctgaaatgccatctcttcagaaaagccttctccgaccagccacccgattcctccctcacactgcagattcttagaatttgcaccaggtataccccagaacaagacaccatgactttctcagacggccttaccctaaatcgaactcagatgcacaatgctggatttggtcctctgactgaccttgtgttcacctttgccaaccagctcctgcctttggaaatggatgacacagaaacaggccttctcagtgccatctgcttaatctgtggagaccgccaggaccttgaggaaccgacaaaagtagataagctacaagaaccattgctggaagcactaaaaatttatatcagaaaaagacgacccagcaagcctcacatgtttccaaagatcttaatgaaaatcacagatctccgtagcatcagtgctaaaggtgcagagcgtgtaattaccttgaaaatggaaattcctggatcaatgccacctctcattcaagaaatgctggagaattctgaaggacatgaacccttgaccccaagttcaagtgggaacacagcagagcacagtcctagcatctcacccagctcagtggaaaacagtggggtcagtcagtcaccactcgtgcaataa

SEQ ID NO: 136569 - DNA, 2470 bp, Homo sapiens
gcacttgtagaattttaaactaattattcaataaaattcaacattaatttgatactatacaagactttaatatacagtttgttattttttacaggcagcagaagaggatgaaacacaaaaccagcatgatgatagttcctccgattcaggaactccttcaggcccagattttaattatattttaaatatgtctctgtggtctcttactaaagaaaaagttgaagaactgattaaacagagagatgcaaaagggcgagagggtcaatgatcttaaaaggaaaatctccttcagatctttgggaaagaggatttagcgggcatttgttggagggactgggataaagtgggaattctccaaggaacgaggaggatgttctggctggaatgtctgggaaaagcaatttaaagggtaaagttggcaaaccctaaggtgaagaaactccagttggaagagacaatgccctcaccttatggcagaagaataattcctgaaattacagctatgaaggcagatgccagcaaaaagttgctgaagaagaagaaggggtggatcttgatactgcagcagtaaaaggtggaatttgatgaggaattcagtggagcacccagtagaaggtgcaggagaagaaggcattgactcccatcagttccctataaataaaaggtcccaaaccttagaagggagaagaaggagcctggttcccagagtgagaaaaacacctacatcatctggtaaacctagtgcaaagaaagtgaagaaacggaatccttggtcagatgatgaatccaagtcagaaagtgatttggaagaaacagaacctgtggttattccaagagattctttgcttaggagagcagcagatattcacagacttggaggggagggctttgatgcaggcttgacagtgtttgctcctctctttgcctctccattccctcccagaggtgcaccgtacctgaaagcagcttgtcaaactcccaggtctggcataggtgctactgccatctcgggggaggctctgaaaggagctgtctcctctggagttgaccccaggtgggcatcccatttgagggtaaagctcttggaaaaatccttctctcttcaagagatccagtccacagaaaaagttctctcacaacaagccaagactctgagcctcctgggtgagcccaagctctccaaacaactgacgggcacatgcatatacagaaagacaaacctagctctctgccggggtcccgcggctgccaaatcccttttccagggagctgtcaggaatgacaggaacaagaaaaagaaggagacttcgaagcaagaatgcacagagagctatgaaatgacagctgagttggacgatctcacagagaagatccgaaaagctcaccaggaaactttcccttcactctgccagctgggtaaatacaccacgagcctccaaaaaggaatgcagcgctgccaaattcttgatcttagttcagtgagacccattgtggacgtcagacctccagaactacaagatagtaaacttgtgttagttcaagccgctaaatgtgcgccacttgctgatcactgctctaagcccgtgctgctcaaagaaggacctgaggaccagaaggatcagcacgatgtaggagactgttggaatccagaatgtcagactctttttgatcagaacaatgctgcaaaaaaagaagagtcagaaactgccaacaaaaatgattcttcaaagaagttgtctgttgagagagtgtatcatataaagacacaacttgaacacattcttcttcgtcctgatacatatattgggtcagtggagccattgtcgaaggttgctgaggaggggcctgctgcagtaggaggctggaaggggtggtttggaactgagtcaagaaaagaccccaaacccacagggacagaggaagttgaaagaggggtttggcttagtggaagggaagggagactcctgagcccctctgtggtcaccaccatggtactagctgagaactctgctattcgtttcgtgggaggaaaaccgtcttcagatacagtccctaagcccaagagagccccaaaacagaagaaagtagtagaggctgtaaactctgactcggattcagaatttggcattccaaagaagactacaacaccaaaaggtaaaggccgaggggcaaagaaaaggaaagcatctggctctgaaaatgaaggcgattataaccctggcaggaaaacatccaaaacaacaagcaagaaaccgaagaagacatcttttgatcaggattcagatgtggacatcttcccctcagacttccctactgagccaccttctctgccacgaaccggtcgggctaggaaagaagtaaaatattttgcagagtctgatgaagaagaagatgatgttgattttcgcacggttaattaagcgcccacatgacacaaaccatttttcaacaactatcctgtggtgccccg

SEQ ID NO: 136570 - DNA, 5226 bp, Homo sapiens
actctttttgatcagaacaatgctgcaaaaaaagaagagtcagaaactgccaacaaaaatgattcttcaaagaagttgtctgttgagagagtgtatcagaagaagacacaacttgaacacattcttcttcgtcctgatacatatattgggtcagtggagccattgacgcagttcatgtgggtgtatgatgaagatgtaggaatgaattgcagggaggttacctttgtgccaggtttatacaagatctttgatgaaattttggttaatgctgctgacaataaacagagggataagaacatgacttgtattaaagtttctattgatcctgaatctaacattataagcatttggaataatgggaaaggcattccagtagtagaacacaaggtggagaaagtttatgttcctgctttaatttttggacagcttttaacatccagtaactatgatgatgatgagaaaaaagttacaggtggtcgtaatggttatggtgcaaaactttgtaatattttcagtacaaagtttacagtagaaacagcttgcaaagaatacaaacacagttttaagcagacatggatgaataatatgatgaagacttctgaagccaaaattaaacattttgatggtgaagattacacatgcataacattccaaccagatctgtccaaatttaagatggaaaaacttgacaaggatattgtggccctcatgactagaagggcatatgatttggctggttcgtgtagaggggtcaaggtcatgtttaatggaaagaaattgcctgtaaatggatttcgcagttatgtagatctttatgtgaaagacaaattggatgaaactggggtggccctgaaagttattcatgagcttgcaaatgaaagatgggatgtttgtctcacattgagtgaaaaaggattccagcaaatcagctttgtaaatagtattgcaactacaaaaggtggacggcacgtggattatgtggtagatcaagttgttggtaaactgattgaagtagttaagaaaaagaacaaagctggtgtatcagtgaaaccatttcaagtaaaaaaccatatatgggtttttattaattgccttattgaaaatccaacttttgattctcagactaaggaaaacatgactctgcagcccaaaagttttgggtctaaatgccagctgtcagaaaaattttttaaagcagcctctaattgtggcattgtagaaagtatcctgaactgggtgaaatttaaggctcagactcagctgaataagaagtgttcatcagtaaaatacagtaaaatcaaaggtattcccaaactggatgatgctaatgatgctggtggtaaacattccctggagtgtacactgatattaacagagggbgactctgccaaatcactggctgtgtctggattaggtgtgattwggacgagacagatacggagtttttccactcaggggcaaaattcttaatgtacgggaagcttctcataaacagatcatggaaaatgctgaaataaataatattattaaaatagttggtctacaatataagaaaagttacgatgatgcagaatctctgaaaaccttacgctatggaaagattatgattatgaccgatcaggatcaagatggttctcacataaaaggcctgcttattaatttcatccatcacaattggccatcacttttgaagcatggttttcttgaagagttcattactcctattgtaaaggcaagcaaaaataagcaggaactttccttctacagtattcctgaatttgacgaatggaaaaaacatatagaaaaccagaaagcctggaaaataaagtactataaaggattggggtactagtacagctaaagaagcaaaggaatattttgcttgatatggaaaggcatcgcatcttgtttagatatgctggtcctgaagatgatgctgccattaccttggcatttagtaagaagaagattgatgacagaaaagaatggttaacaaattttatggaagaccggagacagcgtaggctacatggcttaccagagcaatttttatatggtactgcaacaaagcatttgacttataatgatttcatcaacaaggaattgattctcttctcaaactcagacaatgaaagatctataccatctcttgttgatggctttaaacctggccagcggaaagttttatttacctgtttcaagaggaatgataaacgtgaagtaaaagttgcccagttggctggctctgttgctgagatgtcggcttatcatcatggagaacaagcattgatgatgactattgtgaattttggctcaaaactttgggggaagtaacaacattaacttgcttcagcctattggtcagtttggaactcggcttcatggtggcaaagatgctgcaagccctcgttatattttcacaatgttaagcactttagcaaggctactttttcctgctgtggatgacaacctccttaagttcctttatgatgataatcaacgtgtagagcctgagtggtatattcctataattcccatggttttaataaatggtgctgagggcattggtactggatgggcttgtaaactacccaactatgatgctagggaaattgtgaacaatgtcagacgaatgctagatggcctggatcctcatcccatgcttccaaactacaaaaactttaaaggcacgattcaagaacttggtcaaaaccagtatgcagtcagtggtgaaatatttgtagtggacagaaacacagtagaaattacagagcttccagttagaacttggacacaggtatataaagaacaggttttagaacctatgctaaatggaacagataaaacaccagcattaatttctgattataaagaatatcatactgacacaactgtgaaatttgtggtgaaaatgactgaagagaaactagcacaagcagaagctgctggactgcataaagtttttaaacttcaaactactcttacttgtaattccatggtactttttgatcatatgggatgtctgaagaaatatgaaactgtgcaagacattctgaaagaattctttgatttacgattaagttattacggtttacgtaaggagtggcttgtgggaatgttgggagcagaatctacaaagcttaacaatcaagcccgtttcattttagagaagatacaagggaaaattactatagagaataggtcaaagaaagatttgattcaaatgttagtccagagaggttatgaatctgacccagtgaaagcctggaaagaagcacaagaaaaggcagcagaagaggatgaaacacaaaaccagcatgatgatagttcctccgattcaggaactccttcaggcccagattttaattatattttaaatatgtctctgtggtctcttactaaagaaaaagttgaagaactgattaaacagagagatgcaaaagggcgagaggtcaatgatcttaaaagaaaatctccttcagatctttggaaagaggatttagcggcatttgttgaagaactggataaagtggaatctcaagaacgagaagatgttctggctggaatgtctggaaaagcaattaaaggtaaagttggcaaacctaaggtgaagaaactccagttggaagagacaatgccctcaccttatggcagaagaataattcctgaaattacagctatgaaggcagatgccagcaaaaagttgctgaagaagaagaagggtgatcttgatactgcagcagtaaaagtggaattggatgaagaattcagtgtatcacctgtagaaggtgcaggagaagaggcattgactcgggcagttcctataaataaaggtcccaaacctaagagggagaagaaggagcctggtaccagagtgagaaaaacacctacatcatctggtaaacctagtgcaaagaaagtgaagaaacggaatccttggtcagatgatgaatccaagtcagaaagtgatttggaagaaacagaacctgtggttattccaagagattctttgcttaggagagcagcagccgaaagacctagatacacatttgatttctcagaagaagaggatgatgatgctgatgatgatgatgatgacaataatgatttagaggaattgaaagttaaagcatctcccataacaaatgatcggggaagatgaatttggtccttcagatgggttagataaagatgaatatacattttcaccaggcaaatcaaaagccacttccagaaaaatctttgcatgacaaaaaaagtctggaattttggaaatctcttctcatttccttcatattctcagaaggtcagaagatgatttcagctaaatttgacagtaatgaagaagattctgcttctggttttttcaccatcatttgggtctgaaacagacagataaagttccaagtaaaacggtagctgctaaaaaggggaaccaccgtcctccgtatacagtcccctaagcctcaagagggctcccaaaccagcagaacgtcagtagaggctgtaaactctggactcggaattcagaatttggcatttccaaaagatgactactacaccaaaatggtataggctgaggggcaaaagaaaaaggaaagcatctgggctctgaaaatgaaggcgatttataaccctggcatgaaaacatccaagacgaacaagcaagaaacccgaagaaagacatcttttgattcaggatttcagatgtgggacatcttcccccctcagacttcccctacttgagccacctttctctgcccaccgaacccggttcggggctagggaaagaagtaaaataattttgccagagtctggatgaagaatgaagatgatgttgaattttgccaatgtttaaattaaagtgcccccaaagagccacaaacattttccaacaaatatcctgtgttgtccctttgtccttcctctgtcctcagactttttgaacatctggcttatttttaatgtgatgatgtaatttgacggttttttattattgtgggtaaggccctttaacattttgttcttacacatacgagttttatgctctttttttactcattgaaaatgtcacgtactgtctgattgattggcttgtagaattgtttataggctgcccgtgcattaggcacaggattttaattgtcatggttacaaactacagacctgctttttgaaatgaaatttaaacattaaaaatggaactgtgaaaaaaaaaaaaaaaaa

SEQ ID NO: 136571 - DNA, 386 bp, Homo sapiens
tttctggcaaaaaatcctttctcaaagtctcttggagtgtggagttggctacgtttttaatctgcatgaaaggcctcttgaattagagcttgcagggtctgggtgcagctgaacgtagaagcactccacattcaccgagagctctttttcttctttgcgtgttaggtgtggaactgtcttgcatcattacggattcgcagacaagtgaccccaggatcgagtggaagaaaattcaagatgaacaaaccacatatgtgttttttgacaacaaaattcagggtatgatcctgtagtcctcttgcctgctgacctttcctctgtccatagacctgggtgtacactcttggccagaaacttacctcagactggtaacctgcatctgtagc

SEQ ID NO: 136572 - DNA, 906 bp, Homo sapiens
atgaaactcatggaaacacttaaccagtgcataaacgctggtcatgaaatgacgaaggctatcgccattgcacagtttaatgatgacagcccggaagcgaggaaaataacccggcgctggagaataggtgaagcagcggatttagttggggtttcttctcaggctatcagagatgccgagaaagcagggcgactaccgcacccggatatggaaattcgaggacgggttgagcaacgtgttggttatacaattgaacaaattaatcatatgcgtgatgtgtttggtacgcgattgcgacgtgctgaagacgtatttccaccggtgatcggggttgctgcccataaaggtggcgtttacaaaacctcagtttctgttcatcttgctcaggatctggctctgaaggggctacgtgttttgctcgtggaaggtaacgacccccagggaacagcctcaatgtatcacggatgggtaccagatcttcatattcatgcagaagacactctcctgcctttctatcttggggaaaaggacgatgtcacttatgcaataaagcccacttgctggccggggcttgaccttattccttcctggctggctctgcccccgattgaaactgagttaatgggccaatttgatgaaggagacttggcgggtcgtgcagaaatactggggaagacatccctgaagatctggaatgtgacacggagagactcagccctttatcgctgtgaggtcgttgctcgaaatgaccgcaaggaaattgatgagattgtgatcgagttaactgtgcaagcgtgctttgctgatggcatcctacccctggacctggacgccagtgagttactctcagacacgtttgaggtcctcagctccaaggagatccagcttttggcaatgagatcttaa

SEQ ID NO: 136573 - DNA, 1266 bp, Homo sapiens
atgccttcagctgcctggaagaggcctgtggaaggccctgcaactctccgcagacctctgggcattgctgctgcttctcagtgcccctcgtcccctcagccaggccccatgtccttgagccccaatgcaatcttgaattctgtcaagaaaccggtggagtcaaagagcaggcatcgaagtcggagcttaggagtgctgcctttcactttaaattctggaagcccagaaaaaacgtgcagtcaggacctgaagacacaaagggaaggaagcgcctccaccagccccgaaagaatggaaaaggcaaccgttgagggccacctggagagtgtgtccctggaactcaatcctcatttgccaagccccatccggggatcctctaccgacgacctgcatggcatgaccgagcaggcgagcaggaattccgaagagaggctcaaggatttctttgcagtggacaaacagctggcatcagagtttgagtatgacaggaagaagtaccaggaccagctggtccaggagcaggagctagcaaaacatgcagatgtggccgggacggctggaggtgctgaggtggcacctgtggcacagtctgtcgtttgtctggcacctctcaagatctccgtcatcagagtttctattaaggggaacagcccacaccaatgttcgcgagtaatacgactggtacgcaaatcggacggtcaaacgagagtcggcgcacaaaaatcaaacacagacttgtgggaacaacacgccgccaactcaaaaacatatgtcttaaacgagaccaagggctgccacgagaaaaacctaagtcgtccccccccgagggatatttgcatctcctcccctccaatgcgagttcccccaactatcccctcgagttcgtttagacgacaacacaaatgtcctcggccaaaacacgatgtgcggtctaaccatcggggacggcaggtttttaccatcgctaaagccataaggccgggaaggctgctgaaaggggctgtaatctcaaatccagcaatgaacccccagtggtacaggaatttgaaagtaagtacaaacgaaatgcctaggataatgggcaccatctactggacatttgatgtcttgcagccaactcaggacacatctgtctctggagaagagggccagcaaaatgcgttattaggaggatttttaaaactcgaagatttcagctttcagaggacaaatcaggtcatcctccagccttccatgaatgaggtgtttttcccagccccagtttag

SEQ ID NO: 136574 - DNA, 1088 bp, Homo sapiens
atgccttcagctgcctggaagaggcctgtggaaggccctgcaactctccgcagacctctgggcattgctgctgcttctcagtgcccctcgtcccctcagccaggctgcctgataggggctgtaaatctcaaatccagcaatcgaaccccagtggtacaggaatttgaaagtgtggaactgtcttgcatcattacggattcgcagacaagtgaccccaggatcgagtggaagaaaattcaagatgaacaaaccacatatgtgttttttgacaacaaaattcagggagacttggcgggtcgtgcagaaatactggggaagacatccctgaagatctggaatgtgacacggagagactcagccctttatcgctgtgaggtcgttgctcgaaatgaccgcaaggaaattgatgaaattgcgatcgaggtaacctgtgcaagtgaagccagtgacccctgtctgtagagtgccgaaggctgtaccagtaggcaagatggcaacactgcactgccagggagagtgagggccacccccggcctcactacagctggtatcgcaatgatgtaccactgcccacggattccagagccaatcccagatttcgcaattcttctttccacttaaactctgaaacaggcactttggtgttcactgctgttcacaaggacgactctgggcagtactactgcattgcttccaatgacgcaggctcagccaggtgtgaggagcaggagatggaagtctgtcacactgataaaagaggtgggttcccatggtcttgggcagctccccacctgtggtttttgcaggatacagccttgctccccgctgctctcacgggctggtgttcagtgtctgtggcttttccaggtgcacagtgcaagctgtcagtggatctatcattctggggtctggaggatggtggccctcttctcacagctccactaggcagtaccccagtagggactctgtgtaggggatctgaccccacatttcccttctgcactgccctagcagatgatctctatgagagccccacccctgcagcaaacttctgcctggacatccaggcattttcatacatcctctga

SEQ ID NO: 136575 - DNA, 1221 bp, Homo sapiens
tcatccatgctgtgaatgcgtcagtagtatattctttttcattgctgcgttatattccattataagaatgtcctcccatttcttttccacttgccagtcgatggtcaacttaaggggtgtctggtgtttggtgatcatgaatgaagctgcctgtatgttcgcatctaagccctgcgtctgtctcaagtcaagggtcggtgcggcagggtgggccactgaggcccagactctgtcctcgggtgccctcgaggcgagaacaatctttgcaaaatgaaactgtctacagtatgtttcccccagggccaccagagggcgcgtgtgagcatctaagtcagccgcttccctcctctgctcagaaccctccgtggctcccacctcactcgaccaaaagccaaagtctgtatcatacaaaggctctgcactgggccggatgtggcggcgcacacctgtgcaaagagcattctgggcagaggaaacagcacgtgcaaaggtcctggggtaggaatgtgctgagatgtggctggggccatgtgagcgcacacgtatgtcgcacacgtatgtggctccgtgcacgggtgcgatcgctgccagccatggaattagttcccttttccgaattccagatgatttttcatctctgtaattaatgggcaagtcagttctgtccagcgcctctctggggtcggcccagcgtgtctctcctgcggctcggcgaacccgggccccccgcccggcacatctcccggagccggggcgcagcgccgatagctcccgcgccgacggctcgggctccccgcagtggccgcggggagctcgggttgggggcgggcggctcggaactggcggaagggggcggcccggctggaggcaggtgccgcggcgtctctcccccggattcggccggtaggggggcaccgggccgggccccgtgggcacctcagggaagcgcggaccgagccggcgccgggcaccagcaaatgacaaagccgcctgttggcctcgcttcccggggcaacccgcttcttgaactggatttaggggtgagagaggagtcaagggtttcagctcctggggttctggctggagggcctgggaggatggtggcaccgtgcactgatgtaggggcttattttggtctggttgggctgaaggtgccttggagttcccggtggaagtatacatggctctggggggtccactctggagtcttagcattctagg

SEQ ID NO: 136576 - DNA, 238 bp, Homo sapiens
tgtgagcttctccaatcctgaggggtacattgactccagcgactacccactgctgcccctcaacaactttctggagtgcacatacaacgtgacagtctacactggctatggggtggagctccagacactcctggtggaggggcaggtaatccgaagccccaccaacaccatctccgtctacttccggaccttccaggacgacggccttgggaccttccagcttcactaccagggtagg

SEQ ID NO: 136577 - DNA, 3079 bp, Homo sapiens; identical to SEQ ID NO: 120012

SEQ ID NO: 136578 - DNA, 6398 bp, Homo sapiens
aaaggaagggagggagggagaaaggagaagttggtttagaggccagccggacgagctttgggcaccgcccttaggagggccaccctcagagtctgacagcaggtgaaggtcctaaatctccccaaactaactggtgtcttttctcctcttccaagatgctcttcccgagggagatgctagccctttgggtccttacctcctgccctcaggagccccggagagaggcagtcctggcaaagagcaccctgaagagagagtggtaacagcgccccccagttcctcacagtcggcggaagtgctgggcgagctggtgctggatgggaccgcaccctctgcacatcacgacatcccagccctgtcaccgctgcttccagaggaggcccgccccaagcacgccttgccccccaagaagaaactgccttcgctcaagcaggtgaactctgccaggaagcagctgaggcccaaggccacctccgcagccactgtccaaagggcagggtcccagccagcgtcccagggcctagatctcctctcctcctccacggagaagcctggcccaccgggggacccggaccccatcgtggcctccgaggaggcatcagaagtgcccctttggctggaccgaaaggagagtgcggtccctacaacacccgcacccctgcaaatctcccccttcacttcgcagccctatgtggcccacacactcccccagaggccagaacccggggagcctgggcctgacatggcccaggaggccccccaggaggacaccagccccatggccctgatggacaaaggtgagaatgagctgactgggtcagcctcagaggagagccaggagaccactacctccaccattatcaccaccacggtcatcaccaccgagcaggcaccagctctctgcagtgtgagcttctccaatcctgaggggtacattgactccagcgactacccactgctgcccctcaacaactttctggagtgcacatacaacgtgacagtctacactggctatggggtggagctccaggtgaagagtgtgaacctgtccgatggggaactgctctccatccgcggggtggacggccctaccctgaccgtcctggccaaccagacactcctggtggaggggcaggtaatccgaagccccaccaacaccatctccgtctacttccggaccttccaggacgacggccttgggaccttccagcttcactaccaggccttcatgctgagctgcaactttccccgccggcctgactctggggatgtcacggtgatggacctgcactcaggtggggtggcccactttcactgccacctgggctatgagctccagggcgctaagatgctgacatgcatcaatgcctccaagccgcactggagcagccaggagcccatctgctcagctccttgtggaggggcagtgcacaatgccaccatcggccgcgtcctctccccaagttaccctgaaaacacaaatgggagccaattctgcatctggacgattgaagctccagagggccagaagctgcacctgcactttgagaggctgttgctgcatgacaaggacaggatgacggttcacagcgggcagaccaacaagtcagctcttctctacgactcccttcaaaccgagagtgtcccttttgagggcctgctgagcgaaggcaacaccatccgcatcgagttcacgtccgaccaggcccgggcggcctccaccttcaacatccgatttgaagcgtttgagaaaggccactgctatgagccctacatccagaatgggaacttcactacatccgacccgacctataacattgggactatagtggagttcacctgcgaccccggccactccctggagcagggcccggccatcatcgaatgcatcaatgtgcgggacccatactggaatgacacagagcccctgtgcagagccatgtgtggtggggagctctctgctgtggctggggtggtattgtccccaaactggcccgagccctacgtggaaggtgaagattgtatctggaagatccacgtgggagaagagaaacggatcttcttagatatccagttcctgaatctgagcaacagtgacatcttgaccatctacgatggcgacgaggtcatgccccacatcttggggcagtaccttgggaacagtggcccccagaaactgtactcctccacgccagacttaaccatccagttccattcggaccctgctggcctcatctttggaaagggccagggatttatcatgaactacatagaggtatcaaggaatgactcctgctcggatttacccgagatccagaatggctggaaaaccacttctcacacggagttggtgcggggagccagaatcacctaccagtgtgaccccggctatgacatcgtggggagtgacaccctcacctgccagtgggacctcagctggagcagcgaccccccattttgtgagaaaattatgtactgcaccgaccccggagaggtggatcactcgacccgcttaatttcggatcctgtgctgctggtggggaccaccatcccaatacacctgcaaccccggttttgtgcttgaagggagttctcttctgacctgctacagccgtgaaacagggactcccatctggacgtctcgcctgccccactgcgtttcggaggagtccctggcatgtgacaacccagggctgcctgaaaatggataccaaatcctgtacaagcgactctacctgccaggagagtccctcaccttcatgtgctacgaaggctttgagctcatgggtgaagtgaccatccgctgcatcctgggacagccatcccactggaacgggcccctgcccgtgtgtaaagtagcagaagcggcagcagagacgtcgctggaaggggggaacatggccctggctatcttcatcccggtcctcatcatctccttactgctgggaggagcctacatttacatcacaagatgtcgctactattccaacctccgcctgcctctgatgtactcccacccctacagccagatcaccgtggaaaccgagtttgacaaccccatttacgagacaggggaaaccagagagtatgaggtttctatctaaagagagctacacttgagaaggggacttgtgaactcaaccacaatctcctcgagacattcatccagagaccatgtggcacttgattgaaaccccagaatgtcgactgtcttttgtttagactctttatcaaaggtttactgttttcttccctgtatttattatatttaaaagtgaaataggtgtgggtttggatgtttcgcggcctcagccaaattcatgttacagcctcaattctgaaggcaggtggaagacttgcaaaatggcaaaccgcggcagcaaaaacacaaaacagcagatggagtttctcccatcagcaatgccatgctaaggctgcattgaattgcatgcatctttgggaaccatgcccatgatgttttcagtacaaatctaagtcccaagattaggttggaaagggtatttcttgttggcttagtttgggttggaatttagcatgggtacttaaacccatttggagagctgtgctcctaaacaaattctgtgtcctctcttcccattttgccagcttctgaaaggtttttccacagcccctccctctcacggttcttctgaaggtagcaaaggtgttatataaacattgtcttttaccactctggcctcgctggacagtgacaaaacaagaaaacgttttctttctagaaaggtgataaacgaccaaaggcaatttttcagagacaaatgagagatttgagagttccaatgaagaattgggtgagggggatcattgggtaagggaattgggttaaaatgttcttttctttgacactctttcaatgatgaaagagcgtgtaatttatgctacaagtgccagaattgatcaccatgttcagcaagccactctcaagctgtggtaataaacacacaggcttgggaggcaccagcggccccactcatacagtgacaaggatttgtgatgggaaaaaggaggtgccatgtttggaaatgcaggggtgagctctggtttctcctggggttctggaatatctcagccctcaaaatagaggagactcaagtgcactgattctctaaaaggtgtcatcttcagaatatacttgccatcaagtatttcagggggcgggagggtcccatgagaagaaactatttttctattctccaaagctgtctggatgttggagggtggtgtgaatgctgactgaggaggtgcagagaacaggggcaggggattttaaatcacagcagaccatccagtggaatcctgtatcatctgatctgaacatcaatgaagacagagagaggaatttcattcagaaaggattccatagccccacatctagtcacacgggcattcctcttattttatcagggtctgttttcccccaacccagtgaaaccggtgagtgtgtaactcttgggaagattcttttctaaatacaggtataaagagaaggtggagggtgcgggtgcatggaagaaatactatgtgtgaagcagattcaccttcctgggaccggtgacatggtggtgacagtcaatggcttggacagacagacgggctcagtggcatttggaaccctctttggtgccctcccattctctctggaattgtttcaagtctgctggttttcaaacaagaaaagacctttctggccatagggagaatagcagggagtctatgttttggtggttacattggaaacatcttaagcaagagagggaaagttgattttaggcacacatgtaccctccttgacagcaggaactcagacttcaatcttgggggtctaagaccagaatattttccttctgccagaaaagaatcttgcacatatactcctgaggcatgagtgtgtggtccatggcaagaaatagctaaaggctgctttccaggacccaaagccccatttaatgcaagaaccagagaagtgttctaggccattagtggacaatgtcatgtttggagaaagataacaacacaaataatgtaacctttccttaaaaggcagaactcaatccattttatttgatgcttattctaaccctaaccctgggtcacctggaatgaagaactctatgaataatatttgattttacaacgtgttatggttatgtgaaaactaaacatttgccttttataaagactgacaaaatataaatctttattctaaccctatccccaaaactagccaggccacaccccagatgttcttattgactattgggaagatagaaaaggcgttgtgttttttgtttttttgttgttgttgtcattgttgtttttttcagaagaccagtgtctcagttctgtcttagtagtaccacacccgtaaccgtgttttaaaagtttgttttagcctagagacagatcatacgagttcaacaatgtacagtgtgattgaaaagacaggttggtgtctatttttctttttaaaatatctgaatgtgtatttgtaatacgtaaaggtaaaaaaaaatagtgccaaaaatgtgcaaggcatctcattacagctcatgtacgtctgtttttataagatcaatattaaaacccattgggattaaatatttttgaataggatacactcttgagaaactcgagaatggactgagccttcctacaagccactctttgtttttaaaacagtggggaaatacgtttacagagattgtgagcttcagagaatgcatgtgatggtgtgtattacatgctaattcatataagctgtatctgtcagctaccaccctgtgctttaaaaatgcacacactcaaccctctttagcttggagctcagctttttgctttttttttttttttttttgtagaattatttagctaacataagtattctgattgctacctgatggccattcttacttagtttcatagatgtgctttaactatgatcctttgaagctcaccccttggagagcctacagaacctcaggctgatagctttgaagactgccaaacagcccagaaggaagcaaagcatctgcataatcaggagggttgtataacaagtagtgatttggcaaatatgtgggtagctttaggctgaggcacgggcctcaggcaaaaatgcccttcgagtgaatccgaagggcatgatcttcctatgtccttgactaggcatgacgagtcatttgaggtcagatattatttgagttgttcagcacccccaaaggtaggcattctcctgggaaattttcatttccattttatcgccaaacaaaataaaaagcaaaacaaactttttaagctagaataatgaaattaagtcattttccactttgtatatattgatgctaataaaacagatg

SEQ ID NO: 136579 - DNA, 2616 bp, Homo sapiens
atcctgtcaagctagtcaaggccaccaaggttctgggtaggaccagctcacaaggacagtgcacacgggtgtgtgtggaatttatggtgagtcagagcaagaggccgcatgcaggcatcatgcctgtgaagggggccaggtgggtgccagggcactgaattgttcttgttggctgcgagagctcgttaggctctgggcagaggctggctggactccaggaggcagacatcaagccccacaactcaaagaatggaggagcctggggcttggcattagatgatgccagtccactcctccgcatgcactggggctctgatgcccagtgagaacgttgactctggaataccaaggccaaggcccccaccatcaatcacaatgttagcatggagtatcttgctaacactggcattgcccaaggaccccaggtacacgaagactctaatcatggggaccaaggtgggaggatcacttgatctgctagccctttgggtccttacctcctgccctcaggagccccggagagaggcagtcctggcaaagagcaccctgaagagagagtggtaacagcgccccccagttcctcacagtcggcggaagtgctgggcgagctggtgctggatgggaccgcaccctctgcacatcacgacatcccagccctgtcaccgctgcttccagaggaggcccgccccaagcacgccttgccccccaagaagaaactgccttcgctcaagcaggtgaactctgccaggaagcagctgaggcccaaggccacctccgcagccactgtccaaagggcagggtcccagccagcgtcccagggcctagatctcctctcctcctccacggagaagcctggcccaccgggggacccggaccccatcgtggcctccgaggaggcatcagaagtgcccctttggctggaccgaaaggagagtgcggtccctacaacacccgcacccctgcaaatctcccccttcacttcgcagccctatgtggcccacacactcccccagaggccagaacccggggagcctgggcctgacatggcccaggaggccccccaggaggacaccagccccatggccctgatggacaaaggtgagaatgagctgactgggtcagcctcagaggagagccaggagaccactacctccaccattatcaccaccacggtcatcaccaccgagcaggcaccaggtatgcagcccccaactccaatgggagaaggacccccaattgtcaagcatacatggattttggacaagtgcaatgtggccacccttcaaagcacgtgagctctgggtccaaatgaggggtacattgactccagcgactacccactgctgcccctcaacaactttctggagtgcacatacaacgtgacagtctacactggctatggggtggagctccaggtaaccccaggagagtaccccgatggggaactgctctccatccgcggggtggacggccctaccctgaccgtcctggccaaccagacactcctggtggaggggcaggtaatccgaagccccaccaacaccatctccgtctacttccggaccttccaggacgacggccttgggaccttccagcttcactaccagggtagggtcaggccaaggctctttccccgccggcctgactctggggatgtcacggtgatggacctgcactcaggtggggtggcccactttcactgccacctgggctatgagctccagggcgctaagatgctgacatgcatcaatgcctccaagccgcactggagcagccaggagcccatctgctcaggtatgctccagcctcagccgcacaatgccaccatcggccgcgtcctctccccaagttaccctgaaaacacaaatgggagccaattctgcatctggacgattgaagctccagagggccagaagctgcacctgcactttgagaggctgttgctgcatgacaaggacaggtaaagctctgaaggtccacagaccaacaagtcagctcttctctacgactcccttcaaaccgagagtgtcccttttgagggcctgctgagcgaaggcaacaccatccgcatcgagttcacgtccgaccaggcccgggcggcctccaccttcaacatccgatttgaaggtgagggtccctgggagctctatgagccctacatccagaatgggaacttcactacatccgacccgacctataacattgggactatagtggagttcacctgcgaccccggccactccctggagcagggcccggccatcatcgaatgcatcaatgtgcgggacccatactggaatgacacagagcccctgtgcagaggtgagcggatccacaacgcctctgctgtggctggggtggtattgtccccaaactggcccgagccctacgtggaaggtgaagattgtatctggaagatccacgtgggagaagagaaacggatcttcttagatatccagttgtgagtgtttaaaatgggtctgtcttcagccaagagaaggtacgacctactcctgagtggtggtgatgatgatgatgacgatagtgatgatggtgatggtaacgatgatgatgccaaaaatgaaagtggaatataacaacataacattcaaatga

SEQ ID NO: 136580 - DNA, 3313 bp, Homo sapiens
  misc_feature (1)...(3313): n = a,t,c or g
aaaggaagggagggagggagaaaggagaagttggtttagaggccagccggacgagctttgggcaccgcccttaggagggccaccctcagagtctgacagcaggtgaaggtcctaaatctccccaaactaactggtgtcttttctcctcttccaagatgctcttcccgagggagatgctagccctttgggtccttacctcctgccctcaggagccccggagagaggcagtcctggcaaagagcaccctgaagagagagtggtaacagcgccccccagttcctcacagtcggcggaagtgctgggcgagctggtgctggatgggaccgcaccctctgcacatcacgacatcccagccctgtcaccgctgcttccagaggaggcccgccccaagcacgccttgccccccaagaagaaactgccttcgctcaagcaggtgaactctgccaggaagcagctgaggcccaaggccacctccgcagccactgtccaaagggcagggtcccagccagcgtcccagggcctagatctcctctcctcctccacggagaagcctggcccaccgggggacccggaccccatcgtggcctccgaggaggcatcagaagtgcccctttggctggaccgaaaggagagtgcggtccctacaacacccgcacccctgcaaatctcccccttcacttcgcagccctatgtggcccacacactcccccagaggccagaacccggggagcctgggcctgacatggcccaggaggccccccaggaggacaccagccccatggccctgatggacaaaggtgagaatgagctgactgggtcagcctcagaggagagccaggagaccactacctccaccattatcaccaccacggtcatcaccaccgagcaggcaccagctctctgcagtgtgagcttctccaatcctgaggggtacattgactccagcgactacccactgctgcccctcaacaactttctggagtgcacatacaacgtgacagtctacactggctatggggtggagctccaggtgaagagtgtgaacctgtccgatggggaactgctctccatccgcggggtggacggccctaccctgaccgtcctggccaaccagacactcctggtggaggggcaggtaatccgaagccccaccaacaccatctccgtctacttccggaccttccaggacgacggccttgggaccttccagcttcactaccaggccttcatgctgagctgcaactttccccgccggcctgactctggggatgtcacggtgatggacctgcactcaggtggggtggcccactttcactgccacctgggctatgagctccagggcgctaagatgctgacatgcatcaatgcctccaagccgcactggagcagccaggagcccatctgctcagctccttgtggaggggcagtgcacaatgccaccatcggccgcgtcctctccccaagttaccctgaaaacacaaatgggagccaattctgcatctggacgattgaagctccagagggccagaagctgcacctgcactttgagaggctgttgctgcatgacaaggacaggatgacggttcacagcgggcagaccaacaagtcagctcttctctacgactcccttcaaaccgagagtgtcccttttgagggcctgctgagcgaaggcaacaccatccgcatcgagttcacgtccgaccaggcccgggcggcctccaccttcaacatccgatttgaagcgtttgagaaaggccactgctatgagccctacatccagaatgggaacttcactacatccgacccgacctataacattgggactatagtggagttcacctgcgaccccggccactccctggagcagggcccggccatcatcgaatgcatcaatgtgcgggacccatactggaatgacacagagcccctgtgcagagccatgtgtggtggggagctctctgctgtggctggggtggtattgtccccaaactggcccgagccctacgtggaaggtgaagattgtatctggaagatccacgtgggagaagagaaacggatcttcttagatatccagttcctgaatctgagcaacagtgacatcttgaccatctacgatggcgacgaggtcatgccccacatcttggggcagtaccttgggaacagtggcccccagaaactgtactcctccacgccagacttaaccatccagttccattcggaccctgctggcctcatctttggaaagggccagggatttatcatgaactacatagaggtatcaaggaatgactcctgctcggatttacccgagatccagaatggctggaaaaccacttctcacacggagttggtgcggggagccagaatcacctaccagtgtgaccccggctatgacatcgtggggagtgacaccctcacctgccagtgggacctcagctggagcagcgaccccccattttgtgagaaaattatgtactgcaccgaccccggagaggtggatcactcgacccgcttaatttcggatcctgtgctgctggtggggaccaccatccaatacacctgcaaccccggttttgtgcttgaagggagttctcttctgacctgctacagccgtgaaacagggactcccatctggacgtctcgcctgccccactgcgtttcggaggagtcctgtttaatgtgacaacccagggctgcctgaaaatggataccaaaatcctgtacaagcgactctaccggccaggagagtccctcactttcatgtgctccataggctttgagatcatgggtgaagtgaccatccgcagcatcgntgggacagccatcccaatggaacgggcccctgcccgtgtgtaaagttaatcaagacagttttgaacatgctttagaagtagcagaagcggcagcagagacgtcgctggaaggggggaacatggccctggctatcttcatcccggtcctcatcatctccttactgctgggaggagcctacatttacatcacaagatgtcgctactattccaacctccgcctgcctctgatgtactcccacccctacagccagatcaccgtggaaaccgagtttgacaaccccatttacgagacagggggaacccaaaaggtttagggtttcatttaaaaagaggtaccctttaaaaaggggcttgtgaactcaaccccaatttccccgagacatttatccaaaggccctgggggccttgatttaaacccccaaaaggcggctgttttttggttaaactttttaacaaagggttacgggttttttccccggattttataaattttaaaagtg

SEQ ID NO: 136581 - DNA, 352 bp, Homo sapiens
  misc_feature (1)...(352): n = a,t,c or g
ntttcagttgccaggcctacagttagtgtttcaactcctgctcctacaggccacacctgtgcaaaccggttcccccagccngcaccctcagacgttacctcctgctgttcctcattcagtacctcagccaacaacagcaatacctgcttttccaccagtaatggtacctccgtttcgtgttccccttcctggcatgccaattccacttccaggtgtattgccaggaatggcccctcctatcgtacccatgatacatccccaggttgctattgcagcttcacctgctaccttagctggagcaacagcagtttctgaatggactgaatataaaacagcagatgggaagacatat

SEQ ID NO: 136582 - DNA, 368 bp, Homo sapiens
cctcgggtcgacccacgcgtccgtgagaattaatattttgtcagttgatgtcttatattttattttttataggagagacgataataaagacattgactcagagaaagaagctgccatggaagctgaaattaaagctgcccgagaaagggccattgtccctctggaggctcgaatgaagcagttcaaggacatgctgctagagagaggggtcagaaaacaatctttgggggagatatttctgttttgtataagtaatataaatatgtcttgctaaaaggtcaaatctaaggtgtctgctttttcaacgtgggagaaggagttgcacaagatagtttttgatccccggtacttacttctcaatctgatat

SEQ ID NO: 136583 - DNA, 630 bp, Homo sapiens
aaaagatcaccgctgggaatctggatccttattggaaagagaggagaaagagaagctttttaatgaacacattgaagcacttaccaaaaaaaagagagagcactttaggcaacttctggatgaaacttctgcaattaccttaacatccacgtggaaagaagtaaaaaaaatcattaaggaagatcctcgatgtattaagttctcctccagtgacaggaaaaaacaaagagaatttgaagaatatatcagagacaaatatatcacagccaaagctgacttcaggacgcttttgaaagagaccaaatttataacatatagttaatttagtgaaagatgtgaaagtgaaagcttgtgaaagatgctgggattggcagccccgcagactgaagtcctctgttcatccacagaacagatccaaaaaattaatccaagaatcggatcagcacctgaaagatgtagaaaaaattttacagaatgacaaacggtatctagtactggactgtgtgccagaggagaggcgtaaactgattgtggcatatgttgatgacctggatcgccggggtccacccccacctcccacagcatcggagcccacgagacgatcaacaaaataattctaaatactctttc

SEQ ID NO: 136584 - DNA, 783 bp, Homo sapiens
  misc_feature (1)...(783): n = a,t,c or g
cgttctggaatcttcttttcctttcgtccagccagcggcacaaactcataaaccaaggttctcggtcttacatctttcaaatgctttgaatcttgaatcttaagcatgcttggctgcaaattcactaaaagctgctcttggattanattttgcttctcccatcattatattgaaatcttcattggcttgcataattttatttttcttttccatgcgttcttcctctgccctggtctttacatactgatcaaacacctgttttctctctttaggattgagaagtaagtaccggggatcaaaaactatcttgtgcaactccttctcccacgttgaaaaagcagacacccctctctctagcagcatgtccttggaactgattcattcgaggcctccagagggacaatggccctttctcgggcagctttaatttcagcttccatgggcagcttctttctctgaggtcaatgtctttattatcgtctctcctataaaaaataaaatataagacatcaactggacaaaatattaattctcaggtcttattagaaatcttagaatcaaaggaattttcaaggctcagtctcgagcagcatatttttggcaaaagcaaattatattgagggtttcaaatgcactctaagggataaatagctttcataataacaaaattaaaatgggcttctaatgatttacaatggctacattattaggaaaaaaatacacctttaatgggctgtctctccctgacactggttaataacataaaaagggagcaaccttact

SEQ ID NO: 136585 - DNA, 1290 bp, Homo sapiens
atgtctgatggaccaggacacagagctaagagtcgactaacttggcagaggccagtggaagaatcaattctgaagataaaacatgacacgaaagttaatcaatgctttgacataccctgcaagctaatcaccacattcccaacgagcagcaggaatagcaaagaaaccaaaaagccaagcaaattttctgtagctgaactggaaatcgaaggcaattgtcaagtgcaccctaatcaaagactcctgtggtggcatggaaaccccacagtggataagaacaagctgaattcacgaaaactgagaattcccttcttccagaaattctgtttcactcaaatacaacttggaatcccagagaggtctgtcccatttagccttgccatccatggacggttaagtgttaaacagctcagtgcctcttggtacccaggtccttgtctggatccaggaagaatcaggtcgcacatggacttgcaggatgaatgtggaagtttactgaatggtgaaggttcagggttactctgggtgaagccaccatgggagcgcacaaaggcagggaatggtgaattcttgccttggggagtggaaggtgagagaattacagccccgcaggctcataaaagagcatgtcatggcttgaggagccacagcgacggtgagggcaccagactgtctttccaagctgtattttgtttcggggaagatatgactggaggaagtgcagtgctggctgaggccaagtggctcagaaccttaagtgaaaggcccagttatgaaacctgtcagcaagcttccgtcccgtggcccagggcttcttcaaggaatgcctcctgtgactgctccggtactccagcactacctcctacggaggagatatgggttgaaaataaaatccagatgggaagaggagtaaaacttaaagagttctggcagattgaggtcagtgatacttcatttaagaatgagccctggccacacctgtgcaaaccgttccccagccgcaccctcaacgttacctcctgctgttcctcattcagtacctcagccaacaacagcaaacctgcttttccaccagtaatggtacctccgtttcgtgttccccttcctgcatgccaattccacttccagcccccgagtcaccaatcaactggcgtcttcataccgctttcaaagtcggcgggcgccttgcccaatagcaaagacatatcgcccccatttcgaagattgatggaaagtttgaccaaccgcattcagacttctgctgtctccgcctctctcgttggggattga

SEQ ID NO: 136586 - DNA, 4279 bp, Homo sapiens
tttcgtcctctgtaatggcggagcgtggcggtgtcgggggcgagagtgaacgattcaacccgggggagcatcaggatggcccaacagcaggccttgaggttccgaggtccggctcccccaccataatgcagcgatgcgaggcccaccacctctgatgcgacctcctccaccttttggtatgatgcgaggccctcctccaccaccacggccgccctttggacgtcctccttttgatcctaatatgccgccaatgcctcctccaggagggatacctccacctatgggccctccacacctccagagaccacctttcatgcctcctcccatgagttccatgcctcctcctccgggtatgatgtttccaccaggaatgcctcctgtgactgctcctggtactccagcactacctcctacggaggagatatgggttgaaaataaaactccagatgggaaggtttattattataatgctcggacacgtgaatctgcatggaccaagccagatggagttaaggttattcagcaatcagaactgacacctatgcttgcagcccaggcacaggttcaggctcaggcccaggcgcaggctcaggcccaggcgcaggctcaggcccaggcacaagctcaggcccaggctcaggctcaggcccaggcccaggcccaggcccaggcccaggcccaagcccaagcccaggcccaggctcaggctcaggcacaagctcaggcccaggcccaggctcaggtccaggcccaggtccaggcacaagtgcaagcacaagcagttggagctaacacaccctacgaccagtagcccagcacctgcagtatccacttcaacatcatcatccaccccttcctctaccacttctaccacaacaactgctacttcagttgcgcagacagtatcaacacccacaacacaagatcagaccccaagttctgctgtttcagttgccacgcctacagttagtgtttcaactcctgctcgtacagccacacctgtgcaaaccgttccccagccgcaccctcagacgttacctcctgctgttcctcattcagtacctcagccaacaacagcaatacctgcttttccaccagtaatggtacctccgtttcgtgttccccttcctggcatgccaattccacttccaggtgtagcaatgatgcaaatagtcagctgcccgtatgtaaagacagtcgctaccaccaagaccggtgtattgccaggaatggcccctcctatcgtacccatgatacatccccaggttgctattgcagcttcacctgctaccttagctggagcaacagcagtttctgaatggactgaatataaaacagcagatgggaagacatattattataataatagaacattagaatcaacctgggaaaaaccccaagaactaaaggaaaaagaaaagttagaagagaagattaaagagccaattaaagaaccctctgaagagcctctgccaatggagacggaggaggaggatcctaaagaagagcctataaaggagataaaggaggagcccaaagaagaggagatgactgaagaagaaaaggctgcccagaaggcaaagccagttgctactgctcctattcctggtactccatggtgtgtcgtttggactggtgatgagcgggtcttcttttataatcccaccactcgtctttctatgtgggaccgacctgatgatctgaattggcagggcagatgttgacaaaattattcaggagccccctcataaaaaaggaatggaggaattgaagaaactaaggcacccaactccgacaatgctgtcgatccaaaagtgggcaattctctatgagtgcaattaaagaggaacaagaattaatgggaagaaattaattgaagatgagcctgttaaagcaaaaaaacggaagagagacgataataaagacattgactcagagaaagaagctgccatggaagctgaaattaaagctgcccgagaaagggccattgtccctctggaggctcgaatgaagcagttcaaggacatgctgctagagagaggggtgtctgctttttccaacgtgggagaaggaggtgcacaaggatagtttttgatcccccggtactacttcttcaatcctaacagagagaacaccaggtgtctgctccagtatgtaaagaccccgcgcagcggaagaacgcagggaaacgaaaaataacataatgcacgcaacggaagatttcaaaaaaatgatggaagaagcaaaatttaatccaagagcaacttttagtgaatttgcagccaagcatgctaaagattcaagattcaaagcaattgaaaagatgaaagacccgagaagccttgtttaatgagtttgtggccgctgctaggaagaaagggaaaggaagattcgaagaccccgagggtgagaagattaaatcggatttctttgaactattatctaatcatcacttggacagtcagtctccgatggagcaaagtaaaagacaaagtagaaagtgatccaccgttacaaagcacgtagatagttcatcaatgagagaagaccttttcaaacagtacattgggaaaaaagccccagaattttagactcccggaaaagaaaaggagcttgaaagggcaagcccgcatttgaggcaagccttccgagaaccgagaaagggaggttcccaaaggcccgttcagaacaaacaaaagaaatagattcgagagagagagcagcacaaacgagaagaagctatccagaatttcaaagctcttctgtctgacatggtactgttcttcagatgtgtcatggtctgatactcgtaggacccctccgaaaagatcaccgctgggaatctggatccttattggaaagagaggagaaagagaagctttttaatgaacacattgaagcacttaccaaaaaaaaagagagagcactttaggcaacttctggatgaaacttctgcaattaccttaacatccacgtgggaaagaagtaaaaaaaatcattaaggaagatcctcgatgtattaagttctcctccagtgacagggaaaaaacaaagaggaatttgaaggaatatattcaggggacaaatatattcacaggcccaaagcttgactttcagggacgcttttgaaagagaccaaatttataacatatagatccaaaaaattaatccaagaatcggatcagcacctgaaagatgtaggaaaaaattttacaggaatgacaaacggtatctaggtactgggactgtgtgccagagggagagggcgttaaacttgattgtggcatatgtttgatgacctggatcgccggggtccacccccacctccccacagcatccggagcccacgaagacgatcaacaaaataattctaaatactcttccatagggggcatctattccaaatgcttgcatgagcccaattttcaggtttttacatatatgtgcattaggtccacctattgcgaaaccatctgacaaacagaaggacgaagcatttgtgaacacgtttctgaacagaacactttgggaaatatttatggcttttctttgtgtggcatgactggacattacatacttcaaatatagggctgtctctaggtaaatctttaaaatcttggaaggctaaaatttatccttttaatgaggtgtggaagtcagtgacttgggtgacgttcttcctagcagtggttaatacatgcaagaagtaaaagcatttgtggcttgaacttgccagatgcaaataccacagactccaagagaacgcgaagtggggtttgttttgttttgattattttttttttaaagcgggtaaaagagaaaacactgaaaattgaattcttatcttccagaggctacaattattataatggacaataccttttaccctttgtcccctaaagatccagattagttttaatttggttccctaacgtgcctttgattatcccccctctgaattatagacccgagtccttgttgtttagccctaagaagaagatttatgtagtaatttcttctcaggtatggaaccacgggtcataactaacatgttggccagaatagaaccactggttaaacatattttattcaccattaagtgatctttatcaatattctggattagacaacaaattaccttttctgggtgtttcttgtaaactatactcctgtttgaatgttaaactttgttgctaaagtttaattttaagatgtttgaatgttcgagtttatgccttctgaactacaataaaccaacccttttatatataaaaaaaaa

SEQ ID NO: 136587 - DNA, 347 bp, Homo sapiens
ggcggcttcagtgctcggggaggaggcagtgacggccggtgagattggaagtggcggcggcggcaggcggcagaggggagtccgaggttatgcgtctcaatgacccgtcagaatggaatccagacaaataagccagctttgcgtgctgtccgacaacgcagtgaattcaccctcatggccaagcgcattgggaaagaccttagcaacacatttgccaagctggagaagctgacaatcttggcaaagcgcaagtccctctttgatgataaagcagtggaaattgaagagctaacatatatcatcaaacaggacatcaatagcctcaacaaacaaattgctcagctcca

SEQ ID NO: 136588 - DNA, 1779 bp, Homo sapiens
atgaacattcagaccatagatacccaaagagtagaccaggattcctacatccagagtcgggcagacaccatgcagaacattgagtcgacaattgttgagttgggctccatctttcagcagttggcacacatggttaaggaacaggaggaaaccattcagagtgattcttcgttatggccgcccgtgtgccttcgactcaatcgggaggacaccgaaatccagatttcggggttgcagggcgcgggccccggcttggttagggcaggggcagccattttgagaccagaagagggcggaagggaccatattgagaacgccggttgcctgggggccgccattttaagagaagccctgtacggtaaactccgtgacgtgggggctgccatgttggtacggccatcttggaatgggagtggctgtgggcgcagccatcttaggtataaaatcggctccagtcgcggtgaagatgaattctcttacggtttcgatggacgaggactcaaggcagaaaatggacaatttgaggaatttggccagacttttggggagaatgatgttattggctgctttgctaattttgagactgaagaagtagaactttccttctccaagaatggagaagacctaggtgtggcattctggatcagcaaggattccctggcagaccgggcccttctaccccatgtcctctgcaaaaattgtgttgtagaattaaacttcggtcagaaggaggagcccttcttcccaccaccagaagagtttgtgttcattcatgctgtgcctgttgaggagcgtgtacgcactgcagtccctcccaagaccatagaggaatgtgaggtgattctgatggtgggactacccggatctggaaagacccagtgggcactgaaatatgcaaaagaaaaccctgagaaaagatacaatgtcctgggagctgagactgtgctcaatcaaatgaggccccgcagcaacactgtaaaagtccattgtcgccctcccatgaaggcaaactgttccaggctctcggtggattgtctcagttccgttgtcaaatggtccattaagtccgtgacagacagcacagctgccgagccatgcaaaacatccgcccccggagtgtcctcagaaaaggctttacacttccgccagctgcagcgggtactttttgaactggaactcttgggcaggaccgggttgcgcagcaatgtccttctcccgaatgacttgcaggactgggcatgcacctcccaccagcacagtcacaaacgcccatctgactctgcggcaaaggcatacttctcggtgctgtgcacttccaggtgcttcagctccttctccacactcatgggagaccagtgcaccgtctcccacgtttccactgggacccatccaagcagcaccactgccaccagatcctgtggtcaaggtccagcccatgctgaagtccgaggggagtgggtgaatgagcagaaagaacactcagggagccgtaggcagatctccctagagcacgaaatcctgctgcacccgcgctacttcggccccaacttgctcaacacggtgaagcagaagctcttcaccgaggtggaggggacctgcacagggaagtatggctttgtaattgctgtcaccaccattgacaatattggtgctggtgtgatccagccaggccgaggctttgtcctttatccagttaagtacaaggccattgttttccggccatttaaaggggaggtcgtggatgctgttgtcactcaggtcaacaagcctcccaagtag

SEQ ID NO: 136589 - DNA, 508 bp, Homo sapiens
tgccccttgcccctaaccacttgggcggtggtgctgtggttttgggggcagagtcccatgcctccaaggatgttgccattgacatgatggactctcggaccagccagcagctgcagctcattgacgagcaggattcctacatccagagtcgggcagacaccatgcagaacattgagtcgacaattgttgagttgggctccatctttcagcagttggcacacatggttaaggaacaggaggaaaccattcagaggtgagatacactctctcgccccaaacagaggagctttctcttccccgtggattggcatcttaaagtccccagggactgcttgatgccttttggaagatagagtgaattctgcccacccatgggacccagttcacctgcttccatccacccaacaagtttttattgagcacctgttcatgtgaggcactgttccaggtgcgggagatacagtggcaagtagaacagtaaagtctgtctggaaatactttgtaaaaa

SEQ ID NO: 136590 - DNA, 2017 bp, Homo sapiens
  misc_feature (1)...(2017): n = a,t,c or g
ccacggggttggctctggccctgtctctgcttcagggtccccggcccgcgctctggccgccagagcagagttggaagaagagtctgaagcgggttcgacttgggacaggggaaaagcggggccctttccgctgctggtccgccccaggatttgcgagcgtcctgggcgcgaaagtccacgagaagtgcagaaggggctcggggatttgttgattggggtggggcgggggagtttgggtaaagaagttgcctggggaatgacactctcccctccacaacagtccgaggttatgcgtctcaatgatcccgcggaaacgctacgggtctaagaacacggatcagggtgtctacctgggtctctcaaagacacaggtcctgtcccctgcaactgctggcagtagcagcagcgacatcgtcccctctgccccccccagtgaccctcgtccctccccctcccgacaccatgtcctgccgggatcggacccaggagtttctgtctgcctgcaagttcgctgcaagacccgtcaagaatggaattccagacaaattaaggccagcttttgcgttggcttgtccgacaacgcagtgagattcacccttcattggccaagcggcatttggggaaagaccttagcaacacatttgccaagctggagaagctgacaatcttggcgaagcgcgaagcccctctttgatgataaagcaggggaaattgaagagctaacatatatcatcaaacaggacatcaatagccttatcaaacaaattgctcagctccagggatttcgtgagagccaagggcaggccagagtggccggcacctgcagacccactccaacaccattgtgggtctccttgcagtcgaaactgggcttctatgtccaatgacttcaaatcggttttaggaagtgagggacaggggaaccttgaagcaggcagagggagccggaggagaggcagttttcccgggcacctgtgttcagccctgcccctgtcccctacacaccgggccggtggtgcctgtggttctgggggcagagtcccatgcctccaaggatgttcgccatcgacatgatggcactctcggaccagccagcagctgcagctcattgacgagcaggattcctacatccagagtcgggcagacaccatgcagaacattgagtcgacaattgttggagttgggctccatctttcagcagttggcacacatggttaaggaacagggagggaaaccattcagaggatcgacgagaacgtgctaggagcccagctggacgttgagggccgcccattcagagatcctcaagtacttccagtctgtcacctccaaccggtggctcatggacaaaatcttcctcatcctcattgtcttcttcatcatctttgtggtcttccttgcttgaacccctctctactctgaggcactctgttggggtttgggacccttnctggggaaggcaagtggccagtgctgccactgagcctgtgcagggtattggggagaaaggccctgtttccctggaactgctaagaatggacactggcccctgatcccccaccccttgccctctggccacccctgtcctccccccaccaccctcaggcctatgaaacacacagggttcctagatttgaaactctgctgtgaaagtgactgggaagggagcagaggccgagctgggggcccagtgggggaaggtttgtttccactagggagatttttattaaaccctctccagcctctcccggaaaggaagcgttggcagcaaagggagataaatgccccttcccccccttcctgtgagtgaagagaggaagcagccccagggaccaattttcccgaattgacctctttcttcctctttcaccatgtgaggcagggagccctgagcccttcagctgcctgcacaacccctgacattggctgctggtggcgcaatctacacacatgtgcaaaaactcgcccctctcccaatttcagctggactgtcagcctcaaaaaaaaaaaaaaaaaa

SEQ ID NO: 136591 - DNA, 598 bp, Homo sapiens
  misc_feature (1)...(598): n = a,t,c or g
ccgctttttttttttttttttttgagggtgttcactcaacttggatctgtgctgaaaaattgtgacatttcagtacatctggtagagggtacagcttttatcttgcacatgaattttttgatgttcttcctgtgcataaatttcagaaaacaccacagggatggcgagaagtatttgttgacattgatccacaggtttctgataaactgaggtttgttttggcaccttctgccaccccagcagaagccttcatacaacatgacgaaacaagggatcatgttgaagtgtgtcctgatgctggtgttatcatcgaggaactttctcaacgcattgcattaactggaggtgctgcactggttgctgattatggtcatgatggaacaaagacagataccttcagagggttttgcgaccacaagcttcatgatgtcttaattgccccaggaacagcagatctaacagctgatgtggacttcagttatttgcgaagaatggcacagggaaaagtagcctctctgggcccaataaaacaacacacatttttaaaaaatatgggtattgatgtccggctgaaagttcttttanataaatcaaatga

SEQ ID NO: 136592 - DNA, 1900 bp, Homo sapiens
  misc_feature (1)...(1900): n = a,t,c or g
tgccgctccgggaaatggtctaagccccagctcctggcggagcgagctagcctgcgaatttcagcatgagtgtactgctgaggtcaggtttggggccgttgtgtgccgtggcgcgcgcagccattccttttatttggagagggaaatacttcagctccgggaatgagcctgcagaaaacccggtgacgccgatgctgcggcatcttatgtacaaaataaagtctactggtcccatcactgtggccgagtacatgaaggaggtgttgactaatccagccaagggttattatgtgtaccgtgacatgctaggcgaaaaaggagatttcattacttcacctgaaataagtcaaatctttggggagctactaggtatatggttcattagtgaatggatggccactggaaaaagcacagctttccagctggtggaactgggcccaggtaggggaaccctcgtgggagatattttgagggtgttcactcaacttggatctgtgctgaaaaattgtgacatttcagtacatctggtagaggtaagccaaaaattaagtgagattcaagcattgacactgactaaagagaaggtcccgttagagcgaaatgctggatccccagtgtatatgaaaggtgtcactaagtctgggattccaatttcctggtaaccnaggatctgcacggatggttccaaaagggtacagcttttatcttgcacatgaattttttggatgttcttcctgtgcataaatttcagaaaacaccacagggatggcgagaagtatttgttgacattgatccacaggtttctgataaactgaggtttgttttggcaccttctgccaccccagcagaagccttcatacaacatgacgaaacaagggatcatgttgaagtgtgtcctgatgctggtgttatcatcgaggaactttctcaacgcattgcattaactggaggtgctgcactggttgctgattatggtcatgatggaacaaagacagataccttcagagggttttgcgaccacaagcttcatgatgtcttaattgccccagggnacagcagatctaacagctgatgtggacttcagttatttgcgaagaatggcacagggaaaagtagcctctctgggcccaataaaacaacacacatttttaaaaaatatgggtattgatgtccggngtgaaggttcttttagataaatcaaatgaggccatcagtgaggcagcagttacttcaaggatatgatatgttaatgaatccaaagaagatgggagagagatttaacttttttgccttgctacctcatcagagacttcaaggtggaagatatcagaggaatgcacgtcagtcaaaaccctttgcatccgttgtagctgggtttagtgaacttgcttggcagtgatatttcagcttggacattttacccttcagtcggcccaagaaatcaaaataaaggaaacacatttcatatactgcaggtaacaaaagtcaaagtattttatcttttcacagcaagaacagtccatgttgtatataatacaaccaacattatagaacttttagggttgtgactggctttggtgcaaatgtgtgctcaagctaataagttattgtggaaactgagtttcctttaacttacaaagctagttgccatatttctattttattttaaaaagtaaacatgcggctgggcgtggtggctcatgcctgtaatcccagcactttgggaggctgaggtgggcatatcacctggaggtcagcagttaaagaccagcctgaccaaaatgggagaaaccccatctctactaaaaatncaaaactagccgggtatggtggtcatgcctgtaatcccagctctcaggaggctgagcaggagaatcacttgaacctgggaggtggaggt

SEQ ID NO: 136593 - DNA, 377 bp, Homo sapiens; identical to SEQ ID NO: 131499

SEQ ID NO: 136594 - DNA, 1429 bp, Homo sapiens
ggaccaagaggaacaggcccaaaaggaaaagcgagatcagaggaaagccacagccttagtcatggccctcagacaaacaaaccctggtggttcagagaggacagaaaatggggcaggtcaatcacctggtagggcttgttatcagtgtggtttactaggacactttaaaaaagattgtccaatgagaaacaagctgccccctcatccatgtccacaatgccgaggcaatcactggaagacattaaaacagttgcgggggttccttggaattactgccttttgccgactatggatccctggatacagtgagatagccaggcccctctatactttaatcaaggaaacccagagggcaaatactcatctagtagaatgggaaccagaggcagaaacagccttcaaaaccttaaagcaggccctagtacaagctccagctttaagccctcccacaggacaaaacttctctttctacatcacagagattgctgggatagcccttggagtccttacactgacttgtgggacaaccccacaaccagtggcatacctaagtaaggaaactgatgtagtagcaaaaggctggcctcactgtttaagggtagttgcagcagtggccgtcttaatgtcagaggctatcaaaataatacaaggaaaggatctcactgtctggactactcatgatgtaaatggcatactaggtgccaaaggaagtttatggctatcagataactgcctacttagataccaggcgctactccttgagggaccggtgcttcaaatatgcatgtgcatggccctcaaccctgccacttttctcccagaggatgggaaaccaatcgagcatgcctgccaacaaattatagtccagacttatgccacccaagatgatctcttagaagtccccttagctaatcctgaccttaacctatatatcaatggaagttcatttgtggagaatgggatacgaagggcaggttacaccatagttagtgatgtaaccatacttgaaagtaagcctcttcccccagggaccagtgcccagttagcagaactagtggcacctacccgagccttagaactgggaaagggaaaaagaataaatgtgtatacagatagcaagtatgcttatctaatcctacatgcctatgctgcaatatggaaagagagggagttcctaacctctggggcaaccaccattaaataccacaaggaaattatagagttattgcacccaatgcaaaaacacaaggaggtggcagtcttacactgccaaagccatcaaaatggggaaggagaggggaaaacagcagcaaaagtggctggcagaagtagggaaagaccagcaagaagtaaagaaaaaaagagaaagtcagagaaagaaaaaaagagaggaagaaacaaagaagaacttgaagagagaaagaagtag

SEQ ID NO: 136595 - DNA, 568 bp, Homo sapiens; identical to SEQ ID NO: 131505

SEQ ID NO: 136596 - DNA, 1230 bp, Homo sapiens; identical to SEQ ID NO: 126875

SEQ ID NO: 136597 - DNA, 211 bp, Homo sapiens; identical to SEQ ID NO: 131500

SEQ ID NO: 136598 - DNA, 472 bp, Homo sapiens
cagcccgagtttggagatacctggtatcttagccaagtaagtgatagaatgacagctgaagaaagggaaaaaatccctaccagtcagcaagccatccccagtatggatccccactggtatcttgactcagatcagggggactggagtcggagggatatattagccaaagctggagccattatctacatgaatatggggagtaaattactcatttgttgtcccctacttgaggagggaatcaaccctgaagtctgggcattggaaggacaatttcgaagggcaaaatatgttcacccagtccaaatcaggctaaaagatcccaccacttttccttgtcaaaggcaatatcccttaaggcctgaagctcataaaggattacaggatattgttaaacatttagaagctgaaggcttagtaaggaaatgcagcagtccctacaacaccccagttctaggaatacaaaaaccaaatg

SEQ ID NO: 136599 - DNA, 393 bp, Homo sapiens
atgctgaggcaatcactggaaggtgcactgccccagaggatgaagtttccctgggtcagaagcccccaaccagatgatccaacaacaggactgagggtgcctggggaagcaccaactcatgtcatcaccctcactgagccccgggtatgtttaactattgagggccaggaaattgacttcctcctggacactggtgcagccttctccgtggtaatctcctgtcctggacgactgtctcaagaggatgggaagccaatcgagcatgactgccaacaaattgtagtccagacttatgctgcccaagatgatctcttagaagtccccttaactaatcctgagcttaacctatataccgatggaagttcatctgtgaaaatgggatatgaggggcag

SEQ ID NO: 136600 - DNA, 411 bp, Homo sapiens; identical to SEQ ID NO: 124679

SEQ ID NO: 136601 - DNA, 284 bp, Homo sapiens
actctttggcagcagtgactctccaaaaccgccaaggcctagacctcctcactgctgagaaaggaggactctgcaccttctcagggaaagagtgttgtttttacactaaccagtcagggataagttcccctctggaggacactacaactgcagggccctttcttcaccccatccagcaggaagtagctagagctatcatcggccaattcccaacagcatttggggtgtcctgtttagaggggagattgagaggtgaagccagctggacttcctgggtcgagtag

SEQ ID NO: 136602 - DNA, 1449 bp, Homo sapiens; identical to SEQ ID NO: 124244

SEQ ID NO: 136603 - DNA, 1524 bp, Homo sapiens
ctagacacaaaagttctccatgtccccttctccctctctgatttaaagcagatcaaggcagacctggggaagttttcagatgatcctgataggtacaaagatgtcctacagggtctagggcaaacattcgatctcgcttggagagatgtcatgctattgttagatcaaatcctagcctttattgaaaagaatgcagctttagctgcagcccgagagtttggagatacctggtatcttagtcaagtaaatgatagaatgacagccaaagaaagggacaaattccttactggtcagcaagccatccccactatggatccccactgggactttgactcagatcatggggactggagtcataaacatctgttgacctgtgttcttgaaggactaaagggaattaggaaaaagcccatgaattattcaatgatgtccactataactcagggacaagaagaaaagccttctgccttcctcgagcggctaagagaggccttaagaaaatatactcccctgtcacccgaatcactcgagggtcaattgattctaaaagataagtttattacccagtcagctgcagatatcaggagacagctccaaaagcaagccctgggccctgaacaaaatctgcaggaattattaaacctggcaaccttggtgttctataacagggaccaagaggaacaggcccaaaaggaaaagcgagatcagagaaaggctgcagccttagtcagggccctcagacaaacaaaccttggtggttcagagaggacagaatatggagcaggccaatcacccaggagggatatattagccaaagctggagctattatctacatgaatatggggaacaagttacccatttgttgtcccctacttgaggagggaatcaaccctgaagtgtgggcattggaaagacaatttggaagggcaaaaaatgcccgcccagtccaaatcaggctaaaagaccccaccacttttccttatcaaaggcaatatcccttaaggcttgaagctcataaagcattacaggatattgtaaaacatttaaaacctcaaggcttagtaaggaaatgcagcagtccctgcaacaccccagttctaggagtacaaaaaccaaatggtcagtggagattagtgcaagatcttagactcatcaatgaggcagtaattcctgtatatctagttgtagcaaacccctataccctgctctctcaaataccagaggaagcagaatggtttatggttctggacctcaaggatgccttcttctgtattcccctgcactctggctcccagtttctctttgcctttgaggatcccacagaccacatgtcccaacttatgtggatggtcttgccccaagggtttagggatagccctcatctgtttggtgaggcactggcccaagatctaggccacttctcaagtccaggcactctggtccttcagtatatggatgatttacttttggctaccagttgggaagcctcatgccagcaggctactcttgaactttctagctaa

SEQ ID NO: 136604 - DNA, 691 bp, Homo sapiens; identical to SEQ ID NO: 124685

SEQ ID NO: 136605 - DNA, 397 bp, Homo sapiens
gaggtggcagtcttacactgccgaagccatcaaaaaggggaaggagaagggagaacggcagcataagcggctggcagaggcagggaaagaccagcagagagaaagaggcaaagtcaaagacagaaggaaagagaggaagagacaaaggagtcagagagaaagagatagaagtagtaaagaaaaaacagtgcaccctattcctttaaaagccagaatcaaggccatcaaactacagatggtcttacaaacggaaacccaaatgagctcaactaacaacttctaccgaggacccctggaccgacccactggccctttcactggcctagagagttcccctctggaggacactacaactgcagggccccttctttgcccctgtccagcaggaagtagctag

SEQ ID NO: 136606 - DNA, 1586 bp, Homo sapiens
atgacagctgaagaaagggacaaattccctaccagtcagcaagctgtccccagtatggatgcccactgggacctcgactcagatcatggggactggagtcgtaaacatctgttgacctgtgttctagaaggactaaggagaattaggaaaaagcccatgaattattcaatgatgtccaccataactcagggaaaggaagaaaatccttctgccttccttgagcagctacaggaggccttaagaaaatatactcctctgtcacccaactcactagtgggtcaattgatcctaaaagataagtttattacccaatcaaccacagatatcagaagaaagctccaaaatagggaccaagaggaacaggcccaaaaggaaaagcgagatcagagaaaggccatagccttagtcatggccctcagacaaaccttggtggttcaaagaggacagaaaatggagcaggccaatcacctggtggggcttgttaccagtgtggtttgcaaggacaccttaaaaaagattgtccaacgagaaacaagccgccccatcgtccatgtccactatacggaggcaatcactggaagtcacactacccagagggcaaagcttctctgggccagaagcccccaaccagatgatccaatgacaggactgaggatgactgcggcaagcacccgttcatgtcatcaccccctcactgagccctgggtatgtttaatcattgagggccaggaaattgacttcctcctggacactggcacgaccttctcagtgttaatcccctgtcttggacgactgtcctcaaggtccgttaccatccaaggaatcctgggacagcctgtaaccaggtatttctcccacctcctcagttgtaattgggagactttgctcttttcacatgcctttcttgttatgcctgaaagtcccacacccttattagggagggatatattagccaaagctggagctattatctccatgaagacagggaacaagttacccatttgttgtcccctacttgagggaatcaaccctgaagtctgggcattggaaggacaatttggaagggcaaaaaatgcccatccactccaaatcaggctaaaagaccccatcagttttccttatcaaaggcaatatcccttaaggcctgaagctcataaaggattacaggatattgttaaacatttaaaagctcaagactcagtaagaaaatgcagcagtccctgcaacaccccaattctaggagtacaaaaactgaacagtcagtggagactagtgcaagatcttagactcatcaatgaggcagtaattcctctatatccagttgtacgcaacccctatacccttctctctcaagtaccagaggaagcagaatggttcactgttctggacctcaaggatgccttcttctgtattcccctgcactctgactcccagtttctttttgcctttgaggatcccacagaccacacatcccaacttatgtggatggtcttgccccaaaggtttagagatagccctcatctgtttggtcaggcacaggcccaagatctaggccacttctcaagtccaggcactctggtccttca

SEQ ID NO: 136607 - DNA, 1493 bp, Homo sapiens
tagggaccaagaggaacaggcccaaaaggaaaagcgagatcagagaaaggccatagccttagtcatggccctcagacaaaccttggtggttcaaagaggacagaaaatggagcaggccaatcacctggtggggcttgttaccagtgtggtttgcaaggacaccttaaaaaagattgtccaacgagaaacaagccgccccatcgtccatgtccactatacggaggcaatcactggaagtcacactacccagagggcaaagcttctctgggccagaagcccccaaccagatgatccaatgacaggactgaggatgactgcggcaagcacccgttcatgtcatcaccccctcactgagccctgggtatgtttaatcattgagggccaggaaattgacttcctcctggacactggcacgaccttctcagtgttaatcccctgtcttggacgactgtcctcaaggtccgttaccatccaaggaatcctgggacagcctgtaaccaggtatttctcccacctcctcagttgtaattgggagactttgctcttttcacatgcctttcttgttatgcctgaaagtcccacacccttattagggagggatatattagccaaagctggagctattatctccatgaagacagggaacaagttacccatttgttgtcccctacttgagggaatcaaccctgaagtctgggcattggaaggacaatttggaagggcaaaaaatgcccatccactccaaatcaggctaaaagaccccatcagttttccttatcaaaggcaatatcccttaaggcctgaagctcataaaggattacaggatattgttaaacatttaaaagctcaagactcagtaagaaaatgcagcagtccctgcaacaccccaattctaggagtacaaaaactgaacagtcagtggagactagtgcaagatcttagactcatcaatgaggcagtaattcctctatatccagttgtacgcaacccctatacccttctctctcaagtaccagaggaagcagaatggttcactgttctggacctcaaggatgccttcttctgtattcccctgcactctgactcccagtttctttttgcctttgaggatcccacagaccacacatcccaacttatgtggatggtcttgccccaaaggtttagagatagccctcatctgtttggtcaggcacaggcccaagatctaggccacttctcaagtccaggcactctggtccttcaatacagcgagatagccaagaccctctatactctaatcaaggagatggagagggcaaatactcacctagtagaatgggaaccagaggcagaaacagccttcgaaaccttaaagcaggccctagtacaagctccagctttaagccttcccacaggacaaaacttcgctttatatgtcatagagagagcagggatagctcttggagtccttactcagactcacaggacaaccccacaaccagtggcatacctaa

SEQ ID NO: 136608 - DNA, 307 bp, Homo sapiens
ggatcaagaggaagaggcccaaaaggaaaagcaagatcagagaaaggctgcagcattagtcatggccctcagacaaaccaaccttggtgattcagagaggacagaaaatggagcaggccaatcacttgccgttgagggccaggaaattgacttcctcctggacaatggtgcggctttctcagtgttaatctcctgtcccagacagctgtcctcaaggtccgttaccatccggggaatcctgggacagcctgtaaccaggtatttctcccacctcctcagttgtaattgggagacttttctacagata

SEQ ID NO: 136609 - DNA, 16421 bp, Homo sapiens
ccgttgagggccaggaaattgacttcctcctggacaatggtgcggctttctcagtgttaatctcctgtcccagacagctgtcctcaaggtccgttaccatccggggaatcctgggacagcctgtaaccaggtatttctcccacctcctcagttgtaattgggagacttttctacagataagttcccctctggaggacactacaactgcaggccccttcttcacccctatccaggaggaagtagctagagtggtcatcatccaattcccaacagcaattggggtgtcctgtttagaggggggattgacaggtgaagccaaccgggcttctgagtcagctctaaaaatcagagcgcctctcctcctccaaaggaacgcagctcctcaccagcaacggaactaagctggatggagaatgactttgacgagctgagagaagaaggcttcagacgatcaaattactctgagctacgggaggacattcaaaccaaaggcaaagaaattgaaaactttgaaaaaaatttagaagaatgtataactagaataaccaatacagagaagtgcttaaaggagctgatggagctgaaaaccaaggctcgagaactacatgaagaatgcagaagcctcaggagccgatgcgatcaactggaagaaagggtatcagcgatggaagatgaaatgaatgaaatgaagcgagaagggaagtttagagaaaaaagaataaaaagaaatgagcaaagcctccaagaaatatgggactatgtgaagagaccaaatctacgtctgattggtgtacctgaaagtgatggggagaatggaaccaagttggaaaacactctgcaggcaacaaaagacaaaattgacaaatgggatctcattaaactaaagagcttctgcacagcaaaagaaactaccatcagagtgaacaggcaacctacaaaatgggagaaaattttcgcaacctactcatctgacaaagggctaatatccagaatgtacaacgaactcaaacaaatttacaagaaaaaaacaaccccatcaaaaagtgggcaaaggacatgatctagattatggatttttttatttcaatggaagtgaagttcaaagctttatttttgttccaaactggatatttaactttattggttacagatgccagagtggtacagttcgaacaaactgcttggattgtcttgatagaacaaatagtgtgcaggcatttcttggcttagagatgctagctaaacagttggaagctcttggtttagctgaaaagcctcagttggtgactcgctttcaagaagtttttcggtcaatgtggtccgtgaatggtgattcaatcagtaagatatatgcaggaactggagctcttgaagggaaagcgaaggctggaaagttaaaagatggtgctcgctctgttacccgaacaattcagaataacttctttgacagctccaagcaagaggccattgatgttttgctactgggaaatactctgaatagtgatttagctgacaaagctcgagcacttttaactactggaagtttgcgtgcatcttctaaagtactaaagagcatgtgtgagaatttctacaaatattcaaagcctaagaaaattcgagtatgtgtcggaacctggaatgtgaatggtgggaagcaatttcgcagcatagcttttaagaatcagacactcactgactggcttcttgatgcacccaagttagctggcatccaggagtttcaaggaaagattgcatctttgatctctgcctgggtggtgggaacctgagcattctctgcagcaacatccatgcctacggctctgatcggcaccccctccttgcagccatggagtgccctccgaacagtcactacgagctctgtgcggacacctgctccctgggctgctcagctctcagtgcccctccacagtgccaggatgggtgtgctgagggctgccagtgtgactccggcttcctctacaatggccaagcctgcgtgcccatccagcaatgcggctgctaccacaatggtgtctactatgagccggagcagacagtcctcattgacaactgtcggcagcagtgcacgtgccatgcgggtaaaggcatggtgtgccaggaacacagctgcaagccggggcaggtgtgccagccctccggaggcatcctgagctgcgtcaccaaaggtgctgagctggggttgggcctggggctgatgcgactagggatggaggacaaggactctggggctgagggtggtgtaactggggtgtccatggcgggagacccgtgccacggcgtgacatgccggccacaggagacatgcaaggagcagggtggccagggcgtgtgcctgcccaactatgaggccacgtgctggctgtggggcgacccacactaccactccttcgatggccggaagtttgacttccagggcacctgtaactatgtgctggcaacaactggctgcccgggggtcagcacccagggcctgacacccttcaccgtcaccaccaagaaccagaaccggggcaaccctgctgtgtcctacgtgagagtcgtcaccgtggctgccctcggcaccaacatctccatccacaaggacgagatcggcaaagtccgggtgaacggtgtgctcacagccttgcctgtctctgtggccgacgggcggatttcagtgacccagggtgcatcgaaggcactgctggtggctgactttggactgcaagtcagctatgactggaactggcgggtagacgtgacgctgcccagcagctatcatggcgcagtgtgcgggctctgcggtaacatggaccgcaaccccaacaatgaccaggtcttccctaatggcacactggctccctccatacccatctggggcggcagctggcgagccccaggctgggacccactgtgttgggacgaatgtcgggggtcctgcccaacgtgccctgaggaccggttggagcagtacgagggccctggcttctgcggacccctggcccccggcacagggggccctttcaccacctgccatgctcatgtgccacctgagagcttcttcaagggctgtgttctggacgtctgcatgggtggtggggaccgtgacattctttgcaaggctctggcttcctatgtggccgcctgccaggctgctggggttgtcatcgaagactggcgggcacaggttggctgtgagatcacctgcccagaaaacagccactatgaggtctgtggctcaccctgcccggccagctgtccgtcccctgcaccccttacgacgccagccgtatgtgagggcccctgtgtggagggctgccagtgcgacgcgggtttcgtgttaagtgctgaccgctgtgttcccctcaacaacggctgcggctgctgggccaatggcacctaccacgaggcgggcagtgagttttgggctgatggcacctgctcccagtggtgtcgctgcgggcctgggggtggctcgctggtctgcacacctgccagctgtgggctgggtgaagtgtgtggcctcctgccatccggccagcacggctgccagcccgtcagcacagctgagtgccaggcgtggggtgacccccattacgtcactctggatgggcaccgattcaatttccaaggcacctgcgagtacctgctgagtgcaccctgccacggaccacccttgggggctgagaacttcactgtcactgtagccaatgagcaccggggcagccaggctgtcagctacacccgcagtgtcaccctgcaaatctacaaccacagcctgacactgagtgcccgctggccccggaagctacaggtggacggcgtgttcgtcactctgcccttccagctggactcgctcctgcacgcacacctgagcggcgccgacgtggtggtgaccacaacctcagggctctcgctggctttcgacggggacagcttcgtgcgcctgcgcgtgccggcggcgtacgcgggctctctctgtggcttatgcgggaactacaaccaggaccccgcagacgacctgaaggcggtgggcgggaagcccgccggatggcaggtgggcggcgcccagggctgcggggaatgtgtgtccaagccatgcccgtcgccgtgcaccccagagcagcaagagtccttcggcggcccggacgcctgcggcgtgatctccgccaccgacggcccgctggcgccctgccacggccttgtgccgcccgcgcagtacttccagggctgcttgctggacgcctgccaagttcagggccatcctggaggcctctgtcctgcagtggccacctacgtggcagcctgtcaggccgctggggcccagctccgcgagtggaggcggccggacttctgtcccttccagtgccctgcccacagccactacgagctctgcggtgactcctgtcctgggagctgcccgagcctgtcggcacccgagggctgtgagtcggcctgccgtgaaggctgtgtctgcgatgctggcttcgtgctcagtggtgacacgtgtgtacctgtgggccagtgtggctgcctccacgatgaccgctactacccactgggccagaccttctaccctggccctgggtgtgattccctttgccgctgccgggagggcggtgaggtgtcctgtgagccctccagctgcggcccgcatgagacctgccggccatccggtggcagcttgggctgcgtggccgtgggctctaccacctgccaggcgtcgggagatccccactacaccaccttcgatggccgccgcttcgacttcatgggcacctgcgtgtatgtgctggctcagacctgcggcacccggcctggcctacatcggtttgccgtcctgcaggagaacgtggcctggggtaatgggcgagtcagtgtgaccagggtgatcacggtccaggtggcaaacttcaccctgcggctggagcagagacagtggaaggtcacggtgaacggtgtggacatgaagctgcccgtggtgctggccaacggccagatccgtgcctcccagcatggttcagatgttgtgattgagaccgacttcggcctgcgtgtggcctacgaccttgtgtactatgtgcgggtcaccgtccctggaaactactaccagctgatgtgtggcctgtgtgggaactacaacggcgaccccaaggatgacttccagaagcccaatggctcgcaggcaggcaacgccaatgagttcggcaactcctgggaggaggtggtgcccgactctccctgcctgccgccgcccacctgcccgccggggagcgagggctgtatccccagcgaggagtgtcctcccgagctggagaagaagtatcagaaggaggagttctgtgggctcctctccagccccacagggccactgtcctcttgccacaagctggtggatccccagggtcccttgaaagattgcatctttgatctctgcctgggtggtgggaacctgagcattctctgcagcaacatccatgcctacggctctgatcggcaccccctccttgcagccatggaatgccctcagaacagtcactacgagctctgtgcggacacctgctccctgggctgctcggctctcagtgcccctctgcagtgcccagatgggtgtgctgagggctgccagtgtgactccggcttcctctacaacggccaagcctgcgtgcccatccagcaatgtggctgctaccacaatggtgcctactatgagccggagcagacagtcctcattgacaactgtcggcagcagtgcacgtgccatgtgggtaaagtcgtggtgtgccaggaacacagctgcaagccggggcaggtgtgccagccctccggaggcatcctgagctgcgtcaacaaaggtgacatttgcactggtctgtattctctgggtggtttacggttactcgctggcgtttggtgagggcaacaacttcttcggcaacattaaaacaagtacaatgggcatcgtattgcccgaacagataaagctagcatgccaacggttacggccaagttcgagcaacgtgaaacccagtcgctcagggcgcagattaacggctggaaatggaaaaagaaatactaagccaaccacctgtgttaataagcgagttccccatcaaatctatgcgttaacccggctgaaaacaaaatggccagtggtcgaattgtcccccctgctcaaaataacgcccagtgtttactctgcttcgctgaattttcgggttgatgtaaaacgtctgcaactgcgtgaattacatcaacagagccggggagcagccggcagcagaacactgagtctgctgatgcgtcagtcgggttataacgtggtgcgctggctggcccgcaggctgatgcgggaatgtggtctggcgagtcgccaacccggaaaacctcgttaccgtggcgaacgggaggtgtcactggcatcgccagatttactgaaaaggcagtttaagccgtcggagcccaatcgtgtgtggagtggatatatcagctatatcaaagtcaatggtggctggtgctacctggcactggtgattgacctttactcccgtcggatagtgggcagtgccatatcatcatccccggatgctgagctggtgtgtcgagcctagtacacctccacagacaggaatggcagcagcaacaatgctgtcaatgaaagtaaaggaagcaaccaccaggagagcgaaggaataaatgtgggagccacccagtctgtggtactgtgctatggcagccttagcaaactcatccagatctcttcctgtcctacggtgggctgtccaccttcccacagctccttcagcatcctcgatggggccaatgctggccaagagaagcagagcacgaccgaaccagagcccgcgctcttcctcctgccacccagccgtggagcatttggaccctttgggctgctgtctgatctaagacggcagctctgattccacgagcaaaacacgtagccccttcagagccagatcctgagcaagatgaacagaaactgaggttttgtaaacgccacctttatgggcagcaaccccgatcaccggtggaaatacgtcttcagcacgtcgcaattcgcgtaccaaaccacatcacgcaatatgaattaatttgtttcacttgtataaaccaacacgttgcctcaacccgtgcctcggaatttccaatatccgaggtagcggtggtggggattacaggccggccacctattgctcagcttttttattacgactcccgaggaacccttgactccacagagccttttctacatgtaggatattatgcttaagaagaaagacaccattttggtgtttctaagccccgggcccggagactagaggtgccccgggcccggagacttgaggtgccccgggcccggagactagaggtgccccgggcccggagactagaggtgccccgggcccggagacttgaggtgccccgggcccggagactagagctgttcatcgggactctgctcttcaccatcctgctcttcctcctgcctaccacagccctgtactacctggtgttcaccctggcgcgtctggccgggccggtcctaaatgctcctctgccacagctccggctcctggtggtcgccgtgcagggcctgatccatctgctcgtggacctcatcaactccctgccgctgtactcactgggtcttcggctctgccggccctacaggctggcggcccctgctatccttgcagctggcgtgaagttccgtgtcctccggcacgaggccggcaggcccctccgcctcctgatgcagataaacccactgccctacagccgcgtggtgcacacctaccgcctccccagctgtggctgccaccccaagcactcctggggcgccctgtgccgcaagctgttccttggggagctcatctacccctggaggcagagaggggacaagcaggactgaaacgcgatgctgagttagcgaacggcgccctcggtatcatagagttaaataatgattacacattgaaaaaagtaatgaagccgctgatcacttcaaacacggtaactgatgaaatcgagcgcgcgaatgttttcaaaatgaacggcaaatggtacttgttcactgattcacgcggttcaaaaatgacgatcgatggtattaactcaaacgatatttacatgcttggttatgtatcaaactctttaaccggcccttacaagccgctgaacaaaacagggcttgtgctgcaaatgggtcttgatccaaacgatgtgacattcacttactctcacttcgcagtgccgcaagccaaaggcaacaatgtggttatcacaagctacatgacaaacagaggcttcttcgaggataaaaaggcaacatttgcgccaagcttcttaatgaacatcaaaggcaataaaacatccgttgtcaaaaacagcatcctggagcaaggacagctgacagtcaactaaccatgttactttctttgaccaaagggatgttatcaaacatgtcacaagcaaagagattagaaactgtgtatgctaatgtgggaggaaaaacactgattggccatactccaagatacatcaaaacactccagcagatgtatgggaatgcatccgccctcggactgggtgagatagcagccccagctccaggtggaaaggacagcttactcatcaagggagttacagtgtctgcagcctgtactgagtcagagtatctgagagagggcatctgtcaggatgactgtcaattccagactgtggtatgcgtcctcttgcttccactcttgcctgaacaggttctgcgtctttaacggagccgctggccaatatgtactcatgtgggaaccagaacacactgatggaggagttggcagagcaggcacagcagcacgacgagatgctgcacatgcaccacgcgctgaaggaggcgctcagcatcatcggtgacatcaacaggaccactgtcaccatgcccatgcccccgcccgtggacgacacctggttgcaggtgcagagcatccctgacgcacacaggtaccagagactgccccccacggccccaaaatcccccacccgggatgcccagaggagtgccctgggggcaagtggcacaccccctcaccggggtggctcccacctggagtgacacctctatgcaaataaactagaaaatctagaagaaatggataaattcctcgacacatacaccctcccaagactaaaccaggaagaagttgaatctctgaatagaccaataacaggctctgaaactgtggcaataatcaatagcttaccaaccaaaaagagtccaggaccagatggattcacagctgaattctaccagaggtacaaggaggaactgagaataaagtacctagaaatccaacttacaagggatgtgaaggacctcttcaaggagaactacaaaccactgctcaaggaaataaaagaggacacaaacaaatggaagaacattccatgctcatgggtaagaagaatcaatatcgtgaaaatggccatactgcccaagagaataaaatacctaggaatccaacttacaagggatgtgaaggacctcttcaaggagaactacaaaccactgctcaacgaaataaaagaggacacaaacaaatggaagaacattccatgctcatggataggaagaatcaatatcatgaaaatggccatactgcccaagcacaagcaggacgatatggaagtaaagacagagaaccgtagagggcaacagaaaaaaatggccaaacccatccccgaaaaaggagatataaggaggagacgcctctatcctccaatcggagagctgagcacctccggaggtgagggtttctttttctccagcaggtggttttcgcagagatctgttatatctgaagttccgccagagaaggccactgtcatcactcaccttgacgactgcagacgactcctaacgattcgactgtcagtctttcccacttctaatctagcaatggctcattcaacaaatacctgctgtgtgcctactatgtaaatttccgacgcagaaaacaaacacattttagaactctcaaaccttaccattcaagatagaggagtttattcttgtaaggcttccaacaagtttggagcagacatctgccaagcagagttgatcatcattgataagccacatttcattaaagaattagagcctgtgcagtccgctatcaataagaaggtccaccttgagtgccaagtagatgaagacagaaaagtcacagttacgtggagcaaagatgggcaaaaactccccccagggaaagattataagatctgttttgaagataaaatagcaacacttgagattcctttggccaaactgaaagattcaggaacctatgtctgtacagcttcaaatgaggctggaagcagctcctgctcagccacagtcactgtcagagagccaccatccttcgtgaagaaggtggatccctcttatttaatgctcccaggtgaatcagcacgcctccattgcaagctgaaaggctcacctgtgatccaggttacttggtttaaaaataacaaagaactcagtgaaagtaacacagtccgaatgtattttgtcaattctgaggctatacttgatattacggatgtaaaagttgaagacagtgggagttactcatgtgaagcagtgaatgacgtcggcagtgatagctgcagtactgaaatagttatcaaagaacctccttctttcatcaaaactcttgagcctgcagacatagtgagaggaacaaatgctctacttcagtgtgaagtctcaggcactggaccatttgaaattagctggttcaaagacaagaaacaaattcgaagtagtaaaaaatacagattgttttctcagaagtctcttgtgtgtctggagatcttttcgtttaatagtgcagatgttggtgaatatgaatgtgttgttgctaatgaagtcggcaagtgtggctgcatggcaacccacttactcaaagaacctccaacctttgtaaagaaagtagatgatttgattgcactaggaggacaaaccgttaccctgcaagctgctgtgagagggtcagagcccatttctgtcacatggatgaaaggtcaagaggtcatcagagaagacggaaaaatcaaaatgagcttttccaatggtgttgcagtcttgataatccctgatgttcagattagttttggaggcaaatacacgtgcctggctgaaaatgaagctggaagccaaacatctgttggggaattaatagttaaagaacctgccaaaatcattgagcgagcagaactgatccaggtgacagcaggagatcccgccacactggagtacacagtggcaggcacgccagaactgaagcccaaatggtacaaagatgggagacccttggtcgccagtaaaaaataccgaataagttttaaaaacaatgttgcccagctcaaattttattcagctgagctgcacgacagtggccaatacacatttgagatttccaatgaagtgggcagcagctcctgtgagactacattcactgtattagatcgagacattgctccattttttaccaaacccttgcgcaacgtggatagtgttgttaatggtacctgcagactggactgcaaaattgcaggctccctccccatgagggtgtcctggtttaaggatggcaaagaaatagctgcttctgacagatacaggatagcatttgtggaaggcacagcctctttggagatcatcagagtagacatgaatgatgcagggaatttcacttgtcgagccacaaattccgttgggaagcaaagacagcagtggagccctgattgtgcaagatggtttaagggcaacaaagagctggtttctggtggaagctgctatattaccaaagaagctttagagagttccctggaactctatttagtaaaaacctctgattcgggcacgtacacatgtaaagtcagcaatgtcgctggaggggtggaatgcagtgcaaacttgtttgtaaaagaacctgccacatttgttgaaaagttagagccatcacagctgttaaagaagggagatgccacccagctagcctgcaaagtaactggtacccctccaattaaaataacatggtttgcaaatgatagagaaattaaggagagcagcaaacacagaatgtcttttgtggagtctactgcagttctaagactgacagatgttggcatcgaagacagtggtgaatatatgtgtgaggcccaaaatgaggctggcagtgaccactgcagtagcattgtaatagtcaaagagtcaccttattttaccaaggaatttaagccaattgaagtcttaaaggagtacgatgtcatgttgctggctgaggtggcaggcactcctccctttgagatcacttggttcaaagataacacaatcctgcgaagtggtagaaagtataagactttcattcaggatcatctggttagcctgcagatcctcaagtttgtagctgcagatgctggcgaataccagtgtcgggtgaccaatgaggtgggcagcagcatctgcagtgccagggtgactttaagagaacccccatccttcataaagaagatcgagagtaccagctccctccggggaggcacagctgccttccaggccactctgaagggctccttgccaattacggtgacttggctaaaagacagcgatgaaatcactgaagacgataatataagaatgacctttgagaacaatgtggccagtttgtacctcagtggcattgaagtcaagcatgatgggaaatatgtctgtcaggccaaaaatgatgcaggaatacaaagatgttctgcattactctcagtaaaagaacctgcaacaatcaccgaggaagctgtgtctatagatgtcacccaaggagacccagccactttgcaggttaaattttcagggactaaggagattacagccaaatggtttaaagatggccaagaactgaccctgggctcaaaatataaaatcagtgtcactgatacagtctcaatactgaagattatttctacagaaaagaaagatagtggagaatatactttcgaggtccaaaatgatgttgggaggagcagctgcaaggctagaattaatgtattagatcttatcatacctccttcattcaccaaaaagctgaagaaaatggacagcattaaaggttctttcattgatttagaatgtatagtggctgggtcacatcccataagcatccagtggttcaaagatgaccaagaaatatcagctagtgaaaagtacaaattctcttttcatgacaatactgccttcttggaaatcagccagctggaagaacccccttactttgtggaaaagccacagtcacaagatgtcaatcccaacacaagggtacagttaaaggctcttgtgggtggcactgcacccatgacaataaagtggtttaaagataacaaagagttacactcaggagcagcccgctcagtttggaaggatgacacctctaccagtctagagctctttgcagccaaagctaccgattctggaacctacatttgccaactaagcaatgatgttggcacagcaaccagcaaagccactctctttgtaaaagaacctcctcaattcattaagaagcccagtccagtcttagtgctgaggaatggacagtcaacaacatttgaatgccaaataacaggcactcctaaaatccgagtgtcttggtatctagacgggaatgaaataacagccattcagaaacatggcatttccttcattgatggtttagccactttccagatttctggtgccagggtagaaaatagtgggacttatgtgtgtgaagctcgaaatgacgcaggcacggcgagctgcagcattgaactcaaagtgaaagaaccccccacctttatcagagagctgaagcctgtggaggtagtaaaatatagtgacgtggagctggagtgtgaagttacgggaacacctccgtttgaagtcacttggctgaagaataacagggaaattcgaagcagcaaaaaatacacattgaccgacagagtgtctgtgtttaacctccatataaccaagtgtgacccttcagacactggggaataccagtgcattgtatccaatgaaggcggcagctgctcatgcagtactagagttgccctgaaagaaccaccatcattcattaagaagatagaaaataccactactgttttgaaaagttctgccacctttcagagtaccgtggcaggttctcctcctatttctataacctggctaaaggatgatcagattcttgatgaagatgataatgtctatatttcatttgtggacagtgtggccacacttcaaatcagaagtgtggataatggacacagtgggagatatacctgtcaagccaagaatgagtcaggagttgagaggtgttatgctttccttttagtacaagaaccagctcaaatcgtagagaaagctaaatcagttgatgttacggagaaagatcccatgaccttggaatgtgttgtggctggaacaccagaactcaaagtgaaatggcttaaagacgggaaacaaatagttcccagtagatacttttcaatgagttttgaaaataacgtggccagttttagaattcagtcagtaatgaagcaggacagcggtcagtacactttcaaggtggaaaatgacttcggaagcagtagctgtgatgcctacttaagagtgctagatcaaaatattcctccatcattcaccaaaaaattaaccaaaatggataaagttctgggctcttctattcatatggagtgcaaggtgtctggttcacttcccattagtgctcagtggtttaaggatggaaaagaaatatctacaagtgcaaaatacagacttgtgtgccatgagagatctgtgtctctggaagttaataatctggaattagaagatactgcaaattacacatgcaaagtgtcaaatgtagcaggagatgatgcatgcagtggcatcttaactgtgaaagaaccaccaagcttcctagtgaaacctgggcgacagcaagccatacctgattctacagtggaatttaaggcaatactaaaaggaacaccaccatttaaaataaaatggtttaaggatgatgtggaacttgtctcaggtcctaaatgtttcattggcttggaagggtcgactagcttcttaaatctctactcagtggatgcttctaagactggacagtatacttgccatgttaccaatgatgttggtagcgactcttgtactacgatgttgcttgtgacagaaccaccaaagtttgtaaagaaattagaagcctccaaaattgtgaaagcaggtgactcttcacgacttgaatgcaagatagctggatccccagaaatcagagttgtgtggttccgaaatgaacatgaacttccagccagtgataagtacagaatgactttcattgactcagtggccgtcatacagatgaacaatctcagtactgaggacagtggagatttcatttgtgaggctcagaatcccgctggcagcacaagctgcagtaccaaggttatagtaaaagagccacctgtttttagcagcttccctcctatagtagaaacccttaaaaatgctgaagtcagtcttgaatgtgaactttcgggaacaccaccgtttgaggtggtatggtacaaagacaagcggcaactcagaagcagcaagaaatacaagattgcatccaaaaacttccacacaagtattcacattctcaatgtggacacttcagacatcggtgaataccactgcaaagcacagaatgaagtgggaagtgatacttgtgtttgtactgtaaaattgaaagaaccaccaagatttgtctccaaactgaacagcctcactgttgtagccggagagcctgctgaattacaagcatccatagaaggcgcccagcctatttttgtccagtggcttaaagagaaggaagaagtgattagagaaagtgaaaacatcaggattacatttgtggaaaatgttgcaactctacagtttgcaaaagcagagccagctaatgctggaaagtatatctgccaaatcaagaatgatggtggaatgagggagaacatggccacactgatggtcttagagcccgcagtcattgttgagaaggcaggaccgatgacggtgactgtaggagaaacgtgcactctggagtgtaaggtggctggcactccggaactctctgttgaatggtacaaggatggaaagctgttgaccagcagccaaaaacacaaatttagcttctacaacaaaatctcttccttaaggattctctcagttgaaaggcaagatgcaggcacatacactttccaggttcaaaataatgttgggaaaagcagctgcacagctgtggttgatgtttcag

SEQ ID NO: 136610 - DNA, 536 bp, Homo sapiens
ttttttttttttttttacttttcagaactgtattaagaactgtaacagtcactgcgagggtctgcggcttcattcttgatgtcagcgagaccaagaatccaccagaaggaaccaattccagacacagaattatttgccttcttacttcctgagagttctaggcacagaacatacttgaggtgttatacaaaggtaattagaactgacagggaattgtatgattaatgacgtgggacatgagagatttggaacgagataaaaaggcttaccttgaggacagccttattaggagcagaggcaaacacaggttttgtgggtttgaagcctacacatttatagctttctctaattacacaggtaggaaattataaaatcaggtacaagggcttggcaggggcctaaagcttaagtgatgaaaaaaaaaaaacaccacacctctggtgaaaccaatagcttacgaaaaagtagaaaaaagcgcgatgcatggggagctccggtagtcctttgaggtatttgagaggctgagtcaggaagat

SEQ ID NO: 136611 - DNA, 1337 bp, Homo sapiens
aggaactaactctggacacatcctgggggcttgtctgggattttgccacatggtgagtaccatcggaccactttcactgctattctgtcctatttttccttagaattcaggggctaaacacgctgtagggggaggagaatttggcccaactcgggtacatgtccccttctccctctctgatttaaagcagatcaaggtagacatggggaagttttcagatgatcctgataggtatttagatgtcctacagggtctagggcaaaccttaaaaaagactgtccaacaagaaacaagccacatcctcgtccatgtccgctatgacaaggcaatcactggaaggtgcactgccccagagaacaaaggttctctgagccagaagcccccaaccagatgatccaacaacaggactgagggtgccagctcatgtcatcaccctcactgagccccaggtatgtttaaccattgagggccaggaaattgacttccttctggacactggcacagctttctcagtgttaatctcctgtcctgcctgggggacagggcaagactctgtctcaaaaaaaaatgaaaagaaaaggaaagaaaaggcaaaaggaaatcatcaggcaaatgctgaagccaaaattgctgccaggtggaacccctcattagaaatacctacagaaggacctttggtatggaacaaccccctccaagagattaagccccagtattctctgactgaaacagaatggggactttcacagggtcatagttttctccccttggggtggttaatgacagaagaagtaaaggtacttatacccgaagccagccagtggaaaatacttaaaaccctccaccaaacttttcagatgggtattgaaaacactcaacaaatggccaaatccctatttacagggccaaatctcctctggaccatccgacatgtagtcaaagcctgtgaggtgtgccaaaggaataatcccttggtccatcataaggcccctttgggggaacaaaggataggtcactatcctggagaggactggcaattagacttcactcatatgcctaagtcaaagggatttcaatacttgttggtctgtgttgatacctttacaaattggatagaagctttcccctgcaagatagagaaggctcaggaagtgaataaagttctaattcatgaaacaattcctagatttgggcttccccaaagcttacagagtgacaatgatccggcttttaaagccatgataactcagggaattttccagggcgctaaggatacaatatcaccttcactgtgcctggaggccacaatcctcagggaaggtcgagaaggcaactga

SEQ ID NO: 136612 - DNA, 851 bp, Homo sapiens
ctgctcttgtgaggacgtggagagtctttatatctagctcagggattgtaaatacaccagtcagcaccctgtgtttagctcaagatttgagtgcaccaatcgaaactctgtatctagctgctccggtgaggacgtggagagtctttatatctagctcagggattgtaaatacaccaatcagcaccctgtgtttagctcaaggaggacaagcaagggtgcaggttttcaacattgcgtcagtaaggaccactaaatccgaccttcctcggtcctccatgtggtctgggaggaaaactagtgtttctgttgctgcgtcagtgagtgcaactattccgatcagcagggtccagggaccgttgcgggttcttggacagggagagaaacaaaacaaaccaaaactgcgggaaacaagcaaagaaatctccaaaggaccacaaaaacccccgggctgtcggttatgtccccttcaatctgtagcaggaggggaatttggcccaacccgggtatatgtccccttctccctctctgatttaaagcagatcaaggcagacctggggaagttttcagatgatcctgatagggaccaagaggaacaggcccaaaaggaaaagcgagatcagagaaaggctgcagccttagtcatggccctcagacaaacaaacctttggtggttcagaaaggacagaaaatggagcaggccaatcacccggtagggcttgttatcagtgtggtttacaaagacattttaaaaaagattgtccaacgagaaacaagccaccccctcatccatgtccgctatgccgaggcaatcactggaaggcgcactgccccggaggacaaaggttctctgg

SEQ ID NO: 136613 - DNA, 1915 bp, Homo sapiens
cagggcccatatggcccaggttttgacagtttgccttactcccttgggctggggctagccctacctgataccctgtgtcaatgagtgtaccttggagagctatccactcaggccccagtgcctctatttgctaagggactctgccacagaaaagaaggggagagatgttcatgtaacctcaaaatacttaggcttggttttgatgctagagaggaaaaaggacttggagagagagaaggaatggctggtccagaggcttttgtccactccctctcactggaagttggttgatctccagggaatccccaaggttagcctgcttaggggaagggctaggggtacctggaatgtaggatctcccccatgcctggcctaccaccctaatgtgtccggaattggtgggttcttggtctcactgacttcaagaatgaagccatggaccctcacagtgagtgttacagctcttaaggtggtgcgtctggagtttgtttcttctgatgttcggatgtgtttggagtttcttccttctggtgagttcgtggtctcgctggctcaggagtgaagctacagacctttgtggtgagtgttacagctcataaaagcagtgtggacccaaagagtgagcagtagcaagatgtattgcaaagagcgaaagaacaaagcttccacagtgtggaaggggacctgagcgggttgccactgctggctcgggcagcctgcttttattctcttatctggccccacccacatcctgctgattggtagagccgagtggtttgacagggcactgattggtgcgtttacatccctgagctagacacaaggttctccacatccccaccaggttagttagatacagagtgttgacacaaggttctccaaggccccaccagagtagctagatacagagtgtccattggtgcattcacaaacctgagctagacacagggtgctgatggtgtattacaatccctgagctagacataaaggttctccaaggacccatcagagtagctagatacagagctgaagggctcctcaagtgctgccaaagtgggagcccaggcagaggaggtgccgagagtgagcgagcgagtgagggctgtgaggactgccagcatgctgtcacccctcaatcaacaggacaccccaactgctgttgggaatttggccgatgactgctctagctacttcctgctggataggggcgaagaaggggctttgcagttgtagtgtccttcagaggggaactctctaggccaggggaagtgccaggaccagctggtcagtccaggggtcctcggtagaagttgttagttgaactcatttggggttccatttgtaagaccatctgtagcttgatggcctcgatttgcttggcgataggcaatggtctcaccgctcggcaataggtgatggtctcactgctcagcgattgtctcaccgcttggcaataggcgaaagtccttcatggtcgacaaaatgtgtccggaattggtgggttcttgcatccttcatcacttgacttcaagaatgaagccgtggaccctcgcggtgagtgttacaagctcttaaaggtgcgcatctggagtttgttccttctaatgttcagatgtgtttggagtttcttccttctggtgggttcgtggtctcgctggcttaggagtgaaactgcagaccttcgcggtgatgttacagctcttaaggcggcgcgcctggagttgttcattgcgcgcctggagttgttcgttcctcccagtgggcttgtggtctcgctggcttcaggagtgaagctgcagacctttgcggtgagtgttatagctcataaaagcagtgtggacccaaagagtgaacagtagcaagatttattgcaaagagtgaaagaacaaagcttccacagtgtggaagggaattc

SEQ ID NO: 136614 - DNA, 6409 bp, Homo sapiens
atgaacatcgatgcaaaaatcctcaataaaatactggcaaaccgaatccagcagcacatcaaaaagcttatccaccaggatcaagtgggcttcatccctgggatgcaaggctggttcaacatacgcaaatcaagaaacgtaatccagcatataaacagaaccaatgacaaaaaccacatgattatctcaatagatgcagaaaaggcctttgacaaaattcaacaacacttcatgctaaaaactctcaataaattaggtattgacgggatgtatctcaaaataataagagctatctatgacaaacccacagccaatatcatactgaatgggcaaaaactggaagcattccctttgaaaactggcacaagacagggatgccctctctcaccactcctattcaacatagtgttggaagttctggccagggcaatcaggcaggagaaggaaataaagggtattcaattaggaaaagaggaagtcaaattgtccctgtttgcagatgacatgattgtatatctagaaaaccccactgtctcagcccaaaatctccttaagctgataagcaacttcagcaaagtctcaggatacaaaatcaatgtggaaaaatcacaagcattcttatacaccaataacacacaaacagagagccaaatcatgagtgaactcccattcacaattgcttcaaagagaataaaatacctaggaatccaacttacaagggacgtgaaggacctcttcaaggagaactacaaaccactgttcaatgaaataaaagaggatacaaacaaatggaagagaattccatgctcatgggtaggaagaatcaatattgtgaaaatgcccatactgcccaaggtaatttatagattcaatgccatccccatcaagctaccaatgagtttcttcacagaattggaaaaaactactttaaagttcatatggaaccaaaaaagagcccacattgccaagacaatcctaagccaaaagaacaaagctggaggcttcacgctacctcacttcaaactatactacaaggctacagtaaccaaaacagcatgcccgtctttcaaaacaaaagactataatttcatcaaagctgtttgctttgcccttggtcggcttctcagaataatcacctctacagtctgcaacgtgtcttggaaatgtgggctttcccggggttgtaaagcgttacagctactgctagaaggaggcttttcagggcatgccattctgcacatggtttctgagacttttaaatcggagagggagctcaaagaccacgaaatcatacctgttaactttacaggtgaggaaaggaaggctcagaggcactgtggggagccgctgaaagattttaaacagggatgggccaacggggctctctggtctgcggcttcattcctgaagtcagtgagaccacgaacctactggaaggaagaaactccagacacatctgaacatctgaagaaaccaactccagacacatcatctttaagaactgtaacactcactgtgaggttccgcggcttcattcttgaagtcagcgagaccaagaacccaccagaaggaaccaattccagacacattttggcaaccacaaagggactattgactatcgccaagtggaggaaaactagcgtttctgctgctgcgtcagtgagcgcaactattccgatcagcagggtccagggaccgttgcgggttcttgggcaagaggtgtttctgctgcttcatcgcctccctatagctccccttcctattaatgataagcctcctctaatcttccccacccagaaggaaataaacaaagacatctccaagggagcacaacctctcccccacccctgctatcggttatgtccttttcaagctgtatggggaggggaatttggcccaacccgggtacatgtccccttctccttctctgatttaaagcagatcaaggtagacctgggtaagttttcagatatatcctgataggtatatagatgtcccacagggtccagggcaaaccttcaatctcacctggagagatgtcatgctattgctagatcacaccctggcctttaatgaaaagaatgcggctttagctgcagcccgagagtttggagatacctggtatcttagtcaagtaaatgacagaatgacagccgaagaaagggacaaattcccgactggtcagcaagccatccccagtatggatccccactgggaccttgactcagatcatggggactggagtcgcaaacatccgttgacctgtcttccagaaggactaaagggaattaggaaaaagcccatgaattattcaatgatgtccactataactcagggacaagaagaaaagccttctgccttcctcgagcggctaagagaggccttaagaaaatatactcccctgtcacccgaatcactcgagggtcaattgattctaaaagataagtttattacccagtcagctgcagatatcaggagacagctccaaaagcaagccctgggccctgaacaaaatttggaggtattatcaaaacctggcaacctcagtgttctataatagggaccaagaggaacaggcccaaaaggaaaagtgagattggagaaaggccgcagccttagttatggccctcagactaacaaaccttagtggttcagagaggacagaacatgaagcaggccaatcacctggtaaggcttgttatcagtgtggtttactgggacactttaaaaaagattgtccaatgagaaacaagctgccccctcgtccgtgtccactatgctgaggcaatcactggaaggtgcactgccccagaggatgaaggttccctgggtcagaagcccccagccagacgatccaacaacaggactgagggtgcctggggcaagcgccagctcatgtcatcaccctcactgagccccgggtatgtttaactattgagggccaggaaattgacttcctcctggacactggcgcggccttctcagtgttaatctcctgtcctggacgactctcctcaacctccgttaccatccaaggaatcctgggacagcctgtaaccaggtatttctcccacctcctcagttgtaattgggagactttgctcttttcacatgcctttcttcttatgcctgaaagacccacagggttattagggagggatatattagccaaggctggagctattatctacatgaatatggggaacaagttacccatttgttgtccccctacttgtggagggaatcaaccctgaagtctgggcattggaaggacaatttggaagggcaaaaaatgcccgcccattacaaatcaggttaaaagatcccaccacatttccttatcaaaggcaatatcccttaaggcctgaagctcataaaggattacaggatattgttaaacatgtaaaagctcaaggcttagtaaagaaatgcagcagtccctgcaacaccccaattctaggagtacaaaaaccgaacggtcagtggagtctagtgcaagatcttagactcatcagtgaggcagtaattcctctatatccagttgtacccaacccctataccctgctctctcaaataccagaggaagcagaatggtcatgggctctgaccttcaaggatgccttcttctgtattcccctgcattctgactcccagttcctctttgcctttgaggatcccacagaccacacgtcccaacttacagggacggtcttgccccaagggtttagggatagccctcatctatttggtcaggcactggcccaagatctaggccacttctcaaatccaggcactctggtccttcaatatgtggatgatttacttttggctactagttcagaagcctcgtgcgagcaggctactccagatctcttgaactttctaactaatcaagggtacaaggtgtctaggttgaaggcccagctttgcctacaggaggtcaaatatctaggcctaatcttagccagagggaccagggccctcagcaaggaatgaatacagcctatactggcttatcctcaccctaagacattaaaacagttgcgggggttccttgaaatcactggcttttgctgactatggatcccaggatacagcaagatagccaggcccctctatactctaatcaaggagacccagagggcaaatactcatctagttgagtgggaaccagaggcagaaacaaccttcaaaaccttaaagcaggctctagtacaagctccagctttaagccttcccacaggacagaatttctctttatatgtcagagagagagccaggatagctcttggagtcctcactcaaactcatgggacaaccccacaaccagtggcatacctaagtaaggaaattgatgtagtagcaaaaggctggcctcactgtttaagggtagttgcagcagtggccgtcttagcatcagaggctatcaaaataatacaaggaaaggatctcactgtctagactacttatgatgtaaatggcatactaggtgccaaaggaagtttatggctatcagacaactgcctacttagataccaggcactactccttgagggaccagtgcttcaaatatgcacatgcatggccctcaaccctgccacttttctcccagaggatggggaaccaatcaagcatgactgccaacaaattatagtccagacttatgccgcccgagatgatctcttagaagtccccttaactaatcctgaccttaacctatatactgatggaagttcatttgtggagaatgggatacgaaggttagtgatgtaaccatacttgaaagcaagcctcttcccccagggaccagtgcccagttagcggaactagtggcacttacctgggccttagaactgggaaagggaaaaagaataaatgtgtatacagatagcaagtatgcttatctaatcctacatgcccatgctgcaatatggaaagagagggagttcctaacctctgtaggaacccccattaaataccacaaggaaattatagagttattgcacgcaatgcaaaaacacaaagaggtgggaatcttacactgacaaagccatcagaataggaaggagaggggagaacagcagcataagcagctggcagaggcagcagaaaggaaagaaagagacaggaagtcaaagaaagagacagagaggaagagacaagaagttagagagaaagagggacagacacagaagtcaaagagagggtaaaaaagagaggaagagacaaagaagaagtcaaagagagagatggaagtagtaaagaaaaaacagtgtacctattcctttaaaagccagggtaaatttctctctacccacgcaaggcaattctctattggatctcaacccatatctgcctctcaaacagttgaagaaataatgaaatctatccttactttacaatcccaaataagactctttggcagcagtgactctccaaaaccgctgaggcctagatctcctcactgctgaaaaaggaggactctgcaccttcttaggggaagagtgttgtttttacactaaccagtcagggatagcatgagatgccacccagcgtttacaggaaaaggcttctgaaatcagacaacgcctttcaaactcttataccaacctctggagttgggcaacatggcttctcccctttctaggtcccatggcagccatcttgctattactcaccctcaggccctgtatttttaacctacttgtcaaatttgtttcctctagaatcgaggccatcaagctacagatggtcttacaaatggaaccttcaatgagctcaactaacaacttctaccgaggacccctggaccgacccgctggccctttcactggcctaaagagttcccctctggaggacactacaactgcaaagccccttcttcgcccctatccagcaggaagtagctagagcagtcatcggccaaattcccaacagcagttgggggtgtcctgttgattgaggggtgacagcatgctggcagtcctcacagccctcactcgctcgctcactctcggcaactcctcttgcctgggggtcccacttttggcagcattttaggagccccttcagctctgtatctaggctactctgatgggtccttggagaacctttatgtctagctcagggattgtaaatacaccaatcagcaccctgtgtctagctcagggtttgtgaatgcaccaatggacactctgtatctagctactctggtggggccttggagaacctttgtgtcaacactctgtatctaactaacctggtggggatgtggagaacctttgtgtctagctcagggatgtaaacgcaccaatcagtgccctgtcaaaccactcggctctaccaatcagcaggatgtgggtggggccagataagagaataaaagcaggctgcccgagccagcagtggc

SEQ ID NO: 136615 - DNA, 4443 bp, Homo sapiens
  misc_feature (1)...(4443): n = a,t,c or g
atttggtatcaagaagccaaatatccttccttcttactgtattcctcacaacactgtggaagagatctgtgaaattgttctgttgcaaaagggctatgatcagccacccaattttgtgcttgaaacccagaaccctgttggcgtaggcactgagagaatctcctggtctgcgggttgcaaagaccatgggaaaagcgcaatatctgggccagaagtcactgttcctcatggcacagcccctcatggcttcccttggctaggggagggaaataccctgaccgcttgtgcttcccaggtgagaatgcaggaagatgcagctctcctaaacaaaagaataagcactcagcctgggctcacagcacttcctgagaatccaaacactacacttccaccttttcaagatacaccttgtgagttgcaaccgaggattgacccatctcttggtcaacaggtgaaggatggcctcgttgtgggtggcccaggtgatgcttccgtagatgccatttacaaagcagttgtcgatgcagccagcaaaggaatgcaggttgtcatcaccactgcagtcaacagtacaactcagatcagccccattccagctctgagtgccatgagtgccttcactgcctcaattggtgacccattaaatctctccagtgctgtcagtgcggtcattcatggacggaacatgggaggtgttgatcatgatggtaggctgaggaattcaagaggggctcggctgcccaagaatctagaccatgggaaaaatgtgaacgaaggagatgggtttgaatatttcaagtcagcaagttgccacacatccaaaaaacagtggggacggggagcaaaggccccaggagggaggccggataaccagggttggaaggtacggagggaatttttaggatcatccaggccatatccacagtagtccttgtcatgaaaggcccaacaatgtctctacactgccatttctgcctggggaacagcacccaatactgttaccaccaagaaactgtccaggggataaaattctagaggaaaatttcaggtataataactacaaaagaactatgatgagttttaaggagagactagagaacactgtggaaagatgtgcacacataaatgggaatagacctcgacagagtcggggatttggagagctgctaagcactgcaaagcaagacctggtcctagaggagcagtctccaagttcctcaaatagtttggaaaattctctggtcaaagactacatccattacaatggagactttaatgccaaaagcgttaatgggtgtgtgcctagcccttcagatgctaaaagcattagtagtgaagatgacctaaggaacccagactccccctcttcaaatgaattgatacattatagaccaaggacgttcaatgttggcgacttggtctggggccaaatcaaaggactgacttcctggcctggaaaattagtaagagaagacgacgttcacaattcatgtcaacaaagccccgaggaagggaaggtggagcccgagaagttgaagacactaacagaaggtttggaagcctacagccgtgtccggaaaaggaacagaaatggtattaaggttccacccaggtcaccaaggtcaacaatagggtccccaaggccatcaatgccatcaagcccttctaccaagtccgatggacatcatcagtacaaggatatccctaacccattaattgctggaataagtaatgtactaaataccccaagcagtgcagcttttcctactgcatctgccggaagtagttctgtaaagagtcagcctggtttgctgggaatgcctttaaatcagatcttgaaccagcacaatgctgcctcctttccagcaagtagtttactctcagcagcagccaaagcacagctaggcaaatcaaaacaaacttgctggtaacaacagtaggcagcagtagcaattctgggagctgttgccggcagtggcaacactggaagggacataggcactttgaaacaccatgtttccctcctactggncaacatggcttctcccaacaggtgaagggcaaagtggtcgagcagcactaagagataagctgatgtctcagcaaaaagacgcattgcggaaaagaaaacaaccacctacgacagtgttgagtttgctcagacagtctcaaatggatagttctgcagttcctaaacctggacctgacttgctaaggaagcagggtcagggttcatttcccatcagttcaatgtctcagttactacagtctatgagttgtcaaagctctcacttgagtagcaatagtaccccgggttgtggggcctcaaatactgctttgccttgctctgctaaccagctgcattttacagatcccagtatgaactctagtgttcttcagaacatacctttaagaggggaagccgtgcactgccacaatgcaaacactaactttgttcacagtaacagtccagtccccaaccaccatcttgcaggtttaataaatcagattcaggctagcgggaactgtgggatgctcagtcagtcgggcatggctttaggaaattccttacatcccaatccacctcagtcaagaatttcaacgtcctccactccagtgataccaaacagcattgttagcagctataatcaaacaagttctgaagcaggcggttcaggaccatcatcctccatagccatagcgggcaccaaccaccctgccatcacaaagacaacatctgttcttcaagatggcgtcatagtcaccactgcagctggaaacccactgcagagtcagctacccattgggagtgattttccttttgttggccaggagcacgcacttcattttccatccaacagcacttcaaacaaccatcttccacaccccttgaaccccagcctcctcagttctctacctatctctttgccagtgaatcaacagcatctcctaaaccagaatctattaaatatcctccagccttcagcaggagaaggcaagtctgagatcaacctccaccctttaggttttctcaacccgaatgtaaacgctgctttagcttttctctccagtgacatggatgggcaggtattgcagcctgttcactttcagctcttagcagccttgcttcagaaccaagcccaagcagctgccatgcttcccctgccatctttcaatctgaccatctcagatcttttgcaacagcaaaatacccctttaccctcattaacacagatgacagccccaccagaccatttgccaagcaatcagtcagacaacagccgagctgagacccttttaaccagccccctggggaaccctttaccaagctttgcaggcagtgacactacttttaaccccctgttcctcccagctgtcaatggggcctcaggattaatgaccttgaatccccagctgttgggaggtgtcctgaactcggcatcggccaacaccgctaatcatccagaggtttccatagcaacctcctcccaggcaaccactaccacaaccactacatcatcagcagtggcagcactgactgtctcaacacttggtgggacagcagtggtgtcaatggcagaaacattgctgaatatatctaataatgctgggaatacacctggtccagctaaactcaacagtaactctgtggtgccacagctacttaaccctctactggggacaggtctacttggtgatatgtcatcaataaacaatactttgagtaaccatcaactgactcatctacagtcgctgttaaacaacaatcagatgtttcctccaaatcagcaacagcagcaacttctccaggggtaccagaatctccaggcgttccaaggacagtccacaattccttgcccagctaacaataaccccatggcttgtctgtttcagaactttcagatacaaacaccgcggtgttatggaggaggatacaccacccacgcacgttgtgaaggtccagcaggaggactcggaggaagcttccgtgctgtgggacactctggaatctgggccagatcaccaagaactgttccccagccagaagcacctgaacactctcagctcttccacacggaactgcaggataaagcaactctgatttttccagagaggcacatggaaatgagcttcaggtgtctgtggttgactctgaagaaagggagtggaaatgaagctccccttaccctgagaaggaggccgacagccgtccatggaggagaagctgccttcccccacggccacatctcccttcaggaaggtgagctactccaagtgcccatgtccttccaagggaagaaaccagtggctcccacgcatgggcctcatgggaacctcaccccacccccggcatcccagctgtggtttctcccaccagacctctttctgcagcccaggagagacactgacttgggaacctccaaggcttccacatactactga

SEQ ID NO: 136616 - DNA, 501 bp, Homo sapiens
cgccttcctcgcgcgctgtgtgtgcacgctgcaaagaccagcaagctctctggaccttggagcaggcctgccgccttcatgtccactctcctcatcaatcagccccagtatgcgtggctgaaagagctggggctccgcgaggaaaacgagggcgtgtataatggaagctggggaggccggggagaggttattacgacctattgccctgctaacaacgagccaatagcaagagtccgacaggccagtgtggcagactatgaagaaactgtaaagaaagcaagagaagcatggaaaatctgggcagatgtgtctttggagatggggaaaatcttagtggaaggtgtgggtgaagttcaggagtatgtggatatctgtgactatgctgttggtttatcaaggatgattggaggacctatcttgccttctgaaagatctggccatgcactgattgagcagtggaatcccgtaggcctggttggaatcatcacggcattcaatttc

SEQ ID NO: 136617 - DNA, 2276 bp, Homo sapiens
tttttttttttttttttagtaactatggcctatgttggacaaatttaatttggatttttaaaaaaggaatctcttgatttaatcagggctttggggtcatagggggattagtcactgtcacagtcataataatgcatttattcagggaaaacttttatttttctttgtcttctccaaaaacaagctgctggaacaccctcaaattaaggggatgttcatctaaaaacacctttactgaaacttgatttccttggggcccagagggaaggtctttaactgtagttgaatagtaccaagtagaccttcctcatgtactgtttccccagcatcactgcccagactcccttgccaccaccaagtgtgctttttctcctccaaagggcacctcccaatctcaggccccacttggttgggaatggttgacattttacaatggccacaggtctgagtccctttaaggtccaaggccagcgaaaagattctgcccccagatctttgggtaaagaatgctaacttgaaagtcccctgttttacttccattattcccatgcaaagacctcttcttcattcttgaagtttaaagacatagagaatcgggagcaaaagtctctgtgtgtgcaatggacgcatcgtggtcgagtactggtaacattggtcggttctacataaatttccagggcgatccataaccttgcccccatagacccactgtgccaacctttctttctttgcttcttccactgctccaagaaacatgctcaactgcctgccttggtgtgaaatggccccatagagaacattagggtccccatgggttccccaactcgggatcttgtgccataggccctttttaaagtctgtttaaaaacctcatcatggatgctttccatgtaataaaacagtcgccctcgcaagtggtacacctctggcccagctgttccccacagcaagcgaagagagctgatggaacaactaagctgaggtctgcatcttcaaaggcaataatggcattgtttcctccaagttccaacagacttctccaattttgatagtgtcttcccaaacctctcctgcaccatcaggcccacctgttttcccacctgagtgctcccagtgaaggacagcaggttcactcgttcatctttggccattgctgtgccaatatctgctccaccacaagtcaaggaacaaattgcaccaggcagctttgttgtccttccagaaccttggctattatctttgtgacagccacactaatgagggaagtggttggagctcctttccagaggcagacatttccacagatcatggcgatggcgttgttccaaccatacactgccacagggaaattgaatgccgtgatgattccaaccaggcctacgggattccactgctcaatcagtgcatggccagatctttcagaaggcaagataggtcctccaatcatccttgataaaccaacagcatagtcacagatatccacatactcctgaacttcacccacaccttccagtaagattttcccccaatcttccaaaggacaccaaggtttcctaagtaacttggaatcttcttcccgcaaggcatcggccaatctgtcttactaatttctccttcggttttggagcagggaatatctgcccagattttccatgcttctcttgctttctttacagtttcttcatagtctgccacacatggcctgtcggactcttgctattggctcgttgttagcagggcaataggtcgtaataacctctccccggcctccccagcttccattatacacgccctcgttttcctcgcggagccccagctctttcagccacgcatactggggctgattgatgaggagagtggacatgaaggcggcaggcctgctgcaaagaccagaaagctctctggaccttggagcaggcctgccgccttcatgtccactctcctcatcaatcagccccagtatgcgtggctgaaagagctggggctccgcgaggaaaacgagggcgtgtataatggaagctggggaggccggggagaggtacgcgggcgctcaagaaatctctgcagccgccggggctcgctcgaggaggccgggcgggcactgacctaccgactccccgctggcgctggatgcggtagtagcatgggagattttgaagctccacagtaaaagttttctcgtgtagggtgcctttaaaacaaaaacttagattttaggtccttgtgtgctatgcagaatcgacgtcattttggagctgtaggggctaaacttcccg

SEQ ID NO: 136618 - DNA, 1434 bp, Homo sapiens; identical to SEQ ID NO: 132395
  misc_feature (1)...(1434): n = a,t,c or g

SEQ ID NO: 136619 - DNA, 1185 bp, Homo sapiens
atggtgaactctgacgaaccagcgaaacagttgctgtgtcagggtatggtgctggcagatgccttctactatgttggcgaaaacggcgaacgtaactgggtttccccggttgatgctatcgttgaacgtgacgagaaaggccgtatcgtgaaagcgaaagatgcggcaggccatgaactggtttataccggcatgagcaaaatgtccaagtcgaagaacaacggtatcgacccgcaggtgatggttgaacgttacggcgcggacaccgttcgtctgtttatgatgtttgcttctccggctgatatgactctcgaatggcaggaatccggtgtggaaggggctaaccgcttcctgaaacgtgtctggaaactggtttacgagcacacagcaaaaggtgatgttgcggcactgaacgttgatgcgctgactgaaaatcagaaagcgctgcgtcgcgatgtgcataaaacgatcgctaaagtgaccgatgatatcgggccacggtcaatgctgacttggaaaattcgcgggattcctgcggacttagaagaccgccgcgtagagataactggcccggtagagcgcaagatggtgatcaacgcgctcaacgccaatgtgaaagtctttatggccgatttcgaagattcactggcactcagagctggaacaaaagccgccggagtcggtgaggatcggccccttccactgcataaaatcgtgcagatcgccgtgcagtttcatgatttcctggcccgggcgcagccacagcacatcgccaagcgggctgaacccgggccggacccggcactgacctccacatgtgggctccgctcgccgcacccacacggcgccactgaccgtatccgaggcgaggaccgacgcgccgcggcgaccgcgaaacccgcggcagccggcggcaacgccaccgagggcagcgcgtccggggcgcgagccaggcgcgcgatcgagcggaaagcgccgggccggcacgccgcgacggagacggccgacgacgcggcggccgcccccgaccagcggctcggggagggccaaggcacaccggattactgcttcatcgtcataggcagtattctcatgtcgtcgttgggcatcgatctatctggacaaaacacaaccgtcctgcatctgcagagagattctgtggtatttgacgactgtcggcagtga

SEQ ID NO: 136620 - DNA, 2452 bp, Homo sapiens
ggccaagcttgccatgcctccagttcgcctttaaaaggatcaaggggttcaccgcccaattttgaaattctttatggccccattttcgaagattcactggccccagattgaccaaaagtgatcgccgggcaaaattaccctgcgtgatgcggttaccggccccatcagttcccccaatgaagcaggcaaaatttaccagctcaagcccaatccagcggttttgatttgtcgggtacgcggtctgcacttgccggaaaaacatgtcacctggcgtggtgaggcaatccccggcagcctgtttgattttgcgctctatttcttccacaactatcaggcactgttggcaaagggcagtggtccctatttctatctgccgaaaacccagtcctggcaggaagcggcctggtggagcgaagtcttcagctatgcagaagatcgctttaatctgccgcgcggcaccatcaaggcgacgttgctgattgaaacgctgcccgccgtgttccagatggatgaaatccttcacgcgctgcgtgaccatattgttggtctgaactgcggtcgttgggattacatcttcagctatatcaaaacgttgaaaaactatcccgatcgcgtcctgccagacagacaggcagtgacgatggataaaccattcctgaatgcttactcacgcctgttgattaaaacctgccataaacgcggtgcttttgcgatgggcggcatggcggcgtttattccgagcaaagatgaagagcacaataaccaggtgctcaacaaagtaaaagcggataaatcgctggaagccaataacggtcacgatggcacatggatcgctcacccaggccttgcggacacggcaatggcggtattcaacgacattctcggctcccggaaaaatcagcttgaagtgatgcgcgaacaacacgcgccgattactgccgatcagctgctggcaccttgtgatggtgaacgcaccgaaagaaaattcaatgcattaatggaaagtgaaaaaggacagagccagaacttgtggaaatttgccgtttactcaggacttcgtcacggggaactggcagctctggcgtgggaggatgtggatctcgaaaagggaatagtgaatgtcagaagaaacctgacgatacttgatatgttcggtcccccaaaaacaaatgccgggatccgaacagtaacactactgcagcctgctcttgaagcactgaaggagcaatacaaactgaccgggcatcatcgcaaaagcgaaatcaccttttatcatcgggagtacggcagaaccgaaaagcaaaaactgcattttgttttcatgcccagggtgtgtaacggaaaacaaaaaccttattactcggtaagcagtttgggggcaaggtggaatgcagcagtaaaacgtgctggtattcgccgccgtaatccgtaccatacgcggcatacttttgcctgctggctgttgacggcaggagcgaacccggcatttatagccagccaaatggggcatgagactgcgcagatggtgtatgaaatctacgggatgtggattgatgacatgagcgacgaacagatagccatgttgaatgcgcgggttatggtttatgacgtggcttccggcaacgcgttatttatttctgaactcggtccgttaccggaaaatgttacctggttatcgccggaaggggagtttcagaagtggaacggcacagcctgggtgaaggatacggaagcagaaaaactgttccggatccgggaggcggaagaaacaaaaaacaacctgatgcaggtagccagtgagcatattgcgccgcttcaggatgctgcagatctggaaattgcaacggaggaagaaatctcgttgctggaagcatggaaaaagtatcggagcatcccactgtgctctaaggtggttacaatgatgtttgatgaccgccctggatgcccagtgggatttccaatgtggggaagaggtggttttgacagaatgcctcctggttggggtgggcgtcccatgcctccatctagaagagatatgagccctcatcgaggaccacctcctcctcttactggacgaggtggccggggtggtagcagagctcggaatcttcctcttcctccaccaccaccacctataggggaagacctaatggcctatgacagaagagggagacctggagactgttactatggcatggttggtttcagtcctgatgaaacttggaactctgcaatagatacatggagcccatcggaatggcagatggcttatgaaccacagggtggctccggatatgattattcctatgcagggattgggggctcatatggagatcttggtggacctattactactgcccaagtcactattcccaaagatttgactggatctattattggcaaacgtggtcagcggattaaacaaatgctcatgagttggcagctttcataa

SEQ ID NO: 136621 - DNA, 2181 bp, Homo sapiens
atgattcccaacgttcaaggacccatgaggggactagaaggtccaaactatatctttatcaaaatttctaaaaatcggcgctatacgatggcagttacctccgtggggttagcttcctcgttgtgccgggtagttcgcccgtgtcgtgcgcccgcgggtgttgtctcccgtggttctccggacgatgagtggctcttttgcccccaagcgcgcattcagcagcagcaagatattgatacggaacgttgcctgattttatttcggaaacagcttccattcgcgatgctattggaaaattcgcgggattcctgcggacttagaagaccgccgcgtagaataactggcccggtagagcgcaagatggtgatcaacgcgctcaacgccattctttatggccgatttcgaagattcactggcaccagactggacaaagtgatcgacgggcaaattaacctgcgtgatgcggttaacggcacatcagttacaccaatgaagcaggcaaaatttaccagctcaagcccaatcagcggttttgatttgtcgggtacgcggtctgcacttgccggaaaaacattcacctggcgtggtgaggcaatccccggcagcctgtttgatttagcgcttatttcttccacaactatcaggcactgttggcaaagggcagtggtcccttttctatctgccgaaaacccagtcctggcaggaagcggcctggtggagcaagtcttcagctatgcagaagatcgctttaatctgccgcgcggcaccataaggcgacgttgctggattgaacgctggccggcgggttccagatggttgatccttcagcgctgggtggctgaactgggccgtgggatcatctacggtatatcaaagttgaaaatatcccgaaggtcggcgaagaaggagacgcggaaaccaccggagggacagcggtataaccgtcgccgcgggagaaagacgacacagaacaccgaaaagcacaccatggcgaaaaagagacgcgaagcagcggaacccccagaagggaaaaccccacgagtcagaacaagtctccttacctctggcctgtctgtgggtatagtctgtgagccttttaatcggcatcactttccgcctcatgtacattcttcgtctagcactgctcggtccccctttaccctattcgccctctctccagaccgccttcgtaactggcttaatttattcattaagtaccgctccccaagtcagttgtccccttggtttttccttatttatttcccgcccctccttaccagcgtaagtcacaagtttctggccacttcgggtagctgccaaataagcttaagtaatattcagccattgggtaataactataaccagtacatacgatgtcgacagcggtgccgcttcctctacgcgccagctccctttcgtgtcgcagtacctgccggcacggcattacgcattggggcgtatacgacggtcatataccaattcgttgccgccggtttccgcaccttcaccatctcctcatggcggggcaagcctcccgtgccttgtctactgggcggtaacgtcggtgtgcacaagtttcaagtatgtcccccggcccccctcaagcatctactcgggtgcacactctctctggtgtccccgccctcggtccgtcgcaaatcaatgtgcctaaccatccggactctcggcaagctccacattcttgacagttctaaatcggcgctatacgatggcagtagtcagttagcagtgcagaaaacatattgtacgccaccctcttctttgtacttctcccgagccccacatttgtactccttttcagtccagccctcccctgcattctggggtcgcggtatcaacccacatattcacctttcttttgctacccgtagccgtcgggcgtggccgtcgttttattcgcctagctatcgccgtcatcttgcgagcagtagccgcggtcgtaggccagcagccgtggccagtgcccatcacctcaataacaaggcccccgcatttggcgtcattgcaagtgcatctctgccagcggtcagtaaaccagcggtttggcgttccctcttttttgtgtactcgcagtttactgttgtttttattactcagcactctgttcgccttcgccggtccgcctgttgtgccgcttctactgtcgttacatccccgtag

SEQ ID NO: 136622 - DNA, 393 bp, Homo sapiens; identical to SEQ ID NO: 134480

SEQ ID NO: 136623 - DNA, 1827 bp, Homo sapiens; identical to SEQ ID NO: 134481
  misc_feature (1)...(1827): n = a,t,c or g

SEQ ID NO: 136624 - DNA, 326 bp, Homo sapiens; identical to SEQ ID NO: 127127
  misc_feature (1)...(326): n = a,t,c or g

SEQ ID NO: 136625 - DNA, 902 bp, Homo sapiens; identical to SEQ ID NO: 134482

SEQ ID NO: 136626 - DNA, 2037 bp, Homo sapiens
atgagcaaactgaaccacaatctctccgaggtgatgagcaaactggagaagcaacattccagtaaagtctttgtggtgaagagactatcaagcagcagcaggcgctctttagtcatttctcccccagttcgaacatctacagtctccagtccacttacctcacctactagtccctctacactttcctcgaagagtaagagtgaatctgtctcagcaactgaagatctggcacctgatgcagcccagggggaagacaattctgagatcaaggagctcttagaagatgaggaaatagggaaggaaggatctgaagcaagctcctctgaggaagaagagcctctactaacctgcaacggcccctcccaggcccagccctctcctatcattgagagtgccaggtcccaggaagaagttccccccagctcccctgctctatcaccaggtggagccctaagcccttcaggacaccctttatcatctgccgcagaagtagtcctccgaacccgcaccgcaggtgatgcacttcaaaaagcctttacagataaagaggaattacttaagcagcaggcatctaaccttcatgagcagaaaaaagctggggtgatatttgaagctgaagaagttatcactcttttaacttctgtgcttaaaacgtcatctgcatcaagaactagtttaagctcacgacatcagtttgctcctggagcgacagtattgtataagggcgataaaagggtgcttaacctggacagtccctcttcgcgcctgcgcacgcaccgccctctcccgaagccccgccccggtcaccgccccgaggctgtcccggacggttgggtccagaggagcctttccttcactggcccgcctgctatgacgatcatgtacagctgcattgctaatggccgagcggtcctagcggagctgacactgactggaggttcttaccaggtacctccggatccacgccaccgcccccacgggttccgcccctcgagggtggtgccccccgagcccgcccctaaggacgcggcgctgcgaggtggtccggaacctgctcgggggacacaagctcccgccccgcgagagatcccgcccccacgagagaccccgcccccgcaagaggccccgccccagcgagaggctggcgtcccggcggctgccgcacttcgaacatctacagtctccagtccacttacctcacctactagtccctctacactttcctcgaagagtaagagtgaatctgtctcagcaactgaagatctggcgcctgatgcagcccagggggaagacaattctgagatcaaggagctcttagaagatgaggaaatagggaaggaaggatctgaagcaagctcctctgaggaagaagagcctctactaacctgcaacggcccctcccaggcccagccctctcctatcattgagagtgccaggagtttatcgatgaagaaaaccacctccggcgacaaccatacgctgagagaccctcactacgttgaagacaaaggccataaataccttgtattcgaagccaacacgggaacagaaaacggataccaaggcgaagaatctttatttaacaaagcgtactacggcggcggcacgaacttggtgcgtaaagaaagccagaagcttcagcagagcgctaaaaaacgcgatgctgagttagcgaacggcgccctcggtatcatagagttaaataatgattacacattgaaaaaagtaatgaagccgctgatcacttcaaacacggtaactgatgaaatcgagcgcgcgaatgttttcaaaatgaacggcaaatggtacttgttcactgattcacgcggttcaaaaatgacgatcgatggtattaactcaaacgatatttacatgcttggttatgtatcaaactctttaaccggcccttacaagccgctgaacaaaacagggcttgtgctgcaaatgggtcttgatccaaacgatgtgacattcacttactctcacttcgcagtgccgcaagccaaaggcaacaatgtggttcaaggggccaactga

SEQ ID NO: 136627 - DNA, 876 bp, Homo sapiens
ctcgaggacaaaacacgcgtgcgcgcggcgggcgagcgcgctcgccgcctcagtcgccagcgccgggcgcagtccgcctttttccggagcagactggccgcggtgctagtcggtagcagcggccgccgcagcggctccgcactggcgaaccgagggcagaaaaaggcggggttgacggctttttggggaaatgagcaaactgaacccaatctctccgaggtgatgagcaaactggagaagcaacattccagtaaagtctttgtggtgaagagactatcaagcagcagcaggcgctctttagtcatttctcccccagttcgaacatctacagtctccagtccacttacctcacctactagtccctctacactttcctcgaagagtaagagtgaatctgtctcagcaactgaagatctggcacctgatgcagcccagggggaagacaattctgagatcaaggagctcttagaagatgaggaaatagggaaggaaggatctgaagcaagctcctctgaggaagaagagcctctactaacctgcaacggcccctcccaggcccagccctctcctatcattgagagtgccaggtcccaggaagaagttccccccagctcccctgctctatcaccaggtggagccctaagcccttcaggacaccctttatcatctgccgcagaagtagtcctccgaacccgcaccgcagtgccgcaagccaaaggcaacaatgtggttatcacaagctacatgacaaacagaggcttcttcgaggataaaaaggcaacatttgcgccaagcttcttaatgaacatcaaaggcaataaaacatccgttgtcaaaaacagcatcctggagcaaggacagctgacagtcaactaa

SEQ ID NO: 136628 - DNA, 1893 bp, Homo sapiens; identical to SEQ ID NO: 134484

SEQ ID NO: 136629 - DNA, 1497 bp, Homo sapiens
  misc_feature (1)...(1497): n = a,t,c or g
actatcggtcttcccacgcgtccggaactttacaacacaggcagaatgccacagctgttcaaggtcctgaagaacttccttattgcagggggaggggtgcatgaaagttcaaaaagagcgtcataaaccctgcagtttatctactattagcgagtggtacggccatgaggagctgaaggccatcgtatggaataatgatctcctttgggaagactacgaggagaaactggctgaccaggctgtaaggaccatggaaatctatgttgcccagttcagtgaaattaaggagagaattgccaagcggggtcggaaactcgtggactatgacagtgcccgacaccacctggaggcagtgcagaatgccacgaagaaagatgaggccaagactgccaaggcagaggaagagttcaacaaagcccagactgtgtttgaagatctgaaccaagaactactagaggagctgcctattctttataatagtcgtattggctgctatgtgaccatcttccaaaacatttccaacttgagggatgtcttctacagggaaatgagcaagctgaaccacaatctctacgaggtgatgagcaaactggagaagcaacattccaataaagtctttgtggtgaagggactgtcaagtccctctacactttccttgaagagtgagagtgaatctgtctcagcaactgaagatctggcacctgatgcagcccaaggggaagacaattctgagatcaaggagctcttagaagaggaggaaatagagaaggaaggatctgaagcaagctcctctgaggaagatgagcctctaccagcctgcaatggccccgcccaggcccagccctctcctaccactgaaagggccaagtcccaggaggaagttctccccagctccacaactccatcaccaggcggagccctgagcccttcagggcagccttcatcatctgccacagaagtagtcctccgaacccgcaccgcaagtgaaggatctgaacaaccaaagaagagagcctctatccagaggacctcagcaccccctaaaccaccagagaagccagtaagaactcctgaggccaaagaaaatgaaaacatccacaatcagaaccctgaagaactttgtacttcccccaccttaatgacatctcaggttgcttcagagcctggagaggcaaagaagatggaagacaaggaaaaggataataagcttatctcagctaactcctcggagaagtatatctttcagaggccttcagtcttgattcacatgaagcactgagggccctaacagagcaagatgtaaaacttgnnnnnnnnnnnnnnnnnnnnnnnnnnnnnnnnnnnnnnnnnnnnnnnnnnnnnnnnnnnnnnnnnncccagatgcattataaatcatattttctctcaggcagaattatggacatgtcacatgtaaagatggggccaagaccagcttcaagtctccatggtaccagaaaacaacaacctcacagcacc

SEQ ID NO: 136630 - DNA, 2111 bp, Homo sapiens
atgccgggagcccgcacttcctcctcgggggcctcagaaaaccacagggcgcggggccagggcggcggcccccagggagttggcaggatggcagagggcaaggcaggcggcgcggccggcctcttcgccaagcaggtgcagaagaagtttagcagggcccaggagaaggcgctgtagaaattggggaaagctgttgaaaccaaagatgaacgatttgaacaaagcgctagcaacttctaccaacaacaggcagaaggccacaagctgtacaaggacctgaagaacttccttagtgcagtcaaagtgatgcatgaaagttcaaaaagagtgtcagaaaccctgcaggagatctacagcagcgagtgggacggtcatgaggagctgaaggccatcgtatggaataatgatctcctttgggaagactacgaggagaaacttgtctgaccaggctgtaaggaccatggaaatctatgttgcccagttcagtgaaattaaggagaagaattgccaagcggggtcggaaactcgtggactatgacagtgcccgacaccacctggaggcagtgcagaatgccaagaagaaagatgaggccaagactgccaaggcagaggaagagttcaacaaagcccagactgtgtttgaagatctgaaccaagaactactagaggagctgcctattctttataatagtcgtattggctgctatgtgaccatcttccaaaacatttccaacttgagggatgtcttctacagggaaatgagcaagctgaaccacaatctctacgaggtgatgagcaaactggagaagcaacattccaataaagtctttgtggtgaagggactgtcaagcagcagcaggcgctctttagtcatttctcccccagttcgaacagctacagtctccagtcctcttacctcacctactagtccctctacactttccttgaagagtgagagtgaatctgtctcagcaactgaagatctggcacctgatgcagcccaaggggaagacaattctgagatcaaggagctcttagaagaggaggaaatagagaaggaaggatctgaagcaagctcctctgaggaagatgagcctctaccagcctgcaatggccccgcccaggcccagccctctcctaccactgaaagggccaagttcccaggaggaagttctccccagctccacaactccatcaccaggcggagccctgagcccttcagggcagctttcatcatctgccacagaagtagtcctccgaacccgcaccgcaagtgaaggatctgaggcgaccaaaaaagacagcctctatccagaggacctcagcaccccctaggaggcctcctccacccagagccactgcaagccccaggccctgctcagggaacataccttccagccctacagcctctggaggggggtcagcgcaccagccctagggcctccttggggactgggactgcaagtcctaggacctccctagagatctatacctaatccagaacgcaccagagaagccagtaagaactcctgaggccaaagaaaatgaaaacatccacaatcagaaccctgaagaactttgtacttcccccaccttaatgacatctcaggttgcttcagagcctggagaggcaaagaagatggaagacaaggaaaaggataataagcttatctcagctgactcctcggagggccaagaccagcttcaagtctccatggtaccagaaaacaacaacctcacagcacctgaacctcaagaagaggtatccacaagtgaaaatccacaactctgaagagaaactaccaagactcctcctgccccaaacctcgccagagaagctcttcaaccagagggtataggtcagagagatataagagccagcatccatccctgggttctcagtaggaatgctggtgctgtctaaagacctggcattaatggaggcggaggagcagccttacgggagggatggagggaggcaggctggggagaagagaacattagactcagggaatatttaattctggttttagcattattagaataagactttatacattaactaaagtggagctttaatcactataaaaagcaaaagtatctatagacat

SEQ ID NO: 136631 - DNA, 2568 bp, Homo sapiens
ctactgcgggaacggagcggcgcacagaacgcttcccggcttgcgaacatcagcacgggcggcggttccagctggaacgggcatgagccaacccataaggggagtgacgtccaaagcattgctgccgttgttcgaccgtgaagttgaaggttttggtgaagtgttccggatgttgtcgtttgaagagattggcacttccacgttgcaatctcgtgcggtagcgggcgtcgccaacaaaacgctgattttcgccatgccgggttcgaccaaagcgtgccgtaccgcatgggaaaatatcatcgcgccgcagctggatgcccgtacgcgtccgtgtaatttccatccacatttgaagaaataagtatgtcgcaactgacccatatcaacgccgctggcgaagcgcacatggtggatgtctccgccaaagcggaaaccgtgcgtgaagcgcgggcggaagcctttgtcaccatgcgcagcgagacgctggcgatgattattgatggtcgccaccacaaaggcgacgtatttgccactgcgcgtattgccggtattcaggcggcaaaacgcacctgggatctgatcccgctcatttatgacatgtgcaaagcggtgcaaaaagatatggtgattggtccggtaccgcacaactagcggaccgacgcgatgcagtagttcggcgctgatcttatgcgtttcgctcacgtcagtaatcagcgacttaatcgctttaaacgctttacgataacccggcatgtccatcaggttaagcatcggctgcggtaaggcatcttccggcaatgtctgcgctttttccaccagcgctagcagcgttttaccgtgaaagcggatttcggagcgcatttgcatcaggcggcattcatccagcgccgcaggtagccagccggaggcctccgtttctaccataagcttggcggtgatcggtaacagataccagacattcggcgatgcgtattcccactgacgttccggcagcgggtctggccaggcagtcggtgcgcgattactcttgttccagcgtaacgccggaatactcttcccccatggaaagcgaaagccctgacatcgggcgtccccaaagggcgcaggatttgcgtgtccaagtttgccgcgggtaaacagcggcgcggacactcgagccgggaaaaccgggggccccaccagaccagtgcccacgccggtgtaccggtaaataatacatatctgcagccaccaccgcccagcaacaggcacaaaccggaggcgcacacgccgacacggaaccaggccagacgggtcagggacccgcaacacagcacccacgaggaagaagccgaagacacccgccggaacaccagcccccaccccgcgcgcgccgcaggcccgcgccacacgagacgaacggcgcagcattcgaggcccgaagttcgcccttaattgcgtgtaaacacgagacgcgaactcgtcataaatacgcacggcgcgataaccgaggaacggttttgcctctgcgggaatgttcagataatcaacgggtttgtcgccgccaatgtccatagtgcgcacaataatgctgcgtccgttggcggattccagcgcctgacaaaaaatgttgtacaactcgctttcgcccggtgcgctggtgcgatccatatagagcatttcagtgcggaacaaaccaacgccttccgcaccattgccgaatgcggcctgcgcttccacggagtgagcgatgttagcggcaatttcaatgcggataccgtcagcggtacgggcttgttgggtcagccagacacgctgttgctcacgcagggcgtcctgtacgcgggcttcttgctgataataacgagctacggcttcccctggctcaaccacaatcgccccggcgttgccgtcgatataaatcgtttgttgctgccacggagtaagggcatcaatatccacaccaaccagcgttggaatgttgaacgaacgggcaaggatcaccgtatgtgaggtggtgccgccgcttttgagcaacaatcctttgaggtgatttttatccagttcgaggaactggctgggggtcagttcatcagccatacaaatggcgggctgcgtcagtttgcccggtgccgggaagcgttgctcaccgtagatttgctggagtaactggaagcagacgtcgcgtacgtccagggcacgttcttgcaggtagctgctggtatcgccccattgacgtccaagtttaggtttaggaatggcccatttggcaaactcgctggccggaaacatcggcgtactatcgaaacgcacaccgatgattatcgtatttcgctggaacaaggtacgccgggcttggagccaccgctgaatgcgctgaccgctatcagcaaaaagattggctgcaatggtttcttcccgttccagatccgcccaggcaaaaacgaaaccgatggtcgcatgttctcgcctgcgattggtattgtggaagatccggtgactggcaatgccaatggcccgatgggtgcatggttggtacatcacaacgtattgccccacgatggcaacgtgttgcgtgttaaaggccat

SEQ ID NO: 136632 - DNA, 5955 bp, Homo sapiens
ctatttctcttcgcttttgagattttggttatgaactgtacagctcgttagagatgctgttgtcaaattcagattccattcaatgggacgattaaggcacatcttaatggggctcaaagggcaacttgctgtattctcatcagacacattcagtttctcatcagttttcacttgtagcatgctgcctggaactggaatacagccctttctcttttccttatgcttgtctactaagctctctgatgaggctggaaaaacatcaggaattaaacttatggccagctcatcagaggagcatgcggcatccacaggatactctggttgttttttctcacacggccgggtactcctctgagacaaaacttccagaggaacaatcagacagcagcattcgcggttcacgaaaatctgctgttctgcagccaccgctgctgttacccaggcaaacagggtctggagtggacctctagcaaactccaacagacctgcagctgagggtcctgtcctggctgctttcatgggatggctttgagtgtctgaggcttttccaggtgtatggtgcaagcttttggtggatctaccattctggggtctggaggacgatggccctcttctcacagttccgctaggcagtgccccagtagggactctgtgtgggggctgtgactccacatttcccttctgcactgccctagcagaggttctccatgagggccctgcccctgcagcaatcttttgcctgggcatccaggcgtttccacacatcttctgaaatctaggcagaggttcccaatcctcaattcttgacttctgtgcacccacaggctcaacagcatgtggaagccgccaaggcactggggcttccaccctctgaatcaacagccatgcctttgagacattttccctgttggcttggagattaacgtgtggctcctcattagttatgcaaatttctgtagccagcttgaatttctcctcagaaaatgggtctttcttttctatcaaattgtcaggctgcaaattttccgaacttttatgctctgcttcctttataaaactaaatgcctttaacagcacccaagtttcctcttgaatgctttgctgcttagaaatttcttccgccatataccctaaatcatctttctcaagttcaaagttccataaatctagggatttggaaaaatagtttgccatttgtccactgttgcaagactgtcgtttatgtctttttgttgacatttctgtgatcttccatggtggtctttttcttttgttcaaattgctaagaacttcaaaactatcaggattcttgtcaaagttaacacatttgcttaatttactattgccaagatggtcagcaaattcatcagctgaaggattatttgtgttagcattttctatttctttagattgctttttaaaagaattttgcctagcagaatgagatcttaaagtaaagcgctttgattcttccatatgagtctgatgagtatttccactgtcagtagattcaggagagtaaatgattgtatttagcttaaaagtatttctgtgttcaagacagttgagcttcctcaaaaatattctacagtcttttaaggtttttgacctccaactattaggacatacattttctagtcttggtcccttttgaaagtctttttggctgcaatttgttccattctcttttgcttctgacttaaatttattctcaaaactagcatgtattttgaagtcaggcattactaccctctgctgcaagtcacccctgatctcaggtggcaaaacacactgattatctactatgctttttccttggagtgggatgtcagcatttgtttctccctcagtcttatttaaaaattggttctggcagaaaaatcttaagtttctccttttagagttccagtcaactgttccatggttgtgcagctttccctctcttttccacctttcatgatgcaacctcttaaactcagtcctttttaatctagctattgctaaattacttttcacatttaagagtggagagttagccactttatgcagtatatgcaatttctctgctgattttgaaggagaagagagtgcaaattttttaaagtgctttctgaaggggctggcattaaagtcagaatatttggtccctaatttgattcccctggtatttattacttccaaagggtttcgggcatttgcttttctaactagtgaaagagactgtgtttctgttgtttgcataaaccaagtacagagttcattcaaatcatactttttctgaaaaagcatttttacaggtgaaacttcaagttctaaaagacaagtttccaaagggcttgctactttgaaatgatcattttcaatgtgttctctttttttatgaatacaattttcagcttcatctccacttacttgcacccaagcatttgttatttgctcaaatctattgtttaattcctctaataaggaatcatttgaagcagaagtagcccaccacctgagcaaagggtttgatgaaattataggatccaaggatacttcagaaataggtactaatttattatcttccaaacacttttttgcattccgcgaaagtctgtttcttggggtatctttgtaagctattttcatctttgagtgcctatgtttttccttctgacttttatttttctgcaaatgcagtttatatgatttatggagcagagcgtttctataaataagtgagctagaagatgctaatgaatgtaagaaatgcagagatggttttctatccctaatagaatgtctcaaaggtacagtagcaatcatacgttttgatccatttttaaatatatcagcttcagtgtgccttattttatccatttgagtgcactgttggtcatacttttcttcaggcagattttttcctgacgtattatcctgttctaaaggaggcaagcagctgctaatacttacttctctttcctgaggtgaagttctattaatagtcacagatatgccagagattttcacttttgccggtctaccaggcttcctacttattgccaaaggcttctgatttggtcgaataatgttcttggaaggctgaggtatcacagatttgttcttgatgggtctcacatattcaaagccagaccccaagatctcactttcagtagtcaagcttgctacagcacttattctttcacccaagtcaattttgtcttcactaatatttctgggactattatattcagttggaaaatcaccagcattattgtttaaagacataaggttgcttatgtttacccttccttcagaaacatgccttttagttcttcttgaccttccgtaaataacagttactgtaatactctttttataaataccttcttttacttctgatatgagacattctgggcttttccttccagcactaaagggctcattctggcaaacagtgatgtttgtttgatcaattttaggctttggtggtcttccaattggtcgcttaatctgtttcacaacttggggacctattttttttggtctacctggttttcttttaaaagatggatcagtagcactgcttgaattgtccttaggttcttcttgtggcttatcactatttatatcacctataaacattgtagaggatcctgcagtttcttttgcatgactgaatttgtttagttctctttgaaaagtatcagtatcataatgactggagtgataattttcagagttcgcatttgagatatcctcatttgtttctgttttttcttcagttacgtgatgggttgtaggtttttcagaagggagaacaacatttgaatgggaagtgccaactgaagttaaagtatatttgaccccttcactacttttaacctcagataaaaacatgagtttgataggactagaatagttggaaacagatgaactttcagtaccttcatattttgctggtacattttcaacactggaaatcaagcgacccatatctaaaatagatgactttttcagattttcaagtcttttgttattcaaatccactgtaggcatgcagtgactattgataatattgccggatgctaccacagattttgataagctctgttctttgcatgtcattctatttagagtaagagtcatatttctgtcagcatgttggtctttaccatcaatttctatcaatttcttggatgctttatatccttctgataatggctgattattccaggattttttggctatacttattgtatcttccaaacgcttcacaaccacttgtaaattagaattcattgcaattttgtttaggtctatattgtgtgagctttcaatgtgaatatttttcactggatcgttttttgttgtggattcggatacttttttggctttaggggattttttaaaaacataattatttgttacatatacagaataccaccctggaggcacaatatttcgtttagttctgctcaaaagtccagaaacatcatttctcaaaagagtttgagtattacctaactttggatttttcctatcattttgcaaaaattgttttccatctgcagatttctcctgtggctttcttatgctcattttctcaggggaagttgttttaaagctttctgaaaattcattaaaagacaagttagtttctgaactatgaagaggtagttgcagtgactgtaatgcataatttggtgaaaatgatgtttcagcatgatttttaccttgaagtcttttagaattttgtaaagaaggcccttggtcatgatagaattctcctttgtctgatgaagatatctcattgttttgtgtcaatttccttgaacttttttcggtgtatttttttcttgtaaaattttcatcaagactagcaagttctctttttatctgtaaagactgccttctaaacatgggtgaatcagaggagttgcgcattgcaaataaagtttcttgacgctttcgaaatcttgtctgaataattttattttctacctttttatcatgttgactcaataattccataaaactataatcactggcttttgcattatgcaagagagatgttatgaaatctcccaattttaaatcattatatgtattataatcactgctagataattttacaaggcttgtcatatccgtggtttctattgattttagtttttcattaatgcgatccattaaatcttgaaaaattacagcagtttcacctttttcatgatttgtagtagaattattgctgtcatttgagagtaaagaataagagttactggattttttagttttaagtattttatcttgatgatcactcttattgctgctgatttctgctggtgtgagagatggaggctggttaatgtttgcttcaagtttgttattttctaaggctgaaatctctgagatgacgtctttcaatttttcaaatccttcagtttctataggtgataatggtgggggtgagggacttcgagatctacaggcatctttaagagtgactgaaagatcacatacttcctttgacaaaagaggactacgaaaggctgattttgtagagtgaatgtttggtaacagtccagaacagcacctgtgagaattataactgtctgcaattcctctattcactactggcttaacgtgttcaacagttacagtttggcaagataaacaatgtaaatctttaatacagactggcagaggttctaaaccagggctttgtttttcgttttgtaaacaacctctttctgccagcctatattcacaactacagaacagaccacataaatcatcttcgattaagggcttttgagattctgaagacacaacacatgatgtattacaacagcaaagagaagcagcattctgctcttggactagaaatttcaacatagccaaaacttgttgctggtgatgtatgcacaaagattccaaaactttgtttaatgctgattttcttttttccat

SEQ ID NO: 136633 - DNA, 1128 bp, Homo sapiens
acgtcgattggcagcgcaggactgctgtggcgcaggctgacaaatcagcgcgtgcgtgccacttccactacgccggatatcatcatcatgagcattttgctgatccagtgtctgttggggctaagtaccataccgttttcagcacagtatcctgatggtagcgaaatgatgaagctggtgggttgggcgcaaagcattgtcactttccgtggtggatcgtcagagatgctcaacggcgtagcgttcgtcttccgcctgcatctggtgttgggaatgaccatcttcctgctcttcccgttcacccgactggtgcatgtgtggagcgcgccgtttgagtactttactcgtcgatatcaaattgtgtaccacgtcgatgcttttacctcacaaccgtttcgcggcaattctgccggtgttgttttccccgccgataatcttagcgaagcgcaaatgcagcttatcgcccgcgagttaggccattcggaaactgcttttctgctgcacagcgacgacagcgatgtgcgcatccgctactttacgccaacggttgaagtgccgatttgcggtcacgcgacagtagctgcgcactatgtacgtgcgaaggtgttaggtttaggaaattgcacgatctggcaaacatcgctggcaggaaaacatcgcgtgactatcgaaaagcacaacgatgattatcgtatttcgctggaacaaggtacgccgggctttgagccaccgctggaaggtgaaacacgtgcggcgattatcaacgcgcttcatctcactgaggacgatattctgccaggcttgccaattcaggtggcaacaacaggacactcaaaagtgatgatcccactgaaaccggaagtggatatcgacgccctttcgcctgaccttaatgcgctgaccgctatcagcaaaaagattggctgcaatggtttcttcccgttccagatccgcccaggcaaaaacgaaaccgatggtcgcatgttctcgcctgcgattggtattgtggaagatccggtgactggcaatgccaatggcccgatgggtgcatggtctgtgttccatggcagcaggccgactctagatgatccccctgcgcaaatttatccttattttcagatgatgtaa

SEQ ID NO: 136634 - DNA, 1231 bp, Homo sapiens
atgtgtgccaggggcagcctgtggggctgctattcaggcctggaacgcaagtgcgaggctgctctgccagacagggttgtatcttccaagagcgcctgcggagctgtttctcaggacctgttgcaggcacagggccgtcgcgcaggacctccctcatggctctacgcagatccagtccacacagggacaatagagtgcggaggtcactggtgcctcaatgctgccctcctggacttccagtcaccacagcggttgctgacatacctgcattgtggccttcagaggcccatggagagtgacccaccagagctagcaccaatggtgcaccaccaagaaggaatatatctcaacataagaaaagctatgtatgacaaacccacagctaacaaactgaactgggacaagtcgaatgtctcttctctaattactggaacaagacaagaagagacgactgcaaatgggacaacttttgcaactattcatctgcagttctttatccaaattccggctgttccccggaaaactcttcttaaccgggcagattattacttcccagaacataatccaagtttaacactcgtgataaatcgaagaataaccaagttctcagagcctaactgggaggcaccccctagtaggggcagactgacacctcacacggctgggtactcctctgagacaaaaattccagaggaacgatcagacagcagcattcgtggttcacgaaaatctgctgttctgcagccactgctgctggatagccaggcaaatagggtctggagtggacctcttgcaaactccaacagacctgcagctgagggtcctgtctgttagaaggaaagctaacaaacagaaaggacatccacaccaaaaacccatctgtacattaccatcatcaaagaccaaaagaaagcagttcctcaccagcaacagaacaagctggacagagaatgagtttgacgagttgagagaagaaggcttcagacgatcaaactactccgagctacaagaggaaattcaaaccaaaggcaaagaagttaaaaactttgaaaaaaatttagatgaatgtataactagaataaccaatacagagaagtgcttaaaggagctgatggagctgaaagccaaggctcgacaactacgtgaagaatgcagaagcctcaggagccgatgcgatcaactggaagaaagggtatcagtgatggaagatgaaatgaatgaaatgaagtga

SEQ ID NO: 136635 - DNA, 2528 bp, Homo sapiens
ctagagactgggtgtgcctgccacccgttgcggagcgttggcgagcgtcctggtgttcccttgtgcccttttggctgacgttacccgtttggcgtctgtgcgtgttaggacccgtgttgatttccctggtgtatgcgcgtggctcgtgggggttcccccacgtttgtagacatgacgataaaggtctgcagactgtcgtgcgcgctcactcttgcttggtgaccacgggttttgatatagtaggagggtgggggaagcttcccacaccacctgcatcttacaggatttgctagtacccgccttcgcctgcggaactaacggtttgccgcctccgccaactacagctacgcgatgtgttgtactgtattgcttaccccagtggccctggggtaaaaccgtttcgcggcaattctgccgtgtgttttccccgccgataatcttagcgaagcgcaaatgcagcttatccccgcgagttaggccattcggaaactgcttttctgctgcacagcgacgaagcgatgtgcgcatccgtttacgccaacggttgaagtgccgatttcggtcacgcgacagtagctgcgcactatgtacgtgcgaaggtgttaggttaggaaattgcacgatctggcaaacatcgctggcaggaaaacatcgcgtactatcgaaaagcacaacgatgattatcgtatttcgcttaatgcgctgaccgctatcagcaaaagattggctgcaatggtttcttcccgttccagatccgcccaggcaaaacgaaaccgatggtcgcatgttctcgcctgcgattggtattgtggaagtccggtgactggcaatgccaatggcccgatgggtgcatggttggtacatacaacgtattgccccacgatggcaacgtgttgcgtgtaaggcaataagggcccagggattttggtctttgatgatggcatgtacagatgggtttccggtgtggatgtcctttctgtttgttagcttccttctaacagacaggaccctcagctgcaggtctgttggagtttgcaagggtccactctggaccctgcttgcctgggtatcagcagcagtggctgcagacagcagattttcgtgaaccgcgaatgctgctgtctgatcgttcctctgaatttttgtctcagaggagtacccagccgtgtgaggtgtcagtctgcccaggacagacactacacaattggccgggtcacagacatggccatctggctcgttcctctgctgtactccaacagctgaaaatcgggtcactcccacactaatactgcgctttacaaacgttatatcaggctcggtacctgagatgatgggacaagttgatgagtctcttacaatttgaaagtttgtaactccagacatacgggtccatgtgtattttatacgacccgtaagtccctttgtgtcaaggtcccccgcgacacagtgggggtcaatacggcggaaacagaaaaacagcgctggtacggacaacggaaaatacccctgttgttggggcggtacatcattgagttttgagttcaattgagagtactcctcaggaaacctcccagtttgtttaattggcccataagtgttttcgcaattaggatgtatactattcccccgagtcctctccggtttttcaaacaccttttctgaaaaattgtgcgtgaaagcgaggacgccacctactaggctagggccatggttggcgatttcgcggggttgtggcggggatttcttctcactggtgacgactgacgccaccctcgatctccttgtccctccttgggaggcttgacctttgccgtcgtgctccgctcggcagccgccttgccgcttggcggtcctacgtgtaactagggttgcagaagtccttttccatgagggttctccaaatacctttgtgggaatcgtgagccaatgccgtgccccgcggtttcgccgttgtttcgccgtgttccccgttgttccctttctcttttcttcccctcctctctctcttccctccctcttctcttccctccttttctttccttttccttccttcttttctttctcccttcccccactgcaatcatggcagcgtcttaacttcttcccaagtttgtcgcaaagtcgttcccaaaaagcccaaaaaaacaagcttaacttcttcgagttgaagcatctactagcaccagccctgtatcctccatccaccgcgagcaaaaccagatccgtatcgggacgaagtatttctctgatgtgaaactgccggatgcggcgtaaacgccttatccggccagtcttcccggagggtgaaataatcccgttcagcggtgtctgccagtcggggggaggctgcattatccacgccggaggccgtggtggcttcacgcactgactgacagactgctttgatgtgcggccaccttcttctgtggctcagcgttggtagcccctccgttggtgggccccccccactgtgtgcctccaacatagttagaacgtccgctctctaccgtgggcacgtaaatattcat

SEQ ID NO: 136636 - DNA, 5782 bp, Homo sapiens
  misc_feature (1)...(5782): n = a,t,c or g
cctccggtctacagctcccagcgtgagcgacgcagaagacgggtgatttctgcatttccatctgaggtaccgggttcatctcactagggagtgccagacagtgggcgcaggccagtgggtgcgcgcaccgtgcggagccgaagcagggcgaggcattgcctcacctgggaagcgcaaggggtcagggagttccctttccgagtcaaagaaaggggtgacggacgcacctggaaaatcgggtcactcccacccgaatattgcgcttttcagaccggcttaaaaaacggcgcaccacgagactatatcccacacctggccttcggagggtcctacgcccacggaatctcgctgattgctagcacagcggtctgagatcaaactgcaaggccgcagcaaggctgggggaggggcgcccgccattgcccaggcttgcttaggtaaacaaagcagccggggaagctcgaactgggtgcagcccaccacagctcaaggaggcctgcctgcctctgtaggctccacctctgggggcagggcacagacaaacaaaaagacagcagtaacctctgcagacttaagtgtccctgtctgacagctttgaagagagcagtggttctcccagcgacgcagctggagatctgagaacgggcacattgcctcctcaagtgggtccctgaccccctgaccccctgagcagccttaactgggagggcacccccccagcaggagcacaactgacccctcacacacggcagggtactcccaacagacctgcagctgaggggtcctgtcgtgttagaaggaaaactaacaaacagaaaggacaaccacacccaaaaacccatctgtacattgccatcatcaaagaccaaaagtagataaaaccacaaagatggggaaaaaaacagaacagaaaaactggaaactctaaaacacagagcgcctctactcctccaaaggaacgcagttcctcaccagcaacggaacaaagctggatggagaatgactttgacgagctgagagaagaaggcttcagacgatcaaattactctgagctatgggaggacattcaaaccaaatgcaaagaagttgaaaacattaaaaaaaatttagaaagaatatataacttagaataaccaatacagagaagtgcttaaaggagctgatggagctgaaaaccaaggctcgagaactacgtgaagaatgcagaagcctcaggagccaatgcgatcaactggaagaaagggtatcagcaatggaagatgaaatgaatgaaatgaagcaagaagggaagtttagagaaaaaagaataaaaagaaacgagcaaagcctccaagaaatatgggactatgtgaaaagaccaaatctacgtctgattggtgtacctgaaagtgatgcggagaatggaaccaagttggaaaacactctgcaggatattatccaggagactttccccaatctagcaaggcaggccaacgttcagattcaggaaatacagagaacgccacaaagatactcctcgagaagagcaactccaagacacataattgtcagattcaccaaagttgaaatgaaggaaaaaatgttaagggcagccagagagaaaggtcgagttaccctcaaagggaagcccatcagactaacagcggatctctcggcagaaaccctacaagccagaagagagtgggggccaatattgaacattcttaaagaaaagaattttcaacccagaatttcatatccagccaaactaagcttcataagtgaaggagaaataaaatactttacagacaagcaaatgctgaccgattttgtcaccagcaggcctgccctaaaagagctcctgaaggaagcgctaaacatggaaaggaacaaccggtaccagccactgcaaaatcatgccaaaatgtaaagaccatcgagactaggaagaaactgcatcaactaacgagcaaaatcaccagctaacatcataatgacaggatcaaattcacacataacaatattaactttaaatgtaaatggactaaattctccaattaaaagacacagactggcaagttggataaagagtcaagacccatcagtgtgctgtattcaggaaacccatctcatgtgcagagacacacataggctcaaaataaaaggatggaggaagatctaccaagcaaatggaaaacaaaaaaaggcaggggttgcaatcctagtctctgataaaacagactttaaaccaacaaagatcaaaagagacaaagaaggccattacatgatggtaaagggatcaattcaacaagaggagctaactatcctaaatatgtatgcacccaatacaggagcacccagattcataaagcaagtcctgagtgacctacaaagagacttagactcccacacattaataatgggagactttaacaccccactgtcaacattagacagatcaacgagacagaaagtcaacaaggatacccaggaattgaactcagctctgcaccaagcagacctaatagacatctacagaactctccaccccaaatcaacagaatatacatttttttcagcaccacaccacagctattccaaaattgaccacatacttggaagtgaagctctcctcagcaaatgtaaaagaacagaaattataacaaactatctctcagaccacagtgcaatcaaactagaactcaggattaagaatctcactcaaagccgctcaactacatggaaactgaacaacctgctcctgaatgactactgggtacataacgaaatgaaggcagaaataaagatgttctttgaaaccaacgagaacaaagacacaacataccagaatctctaggacgcattcaaagcagtgtgtagagggaaatttatagcactaaatgcccacaagagaaagcaggaaagatccaaaattgacaccctaacatcacaattaaaagaactagaaaagcaagagcaaacacattcaaaagctagcagaaggcaagaaataactaaaatcagagcagaactgaaggaaatagagacacaaaaaacccttcaaaaaatcaatgaatccaggagctggttttttgaaaggatcaacaaaattgatagaccgctagcaagactaataaagaaaaaaagagagaagaatcaaatagacacaataaaaaatgataaaggggatatcaccaccgatcccacagaaatacaaactaccatcagagaatactacaaacacctctacgcaaataaactagaaaatctagaagaaatggatacattccttgacacatacactctcccaagactaaaccaggaagaagttgaatctctgaatagaccaataacaggagctgaaattgtggcaataatcaatagtttatcaaccaaaaagagtccaggaccagatggattcacagccgaattctaccagaggtacaaggaggaactggtaccattctttctgaaactattccaatcaatagaaaaagagggaatcctccctaactcattttatgaggccagcatcattctgataccaaagccgggcagagacacaaccaaaaaagagaattttagaccaatatccttgatgaacattgatgcaaaaatcctcaataaaatactggcaaaccaaatccagcagcacatcaaaaagcttatccaccatgatcaagtgggcttcatccctgggatgcaaggctggttcaatatacgcaaatcaataaatgtaatccagcatataaacagagccaaagacaaaaaccacatgattgtctcaatagatgcagaaaaagcctttgacaaaattcaacaacccttcatgctaaaaactatcaataaaataggtattgatgggatgtatttcaaaataataagagctatctatgacaaaaccacagccaatatcatactgaatgggcaaaaactggaagcattccctttgaaaaccggcacaagacagggatgccctctctcaccgctcctattcaacatagtgttggaatttctggccagggcaatcaggcaggagaaggaaataaagggtattcaattaggaaaagaggaagtcaaattgtccctgtttgcagatgacatgattgttgatctagaaaaccccatcgtctcagcccaaaatctccttaagctgataagcaacttcagcaaantctcaggatacaaaatcaatgtacaaaaatcacaagcattcctatacaccaacaacagacaaacagagagccaaatcatgagtgaactcccattcacaattgcttcaaagagaataaaatacctaggaatccaacttacaagggatgtgaaggacctcttcaaggagaactacaaaccactgctcaaggaaataaaagaggatacaaaaaaatggaagaacantccatgctcatgggtaggaagaatcaatatcgtgaaaatggccatactgcccaaggtaatttacagattcaatgccatccccatcaagctaccaatgactttcttcacagaattggaaaaaactactttaaagttcatatggaaccaaaaaagagcccgcattgccaagtcaatcctaagccaaaagaacaaagctggaggcatcacactacctgacttcaaactatactacaaggctacagtaaccaaaacagcatggtactggtaccaaaacagagatatagatcaatggaacagaacagagccctcagaaataacgnngcttacctacaactatctgatctttgacaaacctgacaaaaacaagcaatggggaaaggattccctatttaataaatggtgccaggaaaactggctagccacatgtagaaagctgaaactggatcccttccttacaccttatacaaaaattaattcaagatggattaaagacttaaatgttagacctaaaaccataaaaaccttagaagaaaacctaggaaataccattcgggacataggcatgggcaaagacttcatgactaaaacaccaaaagcaatggcaacaaaagccaaaattgacaaatgggatctaattaaactaaagagcttctgcacagcaaaagaaactaccatcagagtgaataggcaacttacagaatgggagaaaatttttgcagtctactcatctgacaaagggctaatatccagaatctacaaagaacacaaacaaatttacaagaaaaaaacaaacaaccccatcagcaactgggcgaaggatatgaacagacacttctcaaaagaagacatttatgcaggcaacagacacatgaaaaaatgctcatcaccactggccatcagagaaatgcaaatcaaaaccacaacaggaccctcagctgcaggtctgttggagtttgctagaggtccactccagaccctgtttgcctgggtatcagcagcagtggctgcagaacagcggattttcgtgaaccgcaaatgctgctgtctgattgttcctctggaagttttgtctcagaggagtacccagccgtgtgagcccgtcggaaaagcgcagtattcacgtgggagtggcccgattttccaggtgccatctgtcacccctttccttgaccaggaaagggaactccctgaccccttgcgcttcccgagtaaggcaatgcctcgccctgcttctgctcgtgcacgggtttctcatgggtgtgttggatctggtaacgtcttagcatggcgagggatgaaatcaggtcccttctgtgggagacggctgctggcagagcaggacctttcaaacctgacgatacaggagacttgtgttaacgcacttcaccctccattactggattga

SEQ ID NO: 136637 - DNA, 429 bp, Homo sapiens; identical to SEQ ID NO: 131489
  misc_feature (1)...(429): n = a,t,c or g

SEQ ID NO: 136638 - DNA, 424 bp, Homo sapiens
cgtttacgcgacaacggatgcccgatgcgacgctggcgcgtcttatcgggcctacaaacggccccgaatcgtaggtcggataaggcgttcacgccgcatccgacaaaccatgctggatcacaacttcgcaaacacccgacgtgcagcatcgatggtgttattgatatcttccatgctgtaaacaccttcgtccagcatcatatggaagaaacgcttaaagcgttccacgtcacaggccatcacatcctgatagcacgtcacggactcggcgtcggtaaagaaaataccgaacatgccgccaacgtggttaacgaccagcggaattccggcttcttctgccgcttccagcagaccttctgccagacgtgttgtcagctcatccagcgtttcgtgaacgcccggctgcgcgacttcatttcttgcg

SEQ ID NO: 136639 - DNA, 417 bp, Homo sapiens
ccgcaggattagaggaagggtggagggtcctaacagaattgggcataggaggtcatgggataaaacatcccttgccccctcctctgaatccaggtcctagccaatggtctggacaacaagctccgtgaagacctggagcgactgaagaagattcgggcccatagagggctgcgtcacttctgggggtgagtggggggtctcatctccctgcctacctcgactcagcattcctcctactcgctcttctttttccccaaccttttgtttctgctgtgcatgacctgtgactcttctctttttacctgcagccttcgtgtccgaggccagcacaccaagaccactggccgccgtggccgcaccgtgggtgtgtccaagaagaaataagtctgtaggccttgtctgttaataaatagttta

SEQ ID NO: 136640 - DNA, 732 bp, Homo sapiens
actaaatactgaagtgccacggcggttgaagtcgccttccagaccgtgaccaaccgcttcatgcaacagcacgcccggccaacctgcgccaagtactaccggcatggtgcccgctggtgcagcaacggcagaaagattgaccagcgccatacgcactgcttcttttgcccatgcatccgcacggacttcgccgtcgagatcggcaaggaagaattcataaccaaaacgaccgccgccgccactggcaccgcgttcgcgtttgccatcttcttcgacgagaacgctcacggaaagacgcaccagcggacggacatccgccgctagcgtgccgtcggtggccgcaaccaaaattaattcatagacaccactgaggctggcagtcacttcctgtacgcgcttgtccgcttcgcggcaaccatcaccactatcacggacgatggtgcgcgccgcttgcgcactctgttccagcgccagcaggctgatttggtcagcgtaagcaaatccggttttttcaccgctgattgcacgcacaccaacgccctgatcgatgttgtaagaaccatctttaataatgcggtcttctaaaacccaggattcgtgatagctcgactgaaaatagagatcgccataatcaaggcgacgttcggccagttgaccgaggatcgcgaacaagtcctgatgtttcaggccgttcgccgctagcaattgttcacttaccaggttaagactcat

SEQ ID NO: 136641 - DNA, 2853 bp, Homo sapiens; identical to SEQ ID NO: 122824

SEQ ID NO: 136642 - DNA, 1191 bp, Homo sapiens
ctagttcaccagcaatggatccaaaccaagaagaaatccctgatttacccgttttgccattcgccgtcccagcgggtcgtagaggtagcggctctcgaccagtggctcgccatgctgtatccgcgtgtagaacaccaggcggtgctggctgtcgtagtggtagtggtgggtccgctcgtcgtccgtccgtatcacacccgccgggatgcggtccgtcttctccgtcagcctgccgtattcatcgtggcggtagacatagtgcgcatcctccgcgatgcggttatccggccacactgtgagtgtactgtccgggtgcagctccgggtccggcagccggttgcccgccgggtccgtggcatacgggatgcggatgtccaggtctggtgcgagggtgcgcacactctccatcctgcccgtggcgctgtagccgtattcccgcgtctgtcgcgggccgctgatgcgcaccaggtcgccgttgtcattccacccgtagtcacggtcatacaccaggctgttcaagtgtgctggctctgtaacgtggcctgcgggggtgtatgtgctggtcagtttatatgcggcattactgcctgccatgctgccgaagctgcgcaccgtctcacggtgcaggcggtcgcgcgtgaactccagcagcggcgtcccgcccagcttcatgcccgcaagatagccgctgccgtaggtcagccactccaccggcggcagactgtccggcgtgacgcggtttgccagcccctgttcgttgtacgcatgtccggtctcatggtgccacagcagttcccccgtctccgggttctccaccgtctggcgttcgccggtcaggcggcctttatcgtcatagccgtagtggaccgacacgcggtggccttcactggtatggtctagctcggtacccaattcggctgtgaatccatctggtcctggactctgtccggttggtaagctattgattattgccacaatttcagctcctgttattggtctatttagagattcaacttcttcctggtttaatcttgggagagtgtatgtgtccaggaatttatccatttcttctagattttctagtttatttgcgtagaggtgtttgtagtattctctgatggtagttcgtatttctgtgggatcggcggtgacatcccctttatcattttttattgcgtctatttgattcat

SEQ ID NO: 136643 - DNA, 918 bp, Homo sapiens
atgagccggacccgtcaatcaaagccgaaccgatccagaacggtcgccagcaacgtggcggcggcggtcgtgggcaaggtggtggtcgcggtcaacagcaaccacgccgtggggaaggtggcgcaaaatctgcaagcgcgaaacctgcagaaaaaccgtctcaccgcctcggcgatgccaaaccggcaggcgaacaacaacgtcgccgccgtccgcgtaaacctgccgctgcgcaaaggtttgctggaagcggcagaagaagccggaattccgctggtcgttaaccacgttgtcggcatgttcggtattttctttaccgacgccgagtccgtgacgtgctatcaggatgtgatggcctgtgacgtggaacgctttaagcgtttcttccatatgatgctggacgaaggtgtttacctggcaccgtcagcgtttgaagcgggctttatgtccgtggcgcacagcatggaagatatcaataacaccatcgatgctgcacgtcggataaaatatggcgcgccgataaaggttgacagcagccccgccgggatctggaatggaaacagcaccatccgcccacaccagtcagcgaacaccagcagtaaaccacccaccagcgccgaaattacgatgtgtggcatcgtccgtcgaaagcccatcatccgcgcaatatgcggtgccattaaaccaacaaaactcaacggtccaatagtcatcgtcgcggtcgccgatttcctggctgctcagcggatttccctcttcaccaatcaacaaactgatttcacgcggcataaattctttaccggttggcagtttggcattaaggaagagcgtttcgccaagtgtcatctcaaacagcgtgcgaacgggcattacgacaaatgcctgttcgtcttcaaccgcctgttgaagtgcttctaa

SEQ ID NO: 136644 - DNA, 1380 bp, Homo sapiens
tttgttgtcagtggggcagttcaggttcttgacggctgcataaaagtatttgagagcgggtccaaagtgaaagtagacggtatacgagccgggaagcttcacgccgctcatccgggtcgagacagagaacggcgagcgggaaaaagcgcagcgcgcagcctggcagagacgctccagcaggaagggagtgagaacggccacggcgtggtgttcccggctgaactggtgcggctgctggacaggctggaggaagaaatccgggcagaccgcagcccacattccacaatccgcgctaccttccaatatacacccatcatcgcgttcggattgctccacatccacagaagtgcacgcggacgtgctctctacaagaaccaatgccgtggcctgatgcgcccattaagcgcgggggttggtatgtgtcgtcggaaagttacggtgctcgtctatggcagagattgcagttctaaggagagaccttcggtcgacactatgcgtaacgagctacggcacctaagcgttgtgagtgtgagtctgttgtatgtcggtgatgttcgtggtgttcgtcgtcgtggtgtttgtgtggtcagagttgcggcgcgtcgtgtcggtgtgctctcactccttcatggttgtcgtggtatgcgtcttcgaccacactactgcacacatctaacgctaggctatcggcagttcatcttgctcaatcgcttgcgacgtttctcgtactgtccagcgagggctggagagtgctcttcctcttctctgtctccaccatctcgaggggcactcctggcgctgtgccagctgcgctcgttctctcgttcgtcggctgtggcgtctgcgtggtcttctcgtcgtcgcgtctcggctgcgcgcgtgttgtcctctcgtggaggtgcagagattgtcttccgtgtctcagttcgcctgtcgcgggtctcttggcgtgcttcgtcagttgtttacttagctgcggtctcgcggtcctcgtcgcgtggcgtgagctgggagtgtggttcgtgtttcgagtgcagctttcgtcgtgtccgagtcgcttcggtcatggtagtttgctcgtgcagtgctctcgcacgcagccttagtcgttcgctttggttgcgcgttgtcgcatgtagagattgtgtcgtcgacgcgcaggtgactcctgcatcaagcttctggtcggctgcgcagcgctcggggtctgcgtcattgctctcgcgttttgagtctagtccacgttcgcgtgctctggcgcaggttgtcgggaggatcacactgttcgctttctgtcgctgtgtttggtcgtgtgttctgatctcacgttcgatgattgggcttgggtggttcactcattctgaggccgcctcttggtga

SEQ ID NO: 136645 - DNA, 1434 bp, Homo sapiens
tcacatgcgaaaacgaaggacgtaaccctgagatgcccgactacgaggagatgaaaacgaccgggattctttaaggaaaaatgcccggaaggacactacgtcgctttccgcgcatttccgtgaagatccacacaggccaaacccgttggaaacaacctgggatagggtggccaggcccttgcacggggcccggcagggagagtagcccctgactgctagcactactgcttctggagggtctccagtgcttctccacacttgtgggccttccagattagggaagacaatcacagttctgggggtgaattttgccatttggctgctgaacacatatggcatatcgccgttggcaatcccacgtttctgcgcatctatagggttgatccacacctcctgacggcaggcagccttcaggagatcaatattgccgtaggtcgagtgagtacgggatttgtcatggaaaccaaacagttgcagtgggaaggttctacgttcaggggagttccagccttcaaaggttgaggcataaactggcaatgggcttatcacttcatctttttccagttcccaggtacgggcaatttccgccagcctgctggaataaatttcaatcttaccggaaggcgttttaagtggatttgcctcggggtcgtcacgaaatgctttgtaggcgacaaaatggccattgggatctttacgcttatagatacccatttttttcagttcgtcgtaagacggtaacgccggatctttggcaagcattttggcgtacagatgttgtaaccattgttcctgcgtgcgaccttctgtgaacttttgatagacgtcaggtccaagacgtttcgcgacttcactcaggatccagtaaatcggtttgcgttcgaattttcggctcaggacgggcagtttccatgcaaagcatccattcgggtgcacggcaaccctggggacattttccccatcgtcttggctattaatatttggatccttgttacttatgcaaatttctgcagcaagcttgaatttctccccagaaaatggggttttcttttctattgcatcttcagtctgcaaactttccaaatttttatgatctgcttcctcttgaatggtttgctgcttagaaatttcttccaccaggtaccctaaatcatctctctcaagttcaaagttccacaggtctctaaggcaggggcagaatgctgccagtctctttgcataacaagagtgacctttactccagttcccaacaagttctttatctttatctgagaccacctcagcctggacttcgttgtccgtatcactataagcattttggccaaagccattcaacaagttctctaggaagttccaaactttcccacatattcctgtcttctgagccctccaagactctaggaagttcccaaatttcccacattttcctgtcat

SEQ ID NO: 136646 - DNA, 4237 bp, Homo sapiens
tcatctcgtccgttcctctgctgtctccttctcctttcgctccgcttgcctgttcgtgttgcttgctgcgttgtcttcgctacgccttgtcccgcttccttgcgtggcgtctctctctcgtctctgcttctctttctcctcgtcttcttccgtcgctgtctctactccccctgtgcttcgtccttctcttttttgtcctgttcttgctcgcgcttgtctcgtctcctccccgttcctgttcgtcttcctccttccctctctcttgcatccttcctcgcttgctctgcgttccgtttttgttctctctcttcctgttccggttcccgccccgcgcgccgctgttcgagcggttgctctgccgtctctctctttctctcgccgtctgtccttgggtggtctgcctccccgcgcgtggtttcgccgtttcttcctctccctctgctcggtcttgttctcggtctcgccgcttctctcccgcctcccgcctcgccgctggtcgtcggctctcgccttgtctgcttcctctgccctccctcggtctcctcggtgttcgcgttttccctgttctggctcagtctctgtcgtcggcgtctgcgtcagctcccgcctcctttgtggcttcgtgcacgggggtgttccggttccccgaatgttaacccgattatcaacccgcccaagagcccaattctgggtatccacgctatcaaagatcgtccgatggcggtgaatggtcaggttgagatcctgccgatgatgtacctggcgctgtcctacgatcaccgtctgatcgatggtcgcgaatccgtgggcttcctggtaacgatcaaagagttgctggaagatccgacgcgtctgctgctggacgtgtagtagtttaagtttcacgcggtgaggggggttgcgagccggtgcggggaggggggggctggtgggcgggtgctgcgtgtcgtgtacggccgtgacaactctatatctccgatttttggactcagttgcctcgcccggttgcagtccggtgctgggtcccctgtttcggtccccgcctgtatccgtcgtgtctctgcggcatccagcgagtttcagttctgtgttccttctggccctcgggaggttccgcgtgccatgtggcttcgccgaggtcacccgaatacgtgtcgtggtatattttccgatctggaccgatagttgctgcgggttcccttccccaatgttaaaggcccacagagtgttgagcgtattcacacagccgccatggtcgattttatcgccagacatattggctttggctggtagccgaacttcgccacgatggttaaacacccgcaccatatcgccgttggcaatcccacgtttctgcgcatctatagggttgatccacacctcctgacggcaggcagccttcaggagatcaatattgccgtaggtcgagtgagtacgggatttgtaatggaaaccaaacagttgcagtgggaaggttctacgttcaggggagttccagccttcaaaggttgaggcataaactggcaatgggcttatcacttcatctttttccagttcccaggtacgggcaatttccgccagcctgctggaataaatttcaatcttaccggaaggcgttttaagtggatttgcctcggggtcgtcacgaaatgctttgtaggcgacaaaatggccattgggatctttacgcttatagatacccatttttttcagttcgtcgtaagacggtaacgccggatctttggcaagccttttggcgtacagatgttgtaaccattgttcctgcgtgcgaccttctgtgaacatctgtactatgtcacaacccccggttatagcccctcctcgttttcctcttcgggttataacgtcatgggtaaagcgccaaaaacggaaacgtaaggcccggccgcgagaagggggcaaccggcacagagtggaatcgaatccgtaagcgcggacccgggggcaacggtgccggacgcgtagcgggccgaaacactcacagttggccggataacccgcatcccggaggatgcgcactatgtctaccgccacgatgaatacggcaggctgacggagaagacggaccgcatcccggcgggtgtgatacggacggacgacgagcggacccaccactaccactacgacagccagcaccgcctggtgttctacacgcggatacagcatggcgagccactggtcgagagccgctacctctacgacccgctgggacggcgaatggcaaaacgggtctggcggcgggagcgtgacctgacggggtggatgtcgctgtcgcgtaaaccggaggtgacgtggtatggctgggacggagacaggctgacgacggtgcagactgacaccacacgtatccagacggtatacgagccgggaagcttcacgccgctcatccgggtcgagacagagaacggcgagcgggaaaaagcgcagcggcgcagcctggcagagacgctccagcaggaagggagtgagaacggccacggcgtggtgttcccggctgaactggtgcggctgctggacaggcccgctgtgccgccggctggctgaccattttaccgctgggtggtgataccgcccgagccgtaggaatggcgctgacgccgacgcgaattgcgctgctgctgttagcggcttgcctgacggcgaccgcgacgatgactattggaccgttgagttttgttggtttaatggcaccgcatattgcgcggatgatgggctttcgacggacgatgccacacatcgtaatttcggcgctggtgggtggtttactgctggtgttcgctgactggtgtgggcggatggtgctgtttccattccagatcccggcggggctgctgtcaacctttatcggcgcgccatattttatgcgacaacggatgcccgatgcgacgctggcgcgtcttatcgggcctacaacggccccgaatcgtaggtcggataaggcgttcacgccgcatccgacaaccatgccatcaccactatcacggacgatggtgcgcgccgtttgcgcactctgttccagcgccagcaggctgatttggtcagcgtaagcaaatccggttttttcaccgctgattgcacgcacacctacgccctgatcgatgttgtaagaaccatctttaataatgcggtcttctaaaacccaggattcgtgatagctcgactgaaaatagagatcgccataatcaaggcgacgttcggccagttgaccgaggatcgcgaacaagtcctgatgtttcaggccgttcagcctacggttatgttccggtatgtaggcctgataagacgcacagcgtcgcatcaggcaacggctgtcgaatgcggcgtaaacgccttatcagacctacggtaatgttccgtttgtaggcctgataaaacgcacagcatcgcatcaggcaacggctgccggatgcggcgtaaacgccttatccgacctccggttatgttccgtttgtaggcctgataagacagcacagcgtcgcatcatgcaacggctgccggatgcggcgtgaacgccctatccgacctacggttatgttctggctcgttggcctttggcaacgattatcctatgagattggggcaattacgcgccctcgtcaaatcattgcgctttttctttacgcggttggcgcaaacattcgttgatttgcggatcgtccagcggacccgaaatgcagtgacgaagatccgggagtttattctccagaagatctactccttcagaaagcccatgaccaactaccagatcccccaggcggccctgctgaagtacagtgaagtgactgggattggacccaaggctccggaggtagttggagcacaggtgcaccacaccggcagttcgctggacaggatgacctcttcaaacttacctttggtttcccagggcgtggggcggagatatgctcatgtggtgttgaggaaagcagacatcgacctcaccaagagggctggagtactcacggaggatgaggtggagcgagtgatcaccatcatgcagaacccacgacagtacaagatcccagactggttcctgaacagacagaaggatgtgaaggatgggaagacatcagatacctacctcccctcggagccgctcagcctgcccacgctcaatcaaggcttcagcctccttcacgaatgccaccagacccccgaaggggggagacagcagctcctcaatgaactcctagagagaagtgcaagcacacacagg

SEQ ID NO: 136647 - DNA, 541 bp, Homo sapiens
  misc_feature (1)...(541): n = a,t,c or g
gcacgagccgccgcttgtgctgcagccatgtctctagtgatccctgaaaagttccagcatattttgcgaggtactcaacaccaacatcgatgggcggcggaaaatagcctttgccatcactgccattaagggtgtgggccgaagatatgctcatgtggtgttgaggaaagcagacattgacctcaccaagagggcgggagaactcactgaggatgaggtggaacgtgtgatcaccattatgcagaatcccacgccagtacaagatcccagactggttcttgaacagacagaaggatgtaaaggatgggaaaattccagccagggtcctaggccaatggtcttggnacaaccaagctcccgtgagaacctgaagccacttaaggaagattcggggcccataaaaggcttgcggcaacttccgggggccttcgtgtccgaggccagcacaccaagaccactggccgccgtggccgcaccgtgggtgtgtccaagaagaaataagtctgtaggccttgtctgttaataaatagtttatatacct

SEQ ID NO: 136648 - DNA, 1200 bp, Homo sapiens
atgggtcttcaccgacggttcatcttgatcctgcgtgcatgccgccttggacaaattcttccggcggggccaaccttgatggaggtgttctccagggctgtggtccgcagggatatcttgttgagtatgcgggagggatgtggctgccatcatacagaggccaacaccttgagcccaggggatggtgaagagagaaaatggaaggaacaaggttcctcatctccagactgttacgagaatgagcaacggccggatgtccttcctgctccgctactgaaggcgtggtgcgtaacggcaaaagcactgccggacatcagcgctatctctgctctccttgccgtaaaacatggcaactacagttcacttacaccgcctctcagcccgtgcacgcattatgggcgttggcctcaacacggttttacgtcacttaaaaaactcaggccgcagtcggtaacctcgcgcatacaaccgggcagtgatgtgattgtctgcgctgaaatggacgaacagtggggctacgtcggtgctaaatcacgtcagcgctggctgttttacgcgtatgacaggatacggaggacggttgtggcgcacgtcttcggacctgcaggcatgcaagattcgcgacagagcttacattcgagcaggcgtgacctgtcgctactgacggatgtgcgtacggcaaagcacgccgacttcggctatctcgctctcaagcgtaaaacatgcaactgcgtcacttacacgcttctcaacccgatcgcaccagaaaatcatgattatggcatgaatgacccgggcagtgacgtcatcgtctgcgcggaaatggacgaacagtggggctatgtcggggctaaatatcgccagcgctggctgttttacgcgtatgacagtctccggaagacggttgttgcgcacgtattcggtgaacgcactatggcgacgctggggcgtcttatgagcctgctgtcaccctttgacgtggtgatatggatgacggatggctggccgctgtatgaatcccgcctgaagggaaagctgcacgtaatcagcaagcgatatacgcagcgaattgagcggcataacctgaatctgaggcagcacctggcacggctgggacggaagtcgctgtcgttctcaaaatcggtggagctgcatgacaaagtcatcgggcattatctgaacataaaacactatcaataa

SEQ ID NO: 136649 - DNA, 1908 bp, Homo sapiens
atgagaaccgccatcgccactgtcatttgctgcaacaactgccaacgtcgccacaccaacagccgttgccacaccgacaactgtcgccgtgccgacagcgccagcagccacgccaccagtggtagtagcagtcgtggttgcgccggtagtggtcgttgtggtgccagtagtacccgtcgttgcctcggtcccgtttgttgcttcaggggcagcaaacgcagctggcgtcgtcaacatgaaggccataaggattgcagaaagcttgtgtttcataacttttcctttattcatcgcatggacaatacggctgtccctcctgttcagctactgacggggtggtgcgtaacggcaaaagcaccgccggacatcagcgctatctctgctctcactgccgtaaaacatggcaactgcagttcacttacaccgcttctcaacccgccgggcagtgacgtcatcgtctgcgcggaaatggacgaacagtggggctatgtcggggctaaatcgcgccagcgctggctgttttacgcgtatgacagtctccggaagacggttgttgcgcacgtattcggtgaacgcactatggcgacgctggggcgtcttatgagcctgctgtcaccctttgacgtggtgatatggatgacggatggctggccgctgtatgaatcccgcctgaagggaaagctgcacgtaatcagcaagcgatatacgcagcgaattgagcggcataacctgaatctgaggcagcacctggcacggctgggacggaagtcgctgtcgttctcaaaatcggtggagctgcatgacaaacagcaaggtcttgatgcggcgctgattgatgcgccgttagcagtcgatgcacaaacgcctcttagcgagttgctctctcatgtcggacaggcaccctgtgcggtgcccgtggtcgacgaggaccaacagtatgtcggcatcatttcgaaaggaatgctgctgcgcgctttagatcgtgaggggggcgtgcgcgttccggtgatatatcctaaacgtttccggaccactgatgtttgcatgcccctttctctgggtacctgtattcgtgagattgaagcagagtttccggatccgattttccgtcgttccgtggtctacatttgcgaacataataccaatggtgcaatggggatcatcgtcaacaagccgctggaaaatctcaaaattgaagggattctggaaaagctgaagatcacgccggagccgcgtgatgaatcaatccgtctggataaaccggttatgctcggcggtccgctggctgaagatcgcgggtttattttgcatactccggcctccaattttgcttccagcattcgcatttcagacaacacggtaatgaccacttcccgcgatgtgctggaaacgctcggcaccgataaacaaccgtctgacgtattggtggctctgggttatgcctcctgggagaaaggtcaactggaacaagaaattctcgataacgcgtggctaacggccccggcagatctgaatattctgttcaaaacgccgattgccgaccgctggcgcgaggcggcaaaactgattggtgtggatattctcaccatgcctgcacaggacggtacgccggactggaacattatcgagcgtttactgaaagagtggcagccggacgaaatcatcgtcggtttgccgctgaatatggacggcaccgagcaaccattgactgccagagcgcgtaaatttgccaaccgtattcatggccgtttcggtgttgaagtaaagctccatgacgagcgtcttagcactgtggaagcccgttccggtctgtttgaacagggcggctatcgggcgctcaacaaaggcaaagttgactctgcctctgcggttattattctcgaaagctatttcgagcagggatattaa

SEQ ID NO: 136650 - DNA, 5298 bp, Homo sapiens
ttaatttcgacgcgttaaagcagtattagcgtgtagtggacgtggtggttgaggtgttatgagaaccgccatcgccactgtcatttgctgcaacaactgccaacgtcgccacaccaacatgccgttgccacaccgacaactgtcgccgtgccgacagcgccagcagccacgccaccagtggtagtagcagtcgtggttgcgccggtagtggtcgttgtggtgccagtagtacccgtcgttgcctcggtcccgtttgttgagccgggcagtgacgtcatcgtctgcgcggaaatggacgaacagtggggctatgtcggggctaaatcgcgccagcgctggctgttttacgcgtatgacagtctccggaagacggttgttgcgcacgtattcggtgaacgcacctttgacgtggtgatatggatgacggatggctggcccgctgtatgaatcccgcccagcattcaccggacgagattgcgtagacgacgctttttttgccgtagcaggcgtctgacgctgggtcgccatcggcgtatgtttcgtcaacgccggacgggtattgcggttctggcgacgagcttcacgcatctcttcaatggttggcgcaggcactaagcaatcgcgacggctgccaatcagatgctttttgcccatcgcttccagcgcctggcggattaacggccagtttgccggatcgtggtaacgcaacaacgctttatgcaaacgacgctgtttgtcgcccttcggtacgaagacgtcttcgctcttataaccaatcttcgccagcgggtttttcccggtgtaatacatggtggttgagttcgccagcggcgacggatagaagttctgcacctggtcgaggcggaagcggtgctttttcagccacagcgccagattcaccatatcttcatcacgcgtaccggggtgcgcggagatgaaataggggatcagatactgctctttacctgcctgttttgagtaagtatcgaacagctctttaaagcggtcatagctgcccatgcccggcttcatcatcttcgataacggcccttcttcggtatgttccggggcaatcttcagataaccgccgacgtgatggtcgccagttctttgatatagcgcgatcttccgaatgcggaactgtgcgtgccgcaaactatcgatgcgggggccgaagggcgtgcggtggtgaatctcaaccgcttcgacctcgccatgctgaaaccgtttatgccagaaaccactcaggccagcggtatcttcacgggtaaagcggacgttgcctgggacaccacgaaagaggggctgccgcagggcagtatcaccctttcggggcgtaacgtgcaggtaacgcaaaccgtcaacgatgcggcgctgcccgtggcgtttcagacactgaatctgacggcggaattgcgtaacaaccgtgccgaattgggctggaccatccgcctgaccaataacggccagtttgatggacaggtgcaggtgaccgatccgcaaggccgccgtaatcttggtggcaacgtcaatatccgtaacttcaaccttgcgatgataaaccccatctttacccgtggggaaaaagcagcggggatggtgagtgccaacttgcgtctgggtggtgatgtgcaaagcccgcagttgtttggtcagcttcaggttacgggtgtggatatcgatggcaactttatgccgtttgatatgcaaccgagccagcttgcggtcaactttaacggtatgcgctcgacgcttgccggtacagtacggacccagcagggtgaaatctacctgaacggtgatgccgactggagccaaattgaaaactggcgggcgcgggtaacggcgaaaggcagtaaagtgcggatcaccgtgccgccgatggtacgaatggatgtatcgccagatgttgtattcgaggctacaccaaacctgtttaccctcgatggtcgcgtggatgtcccttgggcgcgcatcgtggtgcacgatctgccggaaagcgcagtaggcgtctccagcgatgtggtgatgcttaacgataacctgcgccacggaaagttcctgccagcgcaggccgcgcgcggtgatatctgccagtagttgtggcgcttccaccgtgccgcgtactttcaccagccctttcgctgtaccgccaagccccggcagcgcgttatccagccccggcgcgttgatggtggcatcaagattgagatcttttacccccagctcgcctttcacttcggcactgtttggcccgagttccagatgaagctctgggatcatccactgcatataactgttgcctttcagcgtgccgtcaacgttcactttgttctgtttaacgttaccggtcagcttcaactccggcacgtccatctgccaggtgccgccgtacaggctaccgcgggttttaatcaagccattgagtttcgacggccagtccgggaactctttggcggtgttaatgccgttaagcgttagctcaccgcgccaactaatggcctgttgccagtcgagcaacgccttgagttcagttttcccttccagcgccgcgacggtgagtttgtcgagattgacctgctgttcattacctttggcgtcgagggtaatagtcgcgggcgggatctcctgtcccttcactgccgtacgcatagagagcgtgtaatcggtcattttgccggtaagtttcagtttcagatcatccgcctgatactgcttctcaccagtgaacggccagtaaagctgtttgctgttcacttccacgttgagcggcaatccggcttccgccagtcgcgtctgggcgcgtaaatccatatccaccggaccggaaagattaacgccaatctccagctgttcgcgcagcgcgccgcccattttcagcttcactttttcacctttcaacggctccacgttcagtgtactgttgagagtgatgtccaccggccagttgtctgacagctgcgccgtgccgctggcgttgacgatcccttgactggaatcgatatccagggcgtccagtttagtattgccgtcaatgctgctcactcgtcgaaaacgccgggcgaagtgttgcaggataaaccggatacttatcttctcgctggagatgccatcagaacagatcatgatgcgttctctggcgtcgctgtcgcgcgttgaccagacgggcagctcgatgacgaagactgggcgcgcatttccggcaccatgggtattttgctcgaaaaacgcaatatctatatcgatgactcctccggcctgacgccaacggaagtgcgttcccgcgcacgccgtattgcccgtgaacacggggcatcgggcggcgctttccgataaccgtacgctggaaattgcagaaatctctcgctcgctgaaagcactggcgaaagaactgaacgtgccggtggtggcgctgtcccagttgaaccgttctctggaacaacgtgtccgactaacgcccggtctaactccgacctgctgtgaatctggctctatcgagcaggattcggacttgatcatgtttatctggcgatcgctgccaaacgggtaaaaggttttctcttcaatggctttcagcagcattgcctgttcgtctgcgcccagttcgccaatctcatcaagaaacaacattccgccgttggcgctgcgtaataaaccttcacgagattcccgcgccccggtaaacgcgccttttacatgaccaaacagcgtcgacatggcggtatcgccgcgcagggtggcgcagttcacttccacaaacgcgccgctaaactgatgccgcgcctgttttaactctaagatgcgtcgcgccagaaatgacttgcccgcgccggttggaccgttaagcagaatcggcgcgcgggatttgatcgccactttttcgatctgctcaatcatgcggttgaagtgggggttacgcgtggcaatgccggacttaagaaaatcaagcgtttgctggcgttcctcggcaaagcggctggcgatggcgttataacggcttaaatcgagatcgataatcgttacttcacctgggccgcgcggctgttcttttttgcgcggaggtgaagattgtatcagccgggcgggcaggtaacgcgcttctgccagcagaaaccagcaaatctgcgcgacgtgggtaccggtggtgatgtgaattaaatagtcttctttttctggctgaaactcgtaaccacgggcgaaatcatgcaggcaggcgtagacctcttcgaaatcccacgggttatgcagttcaatctcaacgctcaccacttctgtttctggcgaaacgctggcgatatcgcgtttaagcgtttcaaatagcgagcgcgagcgggcgtcgtgcaacaattccagtcgatcgatgaccaacgattcttgctggcataaacagagtgtcggacgccattttgaccagcgctgactgccgcgcccggcataatccagtacggtaccgacaaagcccaaagccactgttttacgcatcttagatatccttataaaagacgatatttcattatcggtaaattggctttgcgggaaatctccggttacgttgccgcaacatggctcattgacccccctcctttcatccggcttcgggttgagtaatgaagctatgcgctgggagcaggcattttctttgtggtatatgcgtttctgggtgttccggcgaatcttttgatgcgcaaactgggggccagaacctggattggtacgacaacactgctgtggggatttctttcggcagccatggcatgggccgatactgaagcgaaatttctgatagttcgcactctgcttcgtgctgcggaggccggatttttccctggtatgatttatctcacctcgcaatggtttccgcagcgtaatcgcgccagcattatggggctgttgcgccagacttttcagcacgttcacacaaacagccgtcaccactgctccgacagccactgctgcgatataacccagcttgccttcaaccaccggcagcacaatcagaccaccccagcctgcatagcactgcgcaccgaccagcgccgcagttactgcaccacaaactgaaccgaccatgatggaaggaatgacacgcagcggatcggcagcggcgaaaggaatcgccccttcagtaacgccaacacagcccatcaccagtgccgctttgccggtttcgcgctcttctgcggagaaatttttacgaccaatcagcgtcgccagccccatccccagcggcgggatacaaatacccacggcagcgatggccaccacggtataaacaccctgagcaacgcaaatcagcat

SEQ ID NO: 136651 - DNA, 474 bp, Homo sapiens
atggcaactgcagttcacttacaccgcttctcaacccggccgcagtcggtaacctcgcgcatacagccgggcagtgacgtcatcgtctgcgcggaaatggacgaacagtggggctatgtcggggctaaatcgcgccagcgctggctgttttacgcgtatgacagtctccggaagacggttgttgcgcacgtattcggtgaacgcactatggcgacgctggggcgtcttatgagcctgctgtcaccctttgacgtggtgatatggatgacggatggctggccgctgtatgaatcccgcctgaagggaaagctgcacgtaatcagcaagcgatatacgcagcgaattgagcggcataacctgaatctgaggcagcacctggcacggctgggacggaagtcgctgtcgttctcaaaatcggtggagctgcatgacaaagtcatcgggcattatctgaacataaaacactatcaataa

SEQ ID NO: 136652 - DNA, 404 bp, Homo sapiens
ctcgcgcatacagccgggcagtgacgtcatcgtctgcgcggaaatggacgaacagtggggctatgtcggggctaaatcgcgccagcgctggctgttttacgcgtatgacagtctccggaagacggttgttgcgcacgtatcggtgaacgcacaatccgaactttaacccggcgtctgttccgttgcttaaggagcagccatgacctggtctcgtcgccagtttctcaccggcgtcggcgtgctggcagccgtcagcggcaccgcagggcgcgtggtggcgaaaacgttgaatatcaatggggtgcgttacggcatggtgcatgacgagtcgtaatgcatcggctgtaccgcctgtatggatgcttgtcgggaagtgaacaaggtgccggaaggcggtctcgcgc

SEQ ID NO: 136653 - DNA, 2313 bp, Homo sapiens
atggaggaattcctagagaaaggttctatccttatgtacttaaatactgatttagaggttggttatggagacagaagaatactaagtgttgggagccgttaccagtggaggaccacccatgagcacggaagccagagcatatctggaccatcatcacagcactcttccaccttgcgcctacccagagtaggtttccgttcttcccacttccccttccgggtcgggaccctgcccatgttccggtcttcgcacgagtctagaacgcagcaactccgccggcgtttccatggtggcaatggccggttccttgcggggctgagcaacaaagtagtatcagtgttcggtgctccactggaactacgcagagccagaccagcgggaccacagaatgggcgaggcggcggcggctgtttggataaagtcaacagcgggacgtggggcgtacgccggtccggcatcctaagacttaggaccatctggttgcaggaaaacaagctcagggctcccctgattctacattatgctactgacggggtggtgcgtaacggaaaagcaccgccggacatcagcgctatctctgctctcactgccgtaaaaatggcaactgcagttcacttacaccgcttctcaacccgaaaatctgttggagcaggatttttacgccagtggcccgaccagaagtgggcaggagacatcacgtacttacgtacagatgaaggctggtgtatctggcagtggtcattgacctgtggtcacgtgccgttattggctgtcaatgtcgccacgcatgacggcgcaactggcctgcgatgccctgcagaggcgctgtggcggcgtaagaggccccggaacgttatcgttcacacggacgtggcgacttatgcttccgaaaccaaccggctgaaggcgctgttgcaaaactgcagcgcatgcagttcggtaaaagctcagaaaaacttccgcaaaaatcgaacggtaaatacaggaagcacaggagcgaatcagcgcattcaggaggaaatggcagaaacactgtggtgctacgtccgtgatgaccgtgatgccggctcggagatgccccggcggtctggttcgcgtacagtcctgctggaaaggtatccattcaaaaatcacctggccggttacagcgggaaggaaggtgccgcattcatggcgctgatggcaaaaaagcacgtttggtcgtcctgttgccggagggatggtcacgggacatacgacgttcctgtcactcagccaggaggtgctgttatccctgctcagttctgcattgcgtgcagcatccacggcgttcagacccgcgagtgtggtcaccgtcacgcagtccgcttgacccgctggaaaccgctatcggattccacatcgcgactggtggcagccgacaaaagcaaacttcttcggacacctgaaaagccgcagattatcgcagccctgaatgaggccggactgtccgaccatgaacgcacggaatatgaagatatccgggctgccggaagtgatgaacgccttcaccgggtaccggaaacggccatactgacacaggccattcgcattgagctgaaaacacagggcgtgtcggactcccggagccggagccgttatctgcgggatatgtaccgtccggggatggtgatgggcagtggaacccggagacacgcagtcatgaccgctatgttatcgaccggtgacggcgcagagtcacagcctgatctgcgggatgcgcagggtgaaacgaggtggtgcgtatttcctccctggacagcagctggtcgctgttccggccgaaaaaatgccggtggcagacggcgagcgactgagggtgacagggaaaatcccggactccgcgtctccggcggtgaccgcctgcagatggcaatggacaatgccaccctgaacggtctggcccgagtggtcgtgatgtccggctgtattcctcactggatgaaacccgctctaccggaaaaactgaaagagcaggttgaggcgctgggctatgaaactgaagtggtggtaagcacggtatgtgggaaatgccgggtgtaccggtggagctcttttcggacgctcacagactatccgggaggccgtcggggaagacgcctcgctgaatcccgggatgtggcggcgctggatacgccatgtgatccggagatcaaaatggccgagtggatgcagacgctgaaggaaaccggttcgacatccgggcatatcgtgacgcggcggatcagcgtgcggatctcgcacgtgacgcccgggcctgcttcacaggacgggccggatgtgcagcagcggtga

SEQ ID NO: 136654 - DNA, 4977 bp, Homo sapiens
atgacttgtaggcgggacgctacacaggtggaggacacggccgaattcccattttccatgcttgcttatcaaagaacttgccccaacaactcaggtcacatttctcaacaggcacagcatggttcaattcgcactccaccagattccagccatgcattgggtggcagcccctcatggcaaacttcaccaatccattgtgtggtgcaggtttgcaaagggtgggccacatggcccccttccattccacaacagttccaaagttctcaatctgataaccagaaagccacaactggcctctcataccggacaaatgcacacaagctagtactcccagaaccaaccaggaccgagctaggacagaacccgtacaaaaccagccatggccacaaaaggggcacggccaacacacttacaccaccaacaaccgtacagaccaaagaccccaatcaagcacacacggcagctactgactacatgccatcgtatagcgccgattttcacaagcggtgggtaccatttacctacgtgcgtgctggccgggacccggtatgcatattaggttctggcctgcatggaatgcttggttgctacggccgataccggcagcgaataattttgcgcttattgcgggccgttgtgctttaccgggatcgtgatttcggttcacctaatgcaagtgccaggctcgacttcggtacctcctctcatcacggctctgcgtctatcgccacgtgggcttaccgtcttcgggggatcacggtcatgcctattaaactttactcactaagacttgcttacctggttgctcttcgtgggctctccactcacgagggatcgggtaccccccaaggaggacctacgtatcggttttacattccactattccggccacttcggagaaaggcgctgcactatctctcttccaaagtcgactcctctgccaagtcttctagtggggggaccgggagcagacatcacaaaccaatgagttgtaccacactccaccattacaactgtacaacggagccacagaccattcagtacaactattaccgacccaactcgcccaagaacaaccagggcgaatcacaactagaagtgtcgccgccaagaatagtagtcgttggaacaattggaccagaaggcgccaactaccgttattgtgaaagcagtgaaagacagggctacaccacgacaaacaaagagcaacacaacaaataccaacggaaacaacaacaaaagagggaggacaacccccagcaaaaacaaccgcaaaaccaccatggtgataccccaacaaacagagcagagaaacaaaacatctacaacaaccaacaccacacccgagggcccccacacagtgaacccaatgggaaaacaccaagacccgagaatagaggaccaacacccccaaccacatcagaaggggtgaccgtcagcagcaatacacaacactcaagagagcaagtaaagacgccaaccaaaagaaaaacaatcaatacacagagaagtcaaaacacaccccaaaagtgcagaacagcacgcagaaacacacgagacgaaccaaacagaaagcacaccaaccaagaaaaccaggaacaaaagaaagcagaaaaaaaaaagggcacgtgcaattgtagtactacctctactatgtcgagctgcatcagagatccccgtgaccccgaggtgactctctctcctgagcgcgaaaccgtctatatggtgccaagccgcaaccgctacggcattatcgggccaatcttccgcaggaaatgcaacctgaaaccttgcagaagaaaatcagtgaaagccgctgaccaaagacaaagccgggcaaaaaccgtcttactgcgtggtgacaactgcacctatgacggcgtgtgttataacgctaaagaagcgcaggatcgctggaaaaaacctccgatcgtctgcactttgacgaagcctggtacggcatgcacgtttcaacccgatctatgccgatcactatgccatgcgcggcgacctggcgatcacaacggtcctaccgcttcttatattcatgtacgtgaaggtgtggggcgattaaacttcttccgcttcaaccaggcctacatgatgcatgcaccacctccccgctgtatgccatctgcgcatccaacgacgtggcggtgcgatgatggacggcaacagcggcctgtcactgacacaggaagactgctgggtaatgcatccgggcgaaagctggccggcttcaaagatattccggataactggagtatgctcgacccgattaaatcagcatccttgctccgggaatgggtgaagatggtgaactggaagaaacggtgttccggcggcgctgtattcaaatctgtgtctctcatcaggcacaacaggcctttcaacagaagcactcttagaggcgtttgcatgactctacggctatcatctgcccgactcaacatgctctgcgtaacgcgttttgctccaccgattgtagaacgacagcgacttccgtcccagccgtgccaggttctgcctcagattaggttatgccgctcaattcgctgcgtatatcgcttgctgattacgtgcactttcccttcaggcgggattcatacagcggccagccatccgtcatccattcaccacgcatatacggtaaaaaccggaagttttaacgggggcgatggtggaatacttaaccaagaacccggctacgtggcgagacaacgccaaaagggtccccctattatacgagaagaaacagaagcatacaaaatgactacttcgggccgtcagttacgcgtaccctggaaagtggcgcgggcgccaaaggaaccaacgtccggttgtgtattatactatgccgcgacgcggcactgtgggagaggacggaggcaggcagctgcatcctgtcaggtgactctagaggacccggtctggattggctttgatgatcaccgtcgtaatctcggtcatacacggcttccggagcgattaaagatcagatctcagtgtgccggagcagccgctgacgccgccaccgggtattgtgacggtgaattcgatcgcagcaccgggcagttagctaatggtggcaacagccgcgaagatatttcatcgaagtttgctgacaaagtgcacttgtttatgcggatacggcgtgaacgcgttatccggctaacaaaatcgcaaactcacgcatttacactcgcccctgccctttcaaccattcgcgcacgaggacagcgcactgacattgcgcgcttcattgaagtcagggtcttccagcaaaccatcatatgcgccagcggccagcgcacctgtggtagcggctctggctctcgccttccagtgattccgggtagagatcttgcgctaccacgatattcatttgctggaaaaaacctattcgtagatcagtacagggataccggacggaccgtgtgtccaccggccaatcacgaccgctgggcgcctctaaaaacacagcacattgacaaaagccataaaacgaagaaaaacaaggggggttacttgggaccacactgctgtataggtcccgagggggagtgtttcaagcggcgttggggatatcccccatctatattagactacggcagcacgtttttgtgtcggagatgctcctcctggtggcaggagagcggtcgggtgggtggatgtttagtgtgtacgaccacgctgcggatagtgtgccctgcgcagcggtggtcgagggatggtggtctactactacagccatcgtatagcgccgattttgagcaaccaaaagaggaaaagcccgcgttacgcgtgatggatggagacacaggcgacggtgtactaaccattgcgggcctgcggtgtaaagatatgcacgctgccccagttcgctatcggaatcaggatgaccatggctacaaattacacacgggaacaagattctatgtggaattgtgtggtgatcgcttccggctgagggcacagggcttaccccacttaggacgcacgctagaatcagagccggccaggaagtggaacccaccaaaaacaaaggaaagcccgacggaactccacgggacatgggaaccacgatgggacccggccatcacaccaaaagcgccccgggacaacaccacaaccagagcacgcacggacctccacccccccccacgaaacacaattcatctaaatgaaaaatccatcacagatcatatgcgggtgtacccgggggcccctgttgttcacctccggagcaggggccgtcagcccggagtagacggcggcgactctctcacatcacgtgcggcagctataagagtccccccgcgtaaatgtccccagatgtgcatcacccaattccccccgcgtgttactcacacgaagcactacttgttctatattagcctgaaaacagaccaatacaaacagctgaaaaaagaactgccaataaataaggcattaagagccccagaagagctactctctccagccagaggaccaagtaaaggaagtcccgtgggacagaactttctgatcttacctgccctactcaaggcaaacaacaccaaagaaatacacatcctttgccccaccttccaccccagcttcagcttgggatgctacggagggagccctgtggcctctccccactacagagtaaacagcagccagcaacatagaaccacatccagctttactaaccacattcagatgatttacaaaagaagaggaggatcaccaatgaggaaggcaccagagatttatgaagaagagctagttggactagtcattcacttcttgggccttggttgcctaattagaagggtacagattcataacactaataatgctatatgtttttactggattgaaaaattaagcacatgggtggcagatggtgagacccaggtctctcctattgaagtgggaacttacagacagaccagaggaagaggatacagtgactatgtggtaataaattag

SEQ ID NO: 136655 - DNA, 1233 bp, Homo sapiens
atgatcatgacttgggccaaggcgatcactgaaggctgtgagaaggccatgtgcttagctgctgccgcaaaggcaagcgaaagcaccagtactaccgctgccgttgccaacagaaaacgtacccgcagcgagagcgggaaaaaaagacgcagtaattttttcatcagcgcaattcgaacagatagccctggccgcgaacggtgctttcacgggcggttaataccagaatcggcagtgaaacatgcgttgctacgccagcggcgaatcagtgacagaccgtcctcgtctggcaatccgagatgcgacaatcggcatatccgggttttgttccttggcataataatcgggttgggtaccgaggtcgaattcggaatcatggtcaagccgggcagtgacgtcatcgtctgcgcggaaatggacgaacagtggggatacgtcggggctaaatcgcgccagcgctggctgttttacgcgtatgacaggctccggaagacggttgttgcgcacgtattcggtgaacgcactatggcgacgctggggcgtcttatgagcctgctgtcaccctttgacgtggtgatatggatgacggatggctggccgctgtatgaatcccgcctgaagggaaagctgcacgtaatcagcaagcgatatacgcagcgaattgagcggcataacctgaatctgaggcagcacctggcacggctgggacggaagtcgctgtcgttctcaaaatcggtggagctgcatgacaaagtcatcgggcattatctgaacataaacactatcaataagttggagtcattacccaacccgaataacaaactgccggtcacctgcaccaactgtcacggccagccatcaccgcaacaccgcgaaggggtgaaagatgtgatgcgctttaacgagccgatgtacaaggttggagagcagaacagcgtctgtatgtcctgtcatctgccggaacagttgcaaaaagcgttctggccgcacgatgtccacgtaaccaaagtggcgtgcgccagctgccattccctgcatccacagcaagatacgatgcagacgttaagtgacaaaggacggattaagatttgcgtcgattgccacagcgatcagcgcaccatccgaactttaacccggcgtctgttccgttgcttaaggagcagccatgacctggtctcgtcgccagtttctcaccggcgtcggcgtgctgcaaccgtcagggggatcctctag

SEQ ID NO: 136656 - DNA, 2655 bp, Homo sapiens
tcatttgctgcaacaactgccaacgtcgccacaccaacagccgttgccacaccgacaactgtcgccgtgccgacagcgccagcagccacgccaccagtggtagtagcagtcgtggttgcgccggtagtggtcgttgtggtgccagtagtacccgtcgttgcctcggtcccgtttgttgcagaaaatcattgatatggccatgaatggcgttggatgccgggcaacagcccgcattatgggcgttggcctcaacacgattttccgccatttaaaaaactcaggccgcagtcggtaacctcgcgcatacagccgggcagtgacgtcatcgtctgcgcggaaatggacgaacagtggggatacgtcggggctaaatcgcgccagcgctggctgttttacgcgtatgacaggctccggaagacggttgttgcgcacgtattcggtgaacgcaccggtaacagatatatcgcctccatcaccgctgaagtaatgaagtaaggcagcaagcctcgccatgttctccgccattttagaagcaaacaactgttgcctcaccatttcgtcaacgtttactttgctgttgccgccgcgtgcaatatcaacctgatcgtgccaggaccattcacactccagtcccagttcatgttcgacatgcttaccaaaatggtctggaatctgaatcatgaaggcgcactgacgctgacacaggttgtcgatgtgccggggcaggtgcagccgatggtggtcagcccggacaaacgttatctctatgttggtgttcgccctgagtttcgcgtcctggcgtatcgtatcgccccggacgatggcgcactgacctttgccgcagagtctgcgctgccgggtagtccgacgcatatttccaccgatcaccaggggcagtttgtctttgtaggttcttacaatgcgggtaacgtgagcgtaacgcgtctggaagatggcctgaccatgctgcatgaagagctttccagccacatgatgaaagaagagcagatcctcttcccgatgatcaaacaaggcatgggcagccaggcaatggggccaatcagcgtaatggaaagcgagcacgatgaagcgggcgaactgctggaagtgattaaacacaccaccaataacgtcacaccgccgccagaagcctgcaccaccaataaacagccagcccaaccccagcgcgataaaccacagcggggtaaccagcagcgcctggcgagtgtcatcttccagtgtcagcaacacgaccacgaacacaaagaacgccatacatacccagcacatcagcttgccgagcggcatcttgtagatcgacttctcatgtagatgaggacgctgtttgcgatacacaaggtacgagcaaaggataatcgtccagacgaacataaacagaatcgcggaaacggttgtaatcatcgtgaacgcgccaatcacactaggattcacatacaacatcaccacgccgccgagcagacagatacacgagaacgtcagcccaggtcggcgtaatcgaaggcttctggcgcgatacgacgccgctcttacgtcctggtaaaaaaatcggtgtgtcaaccgatgcctcatgttttccgctggtgccatttgcaaaccgggtgatcggcaatcgttttgtctggcaggggcgtgagtatcaactgcaaccgaatgttgagtgggatgcgcactatctacacggcgatggctggctgggcgagtggcaatgtgtctcgcacagcgatgatagtttgtgtctggtgtatgaacatcgcagcggtgtctatcacgcaggaactggattttaaccagcccgcgccgttgccgcgccagtgggtgaacaatggttttgccggatggaatggtcaggcccgcatcgagcagccgcaggaaggttatgccatcatcatggaaacgacgccacctgcaccgtgttatttcatctttgtttccgaccctgcgtttgataaaggatatgcgtttgatttcttccagcgtgtagaaaataaacagcaccgccagcggacgggtgaaaaagccaagcacgattaatatcgcggcgggcacttccataactaccgcaataatcgctgccagcatcggcattggcgcgcccaacgaggccatatattggaccgtcccctgaccccgctccgggtcctttacttcacacaggtacccggcatgttgcgtcaccagtaaatccgcgctgagtttatgacgtaaacgacgaattaacacatcgacggtgcgcaggtcagggttttccacccgacgcgcagaaagcatacgtagcagacgttcacggctgagaatttcgcccggattcgtcacaaatgccaccaacatttcatactctgcgcgggtcagtttaatcggctcgccatcccgctccagcgtatggcgcgacacattcaggcaataaccggcaaagcgatagcagttgtcctgagtgtgcggttgagcttgtcgcgcgaggtcgattcgccagagcagatttttcacccgtactaccagttcgcgcagttccagcggtttggtgacgtaatcgtctgcgcccatttccagcccaacaatacggtcaatccgatcgctgcgtccggtaaccagaataatccccaccgttgagcgttctcgcagggcgcgggttaacat

SEQ ID NO: 136657 - DNA, 489 bp, Homo sapiens
atgtcttccagacgcgtaccttccagccccgtggtgaagaccttcataaacgacctcaacaaccagatttggagaatgcctgggttgctgaacacaagggagatagcaggaagatataagaaactcctggaaatgacaataaatatgttaaatgtatttggaaatgaagattttgattgccatggagacttaaaagcagatcaactgaaaatggatattctgattaagaagctaaaacagaagttcagtaaagaaccttcttcaccacggggcggaaggaccacccgcggtgaataccgtgatgaatcccgcctgaagggaaagctgcacgtaatcagcaagcgatatacgcagcgaattgagcggcataacctgaatctgaggcagcacctggcacggctgggacggaagtcgctgtcgttctcaaaatcggtggagctgcatgacaaagtcatcgggcattatctgaacataaaacactatcaataa

SEQ ID NO: 136658 - DNA, 1194 bp, Homo sapiens
tcagttttttaagctgggcaagcgggaagggaccatgatcaaccgattccgttgaagatgacgctctgaccgcttgttaatccacggattttctttcccggcaatgggtttcaggctccggaagacggttgttgcgcacgtattcggtgaacgcactatggcgacgctggggcgtcttatgagcctgctgtcaccctttgacgtggtgatatggatgacggatggctggccgctgtatgaatcccgcctgaagggaaagctgcacgtaatcagcaagcgatatagcgcagcgaattgagcggcataacctgaatctgaggcagcacctggcacggctgggacggaagtcgctgtcgttctcaaaatcgggtactgcttgctgtggacattgtttgacgcgggatataccaatgttgcaccaccagggaaaccagcttttttaacgtctttgagagcaactttattatctcccaaactcactatgccaaagggaaagttaagtttgggaacgactctaggggatctccgagtatctgactgcatcagtgaagctgccacctgccacagaaaatctctaggggatctccgagcgcgaacgggatcccgccattgcgggtgatctccttcgccgccgcctgcatctgcatgccgatctcccaatatggctgggtcaagtggtatttctagttctagatccctctgcggctccatttccagtgccattctggtttgccgcttgtgtgggctgcccgatccgcgaaccagcggctccggcaatccaggcgcaaccaatgtgttacgtatcggtggcaagggagcagccgtagcagtactgattttcgacgttctgaaaggaatgttgcccgtctggggcgcgtatgaattaggtgtcagccccttctggctaggcttaattgccatcgccgcctgtcttggacacatctggcccgttttcttcggatttaaaggaggaaaaggcgttgctaccgcttttggtgccatcgcacccattggctgggatctcaccggagtaatggcgggaaccttcccggtttcgatgtctcctgcctggtcctgctgcgtcatcatgacaacatcacaggggatcctcataatgatagtgtcgtactgcatcagcaggcggtcttgctggatctccgccagcaggataccgtcggtcatcagcttgaccat

SEQ ID NO: 136659 - DNA, 1656 bp, Homo sapiens
ttacgccttattattcgttatccacgtagtgtagccgcaaaaccagcatacgattgagcggcaccagcgccctctctcgcagcctttcatcacatgaacctcgtgattgcttccttcctgttctaatgcctctgcgatggctgaaggccattcatggccatccacggacaatgcgcgcagctgcggcagttgcaccctcacctgcggttggtgcttccagtaactctttatctggcacgcctgctgcattttgtagaaaataccccgatcggttgccacaataagccctgatgtggcaatgttttcgcagcagcgatcagttgactggtggaaccgccgcatccgccatatcgacaatagcttgtggtgattctggatgcaccagatggcagcatccgggtattcttcttgcaagcgggttaacgccacaccagcggcagcaggatcagcgacaggctgaatccgaaagatggcatttgccttcgccgagatgcggttcgctgatgtcgtcaggaatatgcagctcacgtaacggaggccaatcaggatcatccagccaaagtcggcatcatctgcgatgccagcagcatcggcgctggtccaggcaccagaaatgcgccggtttcttttatctggtggtcgggtggtggtggcgctggcggcggtggagatggcacaaattatcctcaccggggcagcagtattatggagtcgatttcgaaatatcaacagcgttgccacaccgacaactgtcgccgtgccgacagcgccagcagccacgcaccagtggtagtagcagtcgtggttgcgccggtagtggtcgttgtggtccagtagtacccgtcgttgcctcggtcccgtttgttgcttcaggggcagaaacgcagctggcgtcgtcaacatgaaggccttaaggattgcagacagctgtgtttcatatcttttcagcgcatgacttgcagcatagtgatccatgggaagtggcgatatgcgcagttccccctctcgagcagcagcattacgacaactcccgcgaccgtttcgccaactggcggtacgtatggaaatgatctcccgtttccgcagcgccaaagagcagaccaaatccttgcggaagtggcggaaggcaaaatcgatattctgatcggtagcacaaactggtttcaacgtgctggtttgtacaaccattatcgaaaccgggatcgactcccgacagccaacactattatcattgaacgcgcggatcacttcggtctgcgcagctgcaccagttacgcggtcgcgtcggacgttcgcatcatcaggatatgcatggttgctgacaccgcatccaaaagcgatgactaccgatgcaaaaaacgtcttgaagcaattgcctcgctggaagatctcggggcaggttcgcgctggcaccgcacgatctggagattcgcggcgctggtgaactgcttgcgaagaacaaaccggctcaatggaaaccatcggtttctcgctgtgtaccagttcccaggcgctgatccgcgcgataccagacttcggcaggcgatgccgcataaaagtcgcctcaatacgctgcccggcgctatcccacgctggaacagttaccgattggttgtcgtctggggccacgttgcccgtatcacaacgagaatgcat

SEQ ID NO: 136660 - DNA, 1050 bp, Homo sapiens
atgagtaataccgacgcttcaggtgagaagcgagtgactggcaccagcgagcgacgagaacagatcattcagcgtctgcgacagcaagggagtgtgcaggttaacgatctgtcggcattgtatggcgtatctactgtgacgatccgcaacgatctggcgtttctggaaaagcaggggatcgctgtgcgtgcctatggtggcgcgttgatctgcgatagcacgacgccgtcagtcgagccatcagtggaagataaaagcgcactgaacaccgcgatgaaacgcagcgttgcgaaagctgccgttgagttgattcagccaggtcatcgggttatcctcgattccgggaccaccacttttgagattgctcgtctgatgcgcaagcacactgacgtaattgcgatgaccaacggtatgaacgtggctaatgcgttgctggaagcggaaggcgttgagctgctgatgaccgcgggcatttgcgccctactgacgggttgttgcgtaacggcaaaagcaccgccggacatcagcgctatctctgctctcactgccgtaaaacatggcaactgcagttcacttacaccgcttctcaacccgccgggcagtgacgtccccgtctgcgcggaaatggacgaacagtggggctatgtcggggctaaatcgcgccagcgctggctgttttacgcgtatgacagtctccggaagacggttgttgcgcacgtattcggtgaacgcactatggcgacgctggggcgtcttatgagcctgctgtcaccctttgacgtggtgatatggatgacggatggctggccgctgtatgaatcccgcctgaagggaaagctgcacgtaatcagcaagcgatatacgcagcgaattgagcggcataacctgaatctgaggcagcacctggcacggctgggacggaagtcgctgtcgttctcaaaatcggtggagctgcatgacaaagtcatcgggcattatctgaacggggactttctacaatcaacactacgcgaggcgccattaattccacacactagggaacacccatag

SEQ ID NO: 136661 - DNA, 1539 bp, Homo sapiens
atgtctgtagaagccgttctcgatgagaactccagccacgactttggcaaagatttgattcccaagatcaccgaagccggtctggcctatgcgcacccgttcccgctctcttgcgtacaatccgacccggatgccgagccgtactggcgcgatgtgggtacgctggaagcttactggaaagcgaacctcgatctggcctctgtggtgccggaactggatatgtacgatcgcaattggccaattcgcacctacaatgaatcattaccgccagcgaaattcgtgcaggatcgctccggtagccacgggatgacccttaactcactggtttccggcggttgtgtgatctccggttcggtggtggtgcagtccgttctgttctcgcgcgttcgcgtgaattcattctgcaacattgattccgccgtattgttaccggaagtatgggtaggtcgctcgtgccgtctgcgccgctgcgtcatcgatcgtgcttgtgttattccggaaggcatggtgattggtgaaaacgcagaggaagatgcacgtcgtttctatcgttcagaagaaggcatcgtgctggtatcctctcctcggctgtctataaaacccggcgttctggctgatgttattggggcattacccgcagcacaaatcgcagacggcgttgacgctcgcgtactgttgcctgcatttcccgatattcgccgtggcgtgaccgatgcgcaggtagtatcccgtcgtgataccttcgccggacatatcacgctgttgttcggtcattacaacggggttggcatttacctgattgacgcgccgcatctctatgatcgtccgggaagcccgtatcacgataccaacttatttgcctataccgacaacgtattgcgttttgcgctgctggggtgggttggggcagaaatggccagcgggcttgacccattctggcgtcctgatgtggtgcatgcgcacgactggcatgcaggccttgcgcctgcgtatctggcggcgcgcgggcgtccggcgaagtcggtgtttactgtgcacaacctggcctatcaaggcatgttttatgcacatcacatgaatgacatccaattgccatggtcattctttaatattcatgggctggaattcaacggacaaatctctttcctgaaggccggtctgtactatgccgatcacattacggcggtcagtccaacctacgctcgcgagctgccattgcggttttgggtatggcccccttacgctgtttgcctttcccgggggccgtgttcccgatcacccgtccaggtgaattatcgccggctcaccacgatcagaatggaccgtagcattcgctacaccgtattcgccatcttccacgcggttgaggatgtaagccgtcgctacgcgggtatccggcgtgacgaggaacacaatggcgctgacggtggtaatggcgcgcacaaagctgtaaatcagcgccgagaggatcgccgggcgcagcagcggcagcaggatgtgcgtaatggtacgcagggaaccggcgcgcaggctgagtga

SEQ ID NO: 136662 - DNA, 2655 bp, Homo sapiens
atggggtggggaaagtttgtggggtttgccttgctggaattccttgcccccttggggacccccgtgtttgttgggatgttgcagacccctgaccttcgggccctgccgccgagagtgctctggcgagttaccacggccatggaggcccggctgccacgatgtggaaggaagggtctaagaaacatcttgtatgatgtgctgtgggatatggaggaggtagagaacagggctaaaaataaccttcctagaggtgcagatatttggcagagaccctgtattcctgggcctctcgctgacatgggctgtcaacaaactgtcacgctcttctctagatatgtccacttctgtcctgaagcagatatttttatgtacacagccatggagcctgaaggatcggagaaacccacaccgcccccgagaggtcgaaggcgcacagggaccgtcggcggccagctcggacctggacacgcgcagcagttaggctctgatatccaattaaaattgcaaggcttgggctacctgagcaagggttttgcccctgatcttgggaaaatgcgggcgcacgtagaggctgcaatcggcaagtttttacaaaacttcggggttttggaaacgctgttaaaacgggccttgcccaaagcccctttgcccaatttaacggggccaagtccacttctcaatgggcctttagcaatggatggattcgaagttaatggattacgattatttagcctctcgattccagaaccttcagttaaaaacctttttgccgtaaatgaattttatagaaataatgatgatttcataaaccctgatctacaagaacggccgcagtcggtaacctcgcgcatacagccgggcagtgacgtcatcgtctgcgcggaaatggacgaacagtggggatacgtcggggctaaatcgcgccagcgctggctgttttacgcgtatgacaggctccggaagacggttgttgcgcacgtattcggtgaacgcactatggcgacgctggggcgtcttatgagcctgctgtcaccctttgacgtggtgatatggatgacggatggctggccgctgtatgaatcccgcctgaagggaaagctgcacgtaatcagcaagcgatatacgcagcgaattgagcggtataacctgaatctgaggcagcacctggcacggctgggacggaagtcgctgtcgttctcaaaatcggtggagctgcatgacaaagtcatcgggcatatgtggtacgagctgattatgtcttgttctcgttgtttcttttcgtttctctcctgtgttttgtcgttcgtctgtcttacctccgacccattatggctggatcggacctctgcgaaacgatcacgcccagaaactgtcgctatgctgtttcgtatcgaacaaccaggtgatctgatgcgcgcgaaagcgcggatccccggtatttacgcaccgttctcaaatacgcgctctgttgcggagctggtgattggcgaactgctgctgctattgcgcggcgtgccggaagccaatgctaaagcgcaccgtggcgtgtggaacaaactggcggcgggttcttttgaagcgcgcggcaaaaagctgggtatcatcggctacggtcatattggtacgcaattgggcattctggctgaatcgctgggaatgtatgtttacttttatgatattgaaaataaactgccgctgggcaacgccactcaggtacagcatctttctgacctgctgaatatgagcgatgtggtgagtctgcatgtaccagagaatccgtccaccaaaaatatgatgggcgcgaaagaaatttcactaatgaagcccggctcgctgctgattaatgcttcgcgcggtactgtggtggatattccggcgctgtgtgatgcgctggcgagcaaacatctggcgggggcggcaatcgacgtattcccgacggaaccggcgaccaatagcgatccatttacctctccgctgtgtgaattcgacaacgtccttctgacgccacacattggcggttcgactcaggaagcgcaggagaatatcggcctggaagttgcggtgcacatccacgaaaaccgtccgggcgtgctaactgcgctgaacaaaatcttcgccgagcagggcgtcaacatcgccgcgcaatatcttgccaactgccgcccagatggttatgtggaaagacaacaagaaaggggcaatacgggtagctgcgaaataagcataagtaatattcaacacattgggaacgtgcgattaaaaaacattagtaaactggagaatatggagttctgcgctacaaaacaacgggtgtattttagtgataaaaacaagaaggctagttataaaataattaattatggagactattatgatgttgattattatgataacaatttgaaaaatgaagtttttgactggattgtaattgcaggtgccgatgagtggcaggaaattgaagattttggacatgaaagacttgaatggctaaagaaatatggtgattttgataatggcattccggtcgatgacaccattgcacgcgttgtgagtaacattgacagtttggcctttgaaaagatgtttattgaatggatgcaggagtgccatgaaatcactgatggtgaaattatagcaatagatggaagaccataa

SEQ ID NO: 136663 - DNA, 855 bp, Homo sapiens
atgcaggatgagctggtaaaattacaggcgaaacatcagcgcaccattgtctttatttcccacgatcttgatgaagccatgcgtattggcgaccgaattgccattatgcaaaatggtgaagtggtacaggtcggcacaccggatgaaattctcaataatccggcgaatgattatgtccgtaccttcttccgtggcgttgatattagtcaggtattcagtgcgaaagatattgcccgccggacaccgaatggcttaattcgtaaaacccctggcttcggcccacgttcggcactgaaattattgcaggatgaagatcgcgaatatggctacgttatcgaacgcggtaataagtttgtcggcgcagtctccatcgattcgcttaaaaccgcggctactgacggggtggtgcgtaacggcaaaagcaccgccggacatcagcgctatctctgctctcactgccgtaaaacatggcaactgcagttcacttacaccgcttctcaacccgcacgtcgtatcgaagtacgtttcccggatccggcagctaacccgtacctgtgctttgctgccctgctgatggccggtcttgatggtatcaagaacaagatccatccgggcgaagccatggacaaaaacctgtatgacctgccgccagaagaagcgaaagagatcccacaggttgcaggctctctggaagaagcactgaacgaactggatctggaccgcgagttcctgaaagccggtggcgtgttcactgacgaagcaattgatgcgtacatcgctctgcgtcgcgaagaagatgaccgcgtgcgtatgactccgcatccggtagagtttgagctgtactacagcgtctaa

SEQ ID NO: 136664 - DNA, 810 bp, Homo sapiens; identical to SEQ ID NO: 128992

SEQ ID NO: 136665 - DNA, 1740 bp, Homo sapiens
atgggtggttgtgtgtgcgatcacgcgcaaaggaggaccaagcagccccatgaggaccgccacccccgacatataagctgttgtggagagagtgataaatgtacgcgtcagagaggggtccacatacttgcagcacacctggctggctatgtgtacaaaatgctgctttgttcaggggaccttataaaacatggagaagtaggtcttccaggcccccggagcggaagggggtacgaggatcgcgagcggtttcgaaaaccagtccgatttcggataccacgtcggatatccataaagattccgctttacgaaggggcggtttcacattatgcgtcttccctgagagagtgggcgcaatctgagttggcgaatattgggaattccgcttatccgcagatcgcggataccgcgattgtggaattagcgaatgtccggtccccaatgttagaggtgcgggtggacaattacggaattctcaattctaaatatgcgatggcaaattgggggtcccagggcatccccctcctggagggttacggggggatgcagatcaagagcgggtccaattcggattcactaagaggcctcaattggccgcagtcggtaacctcgcgcatacagccgggcagtgacgtcatcgtctgcgcggaaatggacgaacagtggggctatgtcggggctaaatcgcgccagcgctggctgttttacgcgtatgacagtctccggaagacggttgttgcgcacgtattcggtgaacgcactatggcgacgctggggcgtcttatgagcctgctgtcaccctttgacgtggtgatatggatgacggatggctggccgctgtatgaatcccgcctgaagggaaagctgcacttttatcggcataaaagtcatatgcataaagcgttggggcaacgaagattgcattgtgcatcgcaccaaaagctttcatcaaagcggcatcatcaaactcgccgaggatttctacgtttaatccctgggcgatggagagagcccatttcaaaggaggtcagcgcagagagtccccaagtgttgtcaagccgggtctgtcagggcccccccggttccgtgggccccctgaagggcctgaacattccttcattcaattccagccgcaaaaacgcaggggccacccccgcgcaacactctcgtcgacactccgcaacacctttgacaccaacagcggagaacccgccagccacagctcgcgttgtctctcagaacctaggtcttcctaaacaggatattgcgcggcgccctgttcgcgcccaaggcgtgcctcaaaccggacctggtgatctccccccgtgggcctccccaagggctgggggttacgagggtacaagtctccgcacatacgaacccccgcacgacgcaccgcaacaccccgcactacacacgcaacacacagaccagaccggaaagcacgccgcgccgggacacaaccacaccacagcagagacataccccaccgccacatacagggaaaagacgcggaacacccgaaacctgaaagacttccagcccacagaacgccagctaacgacatccgaccacgacagccagcgacacgcagcgcggtgcagagctgggctcatcctactaacacacacagaacggcgaacgccgccacatccgtggtcccaagaagcactgaacggggccagcgaggccccagaacaccgaacccaacggacacaacagcgcgacctagccaatgtg

SEQ ID NO: 136666 - DNA, 3147 bp, Homo sapiens
atgggattatccggctcgggtaaatccacaatggtacgccttctcaatcgcctgattgaacccacccgcgggcaagtgctgattgatggtgtggatattgccaaaatatccgacgccgaactccgtgaggtgcgcagaaaaaagattgcgatggtcttccagtcctttgccttaatgccgcatatgaccgtgctggacaatactgcgttcggtatggaattggccggaattaatgccgaagaacgccgggaaaaagcccttgatgcactgcgtcaggtcgggctggaaaattatgcccacagctacccggatgaactctctggcgggatgcgtcaacgtgtgggattagcccgcgccattaatccggatatattattaatggacgaagccttctcggcgctcgatccattaattcgcaccgagatgcaggatgagctggtaaaattacaggcgaaacatcagcgcaccattgtctttatttcccacgatcttgatgaagccatgcgtattggcgaccgaattgccattatgcaaaatggtgaagtggtacaggtcggcacaccggatgaaattctcaataatccggcgaatgattatgtccgtaccttcttccgtggcgttgatattagtcaggtattcagtgcgaaagatattgcccgccggacaccgaatggcttaattcgtaaaacccctggcttcggcccacgttcggcactgaaattattgcaggatgaagatcgcgaatatggctacgttatcgaacgcggtaataagtttgtcggcgcagtctccatcgattcgcttaaaaccgcggctgtccctcctgttcagctactgacggggtggtgcgtaacggcaaaagcaccgccggacatcagcgctatctctgctctcactgccgtaaaacatggcaactgcagttcacttacaccgcttctcaacccgccgggcagtgacgtcatcgtctgcgcggaaatggacgaacagtggggctatgtcggggctaaatcgcgccagcgctggctgttttacgcgtatgacagtctccggaagacggttgttgcgcacgtattcggtgaacgcactatggcgacgctggggcgtcttatgagcctgctgtcaccctttgacgtggtgatatggatgacggatggctggccgctgtatgaatcccgcttgaagggaaacttcacagatatgcccccatatgttgaggcatatcctaacgagaatctgacaaccgttatgcctgaacaatatcgttatacgctgcccgtcaaagcgggtgagcagcgtctgctgggcgagttaaccggcgcagcttgtgcaacgctggtagcggaaattgccgaacgtcacgccggtccggtggtactcattgcaccagatatgcaaaatgctctgcgtttgcatgatgaaatcagccagtttaccgatcaaatggtgatgaatctggcggactgggaaactcttccctacgacagtttttcgcctcatcaggacattatctcctcgcgcctttccaccctttaccagctaccgacgatgcagcgtggcgtactgattgttccggtgaatacgcttatgcagcgcgtttgcccacacagttttctccacggtcatgcgctggtgatgaaaaaaggtcagcgcctgtcacgagatgcattacgaacccaactggacagcgccggttatcgccatgttgaccaggtgatggagcacggcgaatacgccacgcgcggcgcgttgctggatctcttcccgatggggagtgagctgccttatcgtcttgatttctttgatgatgaaatcgacagcctgcgggtgtttgacgtcgacagccagcgcacgctggaggaagtagaagcgatcaatctgctgcccgcgcacgaatttccgaccgataaagcggcaattgaactgttccgcagccagtggcgcgataccttcgaagtgaagcgcgatccagaacatatttaccagcaagtgagtaaaggcacattacctgccgggatcgagtactggcagccattgttcttcagcgaaccactgccgccgctgttcagttatttccctgccaataccttgctcgtgaatactggcgatctggaaaccagtgccgaacgtttccaggctgacacgctggcgcgttttgagaatcgcggcgtcgatccgatgcgcccgctgttgccaccacaatcgctctggctgcgggtggacgagctcttctcagagctgaaaaactggccccgggttgcacatccacgtctccggcaggaagtaaaggactctcagagatcccgagtaccagctcgatctgtccggtttctggttcttgccgctgcgtttctccgcatcagttgggtcttgagcctgtcaactggtatcgtcgcgaccgacgggttttatccctcaattccggagcagcctctggctaggctgatccagacgagcggtccccaaccaaggacaacggcctcacaggcgctcatggtccacacgcaggagggtgcccgcagagcttcaagaaggtggttgtcacgcgtgtcgccatctgccctaatcgagaaacgtaccctcagctcgacgcagttgatcaagaagagtggcaatatgcgtataacgattattctggtcgcacccgccagagcagaaaatattggggcagcggcgcgggcaatgaaaacgatggggtttagcgatctgcggattgtcgatagtcaggcacacctggagccagccacccgctgggtcgcacatggatctggtgatattattgataatattaaagttttcccgacattggctgaatcgttacacgatgtcgatttcactgtcgccaccactgcgcgcagtcgggcgaaatatcattactacgccacgccagttgaactggtgccgctgttagaggaaaaatcttcatggatgagccatgccgcgctggtgtttggtcgcgaagattccgggttgactaacgaagagttagcgttggctgacgttcttactggtgtgccgatggtggcccggaaaaactccgcgctcacttccaaaaagactggactcggacccgtgcccctccaagtttccccatttgaccagggcccgcgcgtacctattaaggcccagccgcagccagattgggcataa

SEQ ID NO: 136667 - DNA, 1986 bp, Homo sapiens; identical to SEQ ID NO: 121529

SEQ ID NO: 136668 - DNA, 2193 bp, Homo sapiens
atgggagtaaatgatgcagtcctcgaaatgcatggccttggcaacgattttatggtcgtcgacgcggggtttgaccaactgctggtggttgagccgccgtatgatcttgagctggattttcactatcgcatgttcaatgctgatggcagtgaagtggcgcagtgcggcaacggtgcgcgctgctttgcccgttttgtgcgtctgaaaggactgaccaataagcgtgatatccgcgtcagcaccgccaacgggcggatggttctgaccgtcaccgatgatgatctggtccgcgtaaatatgggcgaacccaacttcgaaccttccgccgtgccgtttcgcgctaacaaagcggaaaagacctatattatgcgcgccgccgagcagacaatcttatgcggcgtggtgtcgatgggaaatccgcattgcgtgattcaggtcgatgatgtcgataccgcggcggtagaaacgcttggtcctgttctggaaagccacgagcgttttccggagcgcgccaatatcggttttatgcaagtggttaagcgcgagcatattcgtttacgcgtttatgagcgtggggcaggagaaacccaggcctgcggcagcggcgcgtgtgcggcggttgcagtagggattcagcaaggtttgctggccgaagaagtacgcgtggaactccccggcggtcgtcttgatatcgcctggaaaggggaagaactgcaggaaacactcacggagcttgatgaccgggcggttgtcgattatctgattaaaaatcctgagttttttatccgtaatgcgcgcgcagtagaagcgatacgtgtgccgcatccggtacgcggcaccgtttcgttggtcgagtggcacatggcccgcgcacgtaatcatattcatgttctggaagagaacatggcgctgttgatggaacaggctatcgccaacgaaggcctgttttatcgcctactctacctgcagcgcagtctcaccgccgccagcagtctcgacgatatgctgatgcgctttcaccgctgggcgcgcgatctcggcctggcagtcgcgatgccagtcactatcaacaagggcaaccagatcattgaaaaccaactggatacagaaacaataactattagttatgaatttatcctctgtcaacatcttatcgcaaataccgagttcagctatttggcactccctgaaaattataaccgtttgtgtttaccaaattcaaaaaaccaaacaaataatcgtttcaaaacgttaaacagcaaagctattggcaggctacttgctgctggtggcgtatacaatgggaacattgaaggattcagagatactgcggaaaaactggctgtccctcctgttcagctactgacggggtggtgcgtaacggcaaaagcactgccggacatcagcgctatctctgctctcactgccgtaaaacatggcaactgcagttcacttacaccgcttctcaacccgccgggcagtgacgtcatcgtctgcgcggaaatggacgaacagtggggctatgtcggggctaaatcgcgccagcgctggctgttttacgcgtatgacagtctccggaagacggttgttgcgcacgtattcggtgaacgcactatggcgacgctggggcgtcttatgagcctgctgtcaccctttgacgtggtgatatggatgacggatggctggccgctgtatgaatcccgcctgaagggaaagctggcacgtaatcagcaagcgatatacgcagcgaattgagcggcataacctgaatctgagcagcacttctatccttgtgttactgaatggtgccacacagttccaggatctgggcgacttgaacaaagaattggaagagacatatacagatagcaaaaatcatatttcctgcgtcggtaatgatttcggtttcaatgatattttctcccgctacgttgaagcggtaggtcgcgaaggcgatgtactgctggggatctccacctccggtaactctgcaaacgtgatcaaagcgatcgcagcggcgcgtgagaagggaatgaaagtgatcaccctgaccggtaaagacggcggcaaaatggctggcacggcggatatcgaaattcgcgtaccgcactttggttatgccgaccgcattcaggagattcacattaaagtgatccatatcctgatccagttgattgaaaaagagatggttaa

SEQ ID NO: 136669 - DNA, 1815 bp, Homo sapiens
atggggctgttctatatgggcgcaccgctggcgttaacactgggatcaccgctttccggcgcgctgttggagatgcatggatttatggggcatcccggctggttctggatgtttgtgattgaaggattgttggcagtcggtgctggggtattcacattcttttggcttgatgacacaccggagcaggcacgttttctgagtaaacaagaaaaaacgttgcttatcaatcaactggcaagtgaagaacaacagaaagtgacttctcggctgagcgatgcgctgcgtaatggccgagtctggcaactagcgattatctacctgaccattcaggtggcggtttacggattaattttcttcctgccgacccaggttgcggcattgctgggaacaaaagtgggctttacagcgtcggtggtcaccgccattccgtgggttgcggccttgtttgggacctggcttattccgcgctattccgataaaaccggcgaacggcgtaatgtcgcagcgctgacattactggcggcgggcattggtattggtctgtccgggctgctttctccagtaatggcgatcgtagcgctgtgtgttgcagctatcgggtttattgccgtgcagccagtgttctggacgatgccgacacaactgctttccggtacggcgctggctgcgggaattggttttgtaaacctgtttggtgcagtgggcgggtttattgccccgatcctgcgcgtgaaagcagaaacgttatttgccagcgatgcggcgggattactgacgctggcagcggtggcggtcatcgaccgacgtggcacatcattaaataggttaaggaacacgatgatcgcattattaagcaatccctttaaagaacgtttacgcaagggcgaagtgcaaattggtctgtggttaagctcaacgactgcctatatggcagaaattgccgccacttctggttatgactggttgctgattgacggggagcacgcgccaaacaccattcaggatctttatcatcagctacaggcggtagcgccctatgccagccaacccgtgatccgtccggtggaaggcagtaaaccgctgattaaacaagtcctggatattggcgcgcaaactctactgatcccgatggtcgatactgccgaacaggcacgtcaggtggtgtctgccacgcgctatcctccctacgctgtccatcctgttcagctactgacggggtggtgcgtaacggcaaaagcaccgccggacatcagcgctatctctgctctcactgccgtaaaacatggcaactgcagttcacttacaccgcttctcaacccgccgggcagtgacgtcatcgtctgcgcggaaatggacgaacagtggggctatgtcggggctaaatcgcgccagcgctggctgttttacgcgtatgacagtctccggaagacggttgttgcgcacgtattcggtgaacgcactatggcgacgctggggcgtcttatgagcctgctgtcaccctttgacgtggtgatatggatgacggatggctggccgctgtatgaatcccgcctgaagggaaagctgcacacacaagaacggaaagcacgaagcaagcaacagaaagatgcagacaccgcaccacccatacaggtaggcacgcagacgccacagaccgtacacgccgcacgcgacactagacaagcgagcccacgagcaagcaagatatcacaacacagacaggctgacggagacaagcgccagacgagacacgccgaagctcaggcaacacgcacacacaccggaagaaggaagacgataaaagagacagcaacg

SEQ ID NO: 136670 - DNA, 3774 bp, Homo sapiens; identical to SEQ ID NO: 129000

SEQ ID NO: 136671 - DNA, 1896 bp, Homo sapiens
atggtgatctgccagccaattaacggtggctggcagtggccgccttcaaccggaaccgatccagcgccgtattttcgtattttcaacccgactacccagggcgagaaatttgatcatgagggcgagtttatccgccagtggctaccggaactgcgcgatgtgccagggaaagtggtgcatgagccgtggaagtgggcgcagaaagcagcagcacccccccagacccgccttcactccacccctaccaccatcccgcaccgggtcccaggccacacacccaacctcaagccaatctgggaggtggacttaccaaagttcagtcacaaagcaacatcacacgcaacagacaaaccctcagacacgacacagaatgaccaaatagttatcgcgtacatggaaccacctgagatagtccacgaaaccaccacatccagcacccatcctagtctctacattatactcaaaagacagacgagggaactcaggccgcagtcggtaacctcgcgcatacagccgggcagtgacgtcatcgtctgcgcggaaatggacgaacagtggggctatgtcggggctaaatcgcgccagcgctggctgttttacgcgtatgacagtctccggaagacggttgttgcgcacgtattcggtgaacgcactatggcgacgctggggcgtcttatgagcctgctgtcaccctttgacgtggtgatatggatgacggatggctggccgctgtatgaatcccgcctgaagggaaagctgcacgtaatcagcaagcgatatacgcagcgaattgagcggcataacctgaatctgaggcagcacctggcacggctgggacggaagtcgctgtcgttctcaaaatcggtggagctgcatgacaaagtcatcgggcatctatctgaacataaaacactatcaataagttggagtcattacccaacccgaataacaaactgccgccatcaccacaacaccgcggtaccagctatagtttcagtgctcgaagtggtcactgagtggctgaaagataacccgaaactggcggcggtgggcgacaaagtgaccgataaagattacttcggcactggcctcggcatcgcggtacgtcagggcaacactgagctgcagcagaaactcaacactgcgctggaaaaagtgaagaaagatggcacttacgaaaccatctacaacaaatggttccagaacgccgccgggatgaccgtcggccttgccgtttgtgcattgattgtcgggctggcgctggcgatgttctttgcggtatgggagtcggcaaaatggcgtcctgtcgcgtgggcaggttcagcgctggtaaccattctgcgtggcctgccagaaattctggtggtgctgtttatctattttggctcctcgcagctgctgctgacgctttcggatggcttcactatcaatcttgggttcgtgcagatcccagtgcagatggacattgagaacttcgacgttagcccgttcctttgtggtgtcatcgctctgtcactgctgtatgccgcctatgcctcgcaaacgcttcggggcgcgttgaaagcggtgccggtgggtcagtgggagtctggtcaggcgctggggctgtcgaaatcggctatctttttccgtctggtgatgccgcagatgtggcgtcatgcgctgcctggcctcggtaaccagtggctggtgctgctgaaagataccgcgctggtcagtttgattagtgtgaatgatttaatgctgcaaacaaaaagcatcgctactcgtacccaggaaccatttacctggtacattgtggcggcggcgatttacctggtgatcaccctgctcagtcagtacattctcaaacgcattgacctgcgcgcgacacgttttgagcggaggcccagctaa

SEQ ID NO: 136672 - DNA, 4356 bp, Homo sapiens
atggccgcattaccatacatgcaactgtacatagctgattacctggctgacaccatgcatttgtcagcagaggagcatggtgcgtatttgttgctgatgttcaattactggcaaacaggaaagccaatacctaaaaacaggctggcaaaaattgcccgtctgactaacgagcgatgggctgatgttgaaccatccttgcaggagtttttttgcgataacggcgaggaatgggtgcatcttcggattgaggaagatctggcatcagtcagggaaaaattaaccaaaaaatcagccgcaggaaaagcatctgttcaggccagaagaagcagaaaggaagcagatgttcaaacaaaacaagagagaaatttaacaggtgttcaaacagatgttgaagtggtgtttgaacatgatgtcaacacaaaggcaactaataaagatacagataaagatctaaaaacagatccccccctaaatcccccccgggggaatcgaggtgtcaaaaagtttgaccctctggatattactttgccgaactggatttctgtctcgctttggcgtgagtgggttgaatttcgccaggcattgcgaaaaccgattcgaacggagcagggcgctaacggggcgatacgggagctggaaaaattccgccagcagggtttttcacctgagcaggtgattcgacacagcatcgccaatgaataccagggcttgttcgcgccgaaaggtgttcgacctgagacgttactccgacagactggccccgtcacatgtaaccgcgccattcaagacggtagcggagtggcgcgagtggcaactttccgaagccagaaacgttgtgaggagatcaaccgtcagaatcgtcagttgcgggtggaaaaaattctgaatcgctctggcatccagccattgcaccgcaaatgctcgttttcgaattaccagcggaaaacctggtaccgggaagaaccacttagcggcactatcgggaatcgcctgctgaaagacggtcagacagtgattgtggttaccgtggctgatgttatgagtgccctgcacgccagctatgacgatgggcagtcaggcgaaaaatttttgcgggaactgtgcgaagtggatctgctggttcttgatgaaattggcattcagcgcgagacgaaaaacgagcaggtggtactgcaccagattgttgatcgccggacagcgtcgatgcgcactaaaagcattcgctttttcacccgtggaagatggcatagccgttcgccagttgctgtttactttgttggcaaccgcattgatcgtcccctatttcaaacgctcgtcgcggctactgacggggtggtgcgtaacggcaaaagcactgccggacatcagcgctatctctgctctcactgccgtaaaacatggcaactgcagttcacttacaccgcttctcaacccggtacgcaccagacaatcattgatatggccatgaatggcgttggatgccgggcaaccgcccgcacttatgggcgttggcctcaacacgattttccgccatttaaaaaactcaggccgcagtcggtaacctcgcgcatacagccgggcagtgacgtcatcgtctgcgcggaaatggacgaacagtggggatacgtcggggctaaatcgcgccagcactggctgttttacgcgtatgacaggctccggaagacggttgttgcgcacgtattcgtgtgaacgcactatggcgacgctggggcgtcttatgagcctgctgtcaccctttgacgtggtgatatggatgacggatggctggccgctgtatgaatcccgcctgaagggaaagctgcacgtaatcagcaagcgatatacgcagcgaattgagcggcataacctgaatctgaggcagcacctggcacggctgggacggaagtcgctgtcgttctcaaaatcggtggagaagatcacaagtgggccaaccaccaacgccacacccgggacacagaagacagccaccgacaagagaggcggcaaaaaactaccgatccagataccaatcgggccaatcagcaggattgccagcggtgcggcaatcaacacaatcagcattggtttgaggaagtttttggtcaccgccggtgtaatgctgtccacccagcgttcgatatatgacaggcaccaggtcatcaccagcgccgggatcaccgtgtaggtgtatttcaccgcggtgaccggaatcagggcaaattcgacatgttcaccctgggccgctttcgccatcagttcaataaaactcggatgtaccagcacacccgcgatggcaatcgccagcgacatattggttttaaatttgatggcggcagatgccgcgaccatcagcggcaggaagaagaaagcaccgtcaccaatcacattcagaatggttaaggtcggcgatccttttgtcagcacgccgctcatctcgaggatcattgccagcagtttgaccatcgatccgccgataatcgccgggatcagcggtgacatggtgccgatcagcgcatcgaggatccccgcaccaatgcgacgtagcgtgagtttgggtttacccacgggctgtgcgggctgcatatctcccggcagcaggctgacgacttcctgaaaggcttgtgaaacggtattgccgataatcacctgacactggttgtcactacgtaccacgccgagcacgccggggatggtttttaacgtcgggctgtcgataagtgcatcatctttgataacaaagcgcaaccgcgtcatacagtgcgtgaccgccgagatgttatcaacgccgcccagtgccgctgaatatttttcccgccgattgtgcaaggacaatcggcaaacggtgcagtacactgcgttgattgcgtgtaaagggatgaaaatgatgacgacgatgctggaagtggcgaagcgcgccggggtttcaaaagcgaccgtttcccgcgtgctttcaggtaatggtccggggctcccgacggcagagttcttccagcgagtggcgacactggcgtcgagatcgccttcatcggcggagactttacagccgccaggatggagggtgggatcgccccgcaagcgccagccatgcaaacttaaggtagcgccgagcatatcatccacacgttgcagatcatccgggtgcacgcgcagctgtggtttaccgctgaataacggttcttgctgcaacaactgttggatctgtttgatcagtgccgagttatccaccgttggcgtctgaccgatgacctgacgtgccgcctccagcgccatctgcatcaggcgcgacgctatcacactatcaagtgcatcaagggtagtttgaaattcgctgaccagttgctgcatccgggcatgaattggcgcttgttgagacttcgcctctgccagaccttgctccagcccctgggccagtccttcctgatagccctgcttatgaccttgctggcgaccttcggcaatacccgcctgataaccttgctcatgggcctgcatttgcagttgcgccagttgctgctcaaggctgggttcagcctcttcaatgatggtttcttccggctcgactatgggcacaaactctgccatctcgccagtttcggcaaggcggcgcacaatcagcagaatcgctttctgttcgttttccacctgcgacagacgcaccggaccacggttggcgagatcgtcgcgcagaatatcggcggcacgctgcgacatattgcgcaagaatttctcgcgcagtggctgctcggctcctttcagcgcgatcaacagcgattcggaatccacttcctgcaacagacgctgaatgctgcgatcgtcgacatccaccagattctcgaacaggaacatctcgtcgatgattttctgcgccagctcgccgtcgaattcacgcacggcggtaataacggcttcttcctgctgagttttcatcaggttgataatttcggctgccgttctcacgggggatcctttagagttcgaccactcaggaacacccttgtacacccaggctgcctcccgcacttctggctctcctctctttttcctcatcaccttcttgaacacagcagtactactaatagacttcatttcttcactttcctcagcccctgcaatccagcctttgctgtgttttgaaactgctttactaagatctccagtcccctcaatgtggccacactcattttgccttccaggaatcttccctttcttgaatcttctactgcttctgtcacactcgccagccttctccacaccttctttcttagccctcctcaggacctcgatgtcaggatgttgatgggttggtttgtctggtatcatggcagtagccagttcaaatctaggagtaggaaccat

SEQ ID NO: 136673 - DNA, 1521 bp, Homo sapiens
ctagacgagcagcgcgtacgcgccaacgttgaaggccgcgaatgtaatatctacgttaacttcgccgttgaaccggggcaaaaactgcatgttctggttcgcgatcgtaactacaaaggacactgaacagccgttggaagtccgggtttgtgtgaaaccgtggaaagatggcaagatggtgatggtcagcgaattcttcaatgaagacgatcctgactttgaccactctctcgaccaaaaaatggccattaattgggtagaaagctgggagctcgtactgggttggggcaacacaagctttggttggaccacgacggactgacggccacgtgtttcgtcaaaatggtcttcacgctggataactacacgcgtctgctcgatccgctctatatttgaagtgctattgcactcgctgaatatggcgctgatcgccaccctcgccttgcctggtgctgggcctacccgatatgcctgagtattagtggtggttgaggtgttatgagaaccgccatcgccactgtcatttgctgcaacaactgccaacgtcgccacaccaacagccgttgccacaccgacaactgtcgccgtgccgacagcgccagcagccacgccaccagtggtagtagcagtcgtggttgcgccggtagtggtcgttgtggtgccagtagtacccgtcgttgcctcggtcccgtttgttgcttcaggggcagcaaacgcagctggcgtcgtcaacatgaaggccataaggattgcagaaagcttgtgtttcataacttttcctttattcatcgcatggacaatacggctgtccctcctgttcagctactgacggggtggtgcgtaacggcaaaagcactgccggacatcagcgctatctctgctctcactgccgtaaaacatggcaactgcagttcacttacaccgcttctcaacccgccgggcagtgacgtcatcgtctgcgcggaaatggacgaacagtggggatacgtcggggctaaatcgcgccagcgctggctgttttacgcgtatgacaggctccggaagacggttgttgcgcaccgtctgcggattcacagccgtctgccgattgtgatcccggcacgtatcaccgaggcgctggttgaatgctttgcccgttctacgctgcaaatcttgctggtgaatcacatcaaccatgcccatgaggtagatgaaacattccgtcaggcgatggctaagttgcgccgggtaggcgttactttgctgaaccagagcgttctgttacgtgatgtgaacgataacgcacaaacgctggcaaacctgagtaatgcgttgttcgatgccggcgtaatgccgtattacctgcatgtgctcgataaagtacagggcgcggcgcattttatggtgagtgatgacgaagcacggcagattatgcgtgagttgctgacactggtgtcgggatatctggtgccgaaactggcgcgagaaattggcggcgaacccagcaaaacgccgctggatctccagctacgccagcagtaa

SEQ ID NO: 136674 - DNA, 1598 bp, Homo sapiens
atggaagatgctctgtacgaaatcgcctccatgcgtctgtttgcccggttatccctggatagcgccttgccggaccgcaccaccatcatgaatttccgccacctgctggagcagcatcaactggcccgccaattgttcaagaccatcaatcgctggctggccgaagcaggcgtcatgatgactcaaggcaccttggtcgatgccaccatcattgaggcacccagctcgaccaagaacaaagagcagcaacgcgatccggagatgcatcagaccaagaaaggcaatcagtggcactttggcatgaaggccccacattggtgtcgatgccaagagtggcctgacccacagcctggtcaccaccgcggccaacgagcatgacctcaatcagctgggtaatctgctgcatggagaggagcaatttgtctcagccgatgccggctaccaaggggcgccacagcgcgaggagctggccgaggtggatgtggactggctgatcgccgagcgccccggcaaggtaagaaccttgaaacagcatccacgcaagaacaaaacggccatcaacatcgaatacatgaaagccagcatccgggccagggtggagcacccatttcgcatcatcaagcgacagttcggcttcgtgaaagccagatacaaggggttgctgaaaaacgataaccaactggcgatgttattcacgctggccaacctgtttcgggcggaccaaatgatacacagtcaatattccgcgttgaggagacatcaagatggatcagtctcgtttaagccggagacacacacctgcgatgctcatcgccctgctctaaagccggcgaatgattatgtccgtaccttcttccgtggcgttgatattagtcaggtattcagtgcgaaagatattgcccgccggacaccgaatggcttaattcgtaaaacccctggcttcggcccacgttcggcactgaaattattgcaggatgaagatcgcgaatatggctacgttatcgaacgcggtaataagtttgtcggcgcagtctccatcgattcgcttaaaaccgcggctgtccctcctgattcagctactgacggggtggtgcgtaacggcaaaagcaccgccggacatcagcgctatctctgctctcactgccgtaaaacatggcaactgcagttcacttacaccgcttctcaacccgccgggcagtgacgtcatcgtctgcgcggaaatggacgaacagtggggatacgtcggggctaaatcgcgccagcgctggctgttttacgcgtatgacaggctccggaagacggttgttgcgcacgtattcggtgaacgcactatggcgacgctggggcgtcttatgagcctgctgtcaccctttgacgtggtgatatggatgacggatggctggccgctgtatgaatcccgcctgaagggaaagctgcacgtaatcagcaagcgatatacgcagcgaattgagcggcataacctgaatctgaggcagcacctggcacggctgggacggaagtcgctgtcgttctcaaaatcggtggagcagcatgacaaagtcatcgggcattatctgaacataaaacactatcaataa

SEQ ID NO: 136675 - DNA, 4071 bp, Homo sapiens
  misc_feature (1)...(4071): n = a,t,c or g
atggccacggattcggtcgggttaaactgcacgccagctccccacgccagagacgtgttgctgtggcgaccgtcatcacttccggtcagcacgtcgtgcgttttccccttgggaaggattggcgacgtgtctgacgagagcgacgacaaaacagaagcccccacacctcaccgactagaaaaagcgcgggaagaggggcaaatcccgcgttcccgtgaactgacctcactgctgattttgctggtgggcgttagtgttatctggtttggcggtgtgtcgctggcccgtcgattgtcgggcatgctctccgctgggctgcattttgatcacagtattatcaatgacccgaatctgatcctcgggcagattattctgctgatcagagaagccatgctggcgctgctgccgctgattagcggcgtggtgctggtggcgctcatttctccggtcatgctgggagggctggtatttagcggcaaatccttgcagccgaagttttccaaactcaacccgctaccgggcattaaacggatgttctcggctcagactggcgcggagttgcttaaagcaattttgaaaaccatcctggttggcagcgtgacggggttttttctctggcatcactggccgcagatgatgcgcttgatggccgagtctccgattaccgccatgggtaatgcgatggatttggtagggctatgcgcactgctggtggtgcttggtgtcattccaatggtgggatttgacgtctttttccaaatattcagccacctgaaaaagctgcgtatgtcacggcaggatattcgtgatgagttcaaacaaagcgaaggtgaccctcatgttaaagggcgatccgccgcccctgcaaaatcggtttaccgggtggaccaaccgaatgtcccgatagggcccaagtgcgccgaacacacgcgcgttagaaagagatttctcccgtggcgcgacatggtattcatagacaccactgtcagtacaattgcggctaagtcatcggaaatattgtcggggattttgaaggcgttgaatgccgggatcaccagatattcggcaaagcagcccgggcgattaacaccaacgcctatcgtgttgcggcacaaatgggtgatatggccttcgccagaaacgcgatcgccgatcttgaagcctttcacttccgtgaccgaatacctgaccactgtcaccgaacagtattgcagtggcccaacgaacacatctggcaaccgggatggtttatttgcgaccactcatcccagttatagatgtgaacgcgataacgcccagttgtttaccaatacgcgtaaatgcttctactgcacgcgtaatttgctcaggggtatgcgccgcagacatctgggtacgaatacgcgcctgacctttcggaacgaccggatagaagaaaccggtaacgtaaatgccctctttttgcagctcacgggcaaagttctgcgccactaccgcatcaccaagcatgaccggaataatggcgtgatcggctcccgccaggacggtcacgcagttcggctgcccgcttcgaccatctccagtactttgatggacgcggcaacaatggccggtgccagcgagttggagaacagggtcaacgccggtgatcatttctgtaaccgggtgttctacctgaatacgggtgttcatttcgatgaaatagaactcgccgttttcgaacaggaactcgaaagtacctgcaccgcgatagccgatatcaacacacgctttagcgcaacgttcgccgatgtagcgacgcagttccggggtaatgcccgttggtggcgattcttcgaccactttctggtggcggcattttttcgcttccgcacgggttatggagatggattgtgccagttatgcgtcgccgcgcattacgcgcataccgcagacacgccgcactccgccggaggctttgataatcaccggataaccaaagcgtttaacaatggaacggtttttatccagatcgtcgcccatcgggctgtcagaacccgccaccttcgccatgtgcgccatccagcacaatcatccttttcatcatttatccttttacgcacaccacctgacgcagggaggaacccctgggaggattctaaacgggctgtgcatattgtcccttattatttcgctaacgacacgaagcttcctccattttttgggcccccttccgtcctgataactcataagtcaagaattcgacccagttcttgcagcgcaggggaatatgggcacatccgggcaatacgaacaatgtttgcgaatctgctagtggaacatggtccgaaagagatgacaacggaaggggccaggaaacaagcaggcccgagttcggtaaccctgggcatacagccggccagtgacgtcatcgtctgcgcggaaatggacgaacagtggggctatgtcggggctaaatcgcgccagcgctggctgttttacgcgtatgacagtctccggaagacggttgttgcgcacgtattcggtgaacgcactatggcgacgctggggcgtcttatgagcctgctgtcaccctttgacgtggtgatatggatgacggatggctggccgctgtatgaatcccgccctgaagggaaagctgcacgtaatcagcaagcgatatacgcagcgaattgagcggcataacctgaatctgaggcagcacctggcacggctgggacggaagtcgctgtcgttctcaaaatcggtggagctgcatgacaaattggagtcattaccgggccaaatcgataaatcgctcgatgaagcctcactcagcctgcgcgccggttccctgcgtaccattacgcacatcctgctgccgctgctgcgcccggcgatcctctcggcgctgatttacagctttgtgcgcgccattaccaccgtcagcgccattgtgttcctcgtcacgccggatacccgcgtagcgacggcttacatcctcaaccgcgtggaagatggcgaatacggtgtagcgattgcctacgggttccattctgatcgtggtgatgctggcgattatcttcatctttgactggctgatcggtgaatcacgtacctcccgttcaaaagccaaagacaggcgcggcaaatcctttaccgtcaatttcgctaaacctggcaactacaatctgacattacgcgataaagacggcttaattctcgctgggttaagtcatgccgtcagcggtaagggcagcacggcgcatactggtacggtagatatcgtggcggataaaacgctgtaccagccaggcgaaaccgcgaagatgctgattacctttccggagccaattgatgaagcattattgacgctggaacgcgatcgcgtggaacagcagtcgctgctttcgcatccggcaaactggctaacgctacaacgtttaaacgatacccagtatgaagcccgggttccagtgagcaattcctttgcgcctaacatcactttttcggtgctgtatacccgtaacggtcagtacagttttcagaacgccgggatcaaagttgccgttccccagctggatatccgggtgaaaacggacaaaacccattaccagcctggtgaactggtcaatgtcgaattaacctcgtcgctgaaaggtaaacctgtttctgcgcagctaacggtaggcgtggtcgatgaaatgatctacgcgctgcaaccagaaatcgcgccgaatatcggcaaatttttctatccgctggggcgtaacaatgtgcgtaccagctccagtctgtcgtttatcagctacgatccaggcgctctccagcgagccggttgcgctctggcgcaactaaccgntcagcgagcggcgaaagtaaaaatgcttgaacgtccacggcgtgaagaggtggataccgcggcatggatgccgtcactcacaaccgataaacaaggcaaagcgtatttcacgttcctgatgcctgattcgttaacccgctggcgtatcaccgcgcgtgggatgaacggcgacgggctgtcggcaggggcgtgcttagaattcatccgcatgccagcaggaggggacggccgctgggattggcagaaatact

SEQ ID NO: 136676 - DNA, 1236 bp, Homo sapiens
atggcaaatgacttgccacacagcaattcaggggatggccagaaacccagttcccctgatttattcacggctccactcctggcagatcccaccgtgggcttcctccctaatgatgccgaggaactattcatctttctcacggaaataactgagatcaccattccatgccgagtaacagacccacagctggtggtgacactgcacgagaagaaaggggacgttgcactgcctgtcccctatgatcaccaacgtggcttttctggtatctttgaggacagaagctacatctgcaaaaccaccattggggacagggaggtggattctgatgcctactatgtctacagactccaggctgtccctcctgttcagctactgacggggtggtgcgtaacggcaaaagcaccgccggacatcagcgctatctctgctctcactgccgtaaaacatggcaactgcagttcacttacaccgcttctcaacccgccgggcagtgacgtcatcgtctgcgcggaaatggacgaacagtggggctatgtcggggctaaatcgcgccagcgctggctgttttacgcgtatgcacagtctccgcgcacgacgcgttgttgcgcacgtattcggctgcacgcactatggcgacgctggggcgtcttatgagcctgctgtcaccctttgacgtggtgatatggatgacggatggctggccgctgtatgaatcccgcctgaagggaaagctgcacgtaatcagcaagcgatatacgcagcgaattgacgcggcataacctgaatctgaggcagcacctggcacggctgggacggaagtcgctgtcgttctcaaaatcggtggagctgcatgacaaaccatcaccgcaacaccgcgaaggggtgaaagatgtgatgcgctttaacgagccgatgtacccgttggagagccgaccgcgtctgtatgtctgtcatttgcggaacggtgcacaagcgtctggccgacgatgtcagttaccaatggggtgcgcatgccatcccgtatcccagagaaacgatcgacccaaccgaagaccggagagacacgcaacaagaaagacaacaacacgacaaagacagcaaaacagccgacagcacaaacagacacaaaagaaggccaaaccgaacaaacgcagagcaacagaacgaggaaagggaccacaacaaaaggcagagaggcccaagagacacacccactgctttttaaagctgcagtga

SEQ ID NO: 136677 - DNA, 2892 bp, Homo sapiens
  misc_feature (1)...(2892): n = a,t,c or g
ggcacgaggccagctcgccgctcgctatggcgtcgctcaccgtgaaggcctaccttctgggcaaggaggacgcggcgcgcgagattcgccgcttcagcttctgctgcagccccgagcctgaggcggaagccgaggctgcggcgggtccgggaccctgcgagcggctgctgagccgggtggccgccctgttccccgcgctgcggcctggcggcttccaggcgcactaccgcgatgaggacggggacttggttgccttttccagtgacgaggaattgacaatggccatgtcctacgtgaaggatgacatcttccgaatctagattaaagagaaaaaagagtgccggcgggaccaccgcccaccggtgtgctcaggaggcgccccgcaacatggtgcaccccaatgtgatctgcgatggctgcaatgggcctgtggtaggaacccgctacaagtgcagcgtctgcccttactatcgacttgtgtagcgtctgcgagggaaagggcttgcaccgggggcacaccaagctcgcattccccaagccccttcgggcacctgttctgagggcttcttcgcacagccgctggcttccggaaggttgaaacacggacactttcgggtggccagggtggggaaatgggtccaccagggaaactgggagcccacgttccttcctcgtgcagggggaggcccggcctgggccccacggcagaatcagcttctggtccatcggaggatccgagtgtgaatttcctgaaagaacgttggggagagtgtggcaagctgcctttagccctctggaattttgaagttgatatcgatgtggagcacggagggaaaagaagccgcctgacccccgtctctccagagagttccagcacagaggagaagagccagctcacagccaagcagctgctgctctgatcccagcaagccgggtgggaatgttgagggcgccacgcagtctctggcggagcagatgagaaagatcgccttggagtccgaggggcgccctgaggaacagatggagtcggataactgttcaggaggagatgatgactggacccatctgtcttcaaaagaagtggacccgtctacaggtgaactccagtccctacagatgccagaatccgaagggccaagctctctggacccctcccagggagggaacccacagggctggaaggaagctgccttgtacccacatcttcccgccagaggttgaacccgcggcttgatttgagtccctctcccagatggttgttccatggggtttctcttgattgaagggcggctgggttcaccagggttcctgcagaccaagaaactatgacattcggagcggctctgggacaccatcccagttattcaaaagcatcccccgccgttgtgaacactttttggccacctcttcttgcggtgcccctcttctgtctcatagttgtgttaaagcttgcgttagaattggcaggtctctgtacgggccagtttctcttgccttcttccaggatcaggggttagggtgcaaaaaagccatttagggcagcaaaaccaagtgacatgaaggggagggtccctgtgtgtgtgtgtgtgctgaatgtttccctggggtgcccctggctccttggcaagcaagggctggnccctgcgaggacccaaggcttcacttgcagcgcggcttccctgacccccttccntgccagggggcttaccgttagccaggcccagcacataggcttgccttaatggcttttcactttcctcttttgttttaaatgactcataggtccctgacatttaagttgattattttcctgctaacagaccctggtacactctgattttaagataaagtaagcctaaggtgttgtcaagcaggcaggctggggaaggccaagtgttgtggggcttccctgcctgggactgaagaaggctccacgaagggcaatccgcaaatgttggtttcacttgagaacttgcctcctgggtctcctcaccactgtagttctctcagtttccaaacccatcagctggcttttaaaataagatctcttatgtagccaatcctgttaaatttgtaaaccaactaatttaaatggcatcagcactttaaccaatgacgtttgcatagagagaaatgattgacagtaagtttattgttaatggttcttacagagtatctttaaaagtgccttatgggaaccctgtccctcctaacaagtgtatctcgattaataacctgccagtcccagatcacacatcatcatcgaagtcttccccagttataaagaggtcacatagtcgtgtgggtcgaggattctgtgcctccaggaccagtggcccaccctctgcccagggagtccttgcgtcccatgaggtcttcccgcaaggcctctcagacccagatgtgacgggagacctggacgcccgagccaagaatgagtgctaccgagccacgttccggctgcccagggatgagcggctagacggccacacaagctgcaccctgtggacgccgttcaacaagctgcacatccctggccagatgttcatctccaacaactacatctgcttcgccagcaaggaggaggacgcttgccacctcatcatacccctgagggagtgtgggggccttatttaccgcccacctacagcagacacggaggcggtgcagaggagtggcttgcttctgggtccttctcaagaacttatgccccagaggatgaagtcccagagagaggctgacccgcggctgattgagtccctctcccagatgctgtccatgggcttctctgatgaaggcggctggctcaccaggctcctgcagaccaagaactatgacatcggagcggctctggacaccatccagtattcaaagcatcccccgccgttgtga

SEQ ID NO: 136678 - DNA, 1371 bp, Homo sapiens; identical to SEQ ID NO: 135917

SEQ ID NO: 136679 - DNA, 671 bp, Homo sapiens
ctatgctatcacaacctgacagtttatttttgcataggaccttccggtgtgccgccttgtggtcattgtggtcccatggaccccttctctgtaacgcgttggtttccgcgttgcccctaagtgttccctggtcctttgggatctcttgtcgatatttgcggcccttcccgggttcccttcccctgggtggtccccgcggtcttgcccgtacagtttgtgcaacgcctgccccgtttttttcgctgtccccccgtactggtcacatcggtcatcaggagtattagcacactgattcaggctctgggctcctccccgttcgctcgccgctactgggggaatctcggttgatttcttttcctcggggtacttagatgtttcagttccaccggttcgcctcattaacctatgaattcagttaatgatagtgtgtcgaaacacactgggttaccccattcggaaatcgccggtaataacggttcatatcaccttaccgacgcttatcgcagattagcacgtccttcatcgcctttgactgccagggcatccaccgttgtacggttagtcgcttaacctcacaacccgaagatgtttctttcgattcatcatcgtgttgcgaaaatttgagagactcacgaacaactttcgttgttcagtgtttcaattttcagctt

SEQ ID NO: 136680 - DNA, 1200 bp, Homo sapiens; identical to SEQ ID NO: 136648

SEQ ID NO: 136681 - DNA, 641 bp, Homo sapiens
ctactgacggggtggtgcgtaacggcaaaagcaccgccggacatcagcgctatctctgctctcactgccgtaaaacatggcaactgcagttcacttacaccgcttctcaacccggtacgcaccagaaaatcattgatatggccatgaatggcgttggatgccgggcaacagcccgcattatgggcgttggcctcaacacgattttacgtcacttaaaaaactcaggccgcagtcgccgggcagtgacgtcatcgtctgcgcggaaatggacgaacagtggggctatgtcggggctaaatcgcgccagctggctgttttacgcgtatgacagtctccggaagacggttgttgcgcacgtattcggtgaacgcactatggcgacgctggggcgtcttatgagcctgctgtcaccctttgacgtggtgatatggatgacggatggctggccgctgtatgaatcccgcctgaagggaaagctgcacgtaatcagcaagcgatatacgcagcgaattgagcggcataacctgaatctgaggcagcacctggcacggctgggacggaagtcgctgtcgttctcaaaatcggtggagctgcatgacaaagtcatcgggcattatctgaacataaaacactatcaataa

SEQ ID NO: 136682 - DNA, 754 bp, Homo sapiens
  misc_feature (1)...(754): n = a,t,c or g
gccatgaggacgcctctagaggatatggcggatataaggaatatacagcgcctcaaccagggtcaggcgggacattactttatggatatattttgacgtttgctctcccgcacgaattcctggtacaaatgcaccggacttcttcaggttatctgctgtttcacgcgggttgaaaaccaacgccgtgtagaagaaacagaagaagatgattgcagacgcatagagtaacacataaagcggttgcccaggctgcaaatacagcgaaattgttgtcagccagttccaaccagtaccgcccccgaaccatgacgcgatggtcgccgggaacagaataatactggaagcgaagattgccgggattacccccgccatattcactttcagcgctaaatgcgccctctgtgcagcatagacacgacgaccttgctcacgttccgcgtagtttaccacaatgcggcgctccccacgctcaacaaatacaacaaagaccgtcactgcnaatactaatactgccaccaacagcaacacgaggaagtgcaggttgccttgacgcgcttgcttgatagtatgggcaatggctgggcgggagtcccgggaaaatacccgggaaagataatgcattgaataaaggtggtggaaacgtggtcaagaaaccggtcccccaacaaattagggaatatggttcttggacccgcctaacaacaccgggaagtagaatgcaaagcccggttaatcaccaggctttgataccagg

SEQ ID NO: 136683 - DNA, 739 bp, Homo sapiens
atgaccgctcaagtgctggcgcaagagcactcgcaaccgcagctgattgttctacatctgatgggctcacatccgcaggcctgcgacaggacacaaggaaaatacgaaaccttagtgcaatcgaaagaaacgtcgggctatctctatcccatgccgcaaacggacgatttcctgcgcaagctgtacgatcagttacgcaacagcggcagcagcttctcgctggtttacttttctgaccacggtctggcctttaaagagcacggtaaagacgtgcaataccttgcccatgatgataaatatcagcaaaatttccaggtgccttttatggtcatttccagcgacgataaagcgcatcgtgtgattaaagcccgccgctcagccaatgacttcttaggctttttctcccagtggacggggattaaagcgaaggaaattaacatcaaatacccgtttatatctgagaagaaagccgggccgatatacatcaccaacttccagttacagaaggtggattacaaccatctcggaaccgatattttcgacccgaaaccttaaaaacaaaaatccgccccgagaggcggattttttatatcaccaaagtgattagaagcggtaaccaacaccggcaatccaggtgcctacgtcaacgctacgaatacggctctgctcgtaagagaagtccagagcaacgttttccatcgggttgaactgcagacccgcaccgtaggagaaaccgtag

SEQ ID NO: 136684 - DNA, 1908 bp, Homo sapiens; identical to SEQ ID NO: 136649

SEQ ID NO: 136685 - DNA, 2340 bp, Homo sapiens
atggctcagttagtaaagagcttcctgaagaaggagagggagaaggaggagaaggaggaggtagaagaggaggaggaggaggagaagaagaagaggaggagagaaggagagaaggaggagaaggaggagaaggagaaggagaagaagaagaagtttaagaagaagaagaagaagaagaagaagaagaagaagaagaagaagaagaagaagaagaagaagaagaagaagaagaagcagctgtcactagtcacagtaatgtcacagcaatgccagctctggagaaatgaagccaggaccactggggcttgcttgcccagccccacagtttcagctgcagcaccccccatcgtctcaacaacagtcacagcatttgcagcagctacacttgcaaagggtgacctgaggtccagggcctccagcaagcaggtgccgctgctcgtcgtcctggtgtgggtctggccgcacccagggtggtttgtgaaggcaggctccgtggctctgggctccagtccaggctgtgtcctggagcttctgtgtaagctactgacggggtggtgcgtaacggcaaaagcaccgccggacatcagcgctatctctgctctcactgccgtaaaacatggcaactgcagttcacttacaccgcttctcaacccgccgggcagtgacgtcatcgtctgcgcggaaatggacgaacagtggggctatgtcggggctaaatcgcgccagcgctggctgttttacgcgtatgacagtctccggaagacggttgttgcgcacgtattcggtgaacgcactatggcgacgctggggcgtcttatgagcctgctgtcaccctttgacgtggtgatatggatgacggatggctggccgctgtatgaatcccgcctgaagggaaagctgcacacacaagaacggaaagcacgaagcaagcaacagaaagatgcagacaccgcaccacccatacaggtaggcacgcagacgccacagaccgtacacgccgcacgcgacactagacaagcgagcccacgagcaagcaagatatcacaacacagacaggctgacggagacaagcgccagacgagacacgccgaagctcaggcaacacgcacacacaccggaagaaggaagacgataaaagagacagcaacgcagcaagcatacgccgacgagcagacacgacgaacagcaagaacacaccgcagaacagcacgacacacagcagcacacacacacagaacaagagtagcagcaagacagacgacagagaaagataacgagcagagcgacacgcaaccaccgacacaaaagacaccgagcgcgaccgcaacagcacacacaccacggcgaacagagacgaccactaacatagtacaagcacgacacacgagcgcgcgtgagagaaaccacacgcgacagcaccaggcgacacgccgagagacaacaacaaacgcacacaccaacacaccacactaccacgcagagcacacacaatcacgcagccagcaacagacgacaagcaccgagcgaccaacaacagacagcagcacaacaataaacaacaacaaccacacaccacgaacagtcagagacgaacgacgcatgacacagcacaagcacccgagcagagcatcaaccacaacgaacagaaccacaaccacaggcgcataccaacacacacagagagatacacgagacacgagacgagatactcacgaagacaccacaacacaacagccgcacactactacaccgacagccaacgaagcagcatacactgcacacacgacaaagacagacgaccaccgacacacagcagacgacacgcagaaaaacaacaaagacgagacaaaacgacaagcgagacaacatcaacgaagcgcaacacacacaagcacaggcaaaacagaagacgaccacaagaacagaaagaagacagaccaagaagcaaagaaacaagagcacacacacacagacaaacgcagcacgaagatacaaaacgcgaggcgaacacaccaagcacaccgagaaccgctacgcgctgtgttgccgcgggtcccgtcctttctctttatcgttggtcgccgttctttctgtttggtcctccaccctgtttcttctctgtgttgttgtgtgggagtgtctgtatttgtgttctccctctctcctcgccgcctctgcgtcgcctgcctccggccggccggtcctggcccgggacagtttctgattagctgcgtcctgaacgctcgagctagcttcctctcctgccaacctggattaggcagtgaccccaccaccatcatggtcttttgtgtaaccagagtcttgagcagatgctattaa

SEQ ID NO: 136686 - DNA, 500 bp, Homo sapiens
tggctgccatcatacagaggccaacaccttgagcccaggggatggtgaagagagaaaatggaaggaacaaggttcctcatctccagactgttacgagaatgagcaacggccggatgtccttcctgctccgctactgaaggcgtggtgcgtaacggcaaaagcactgccggacatcagcgctatctctgctctccttgccgtaaaacatggcaactacagttcacttacaccgcctctcagcccgtgcacgcattatgggcgttggcctcaacacggttttacgtcacttaaaaaactcaggccgcagtcggtaacctcgcgcatacaaccgggcagtgatgtgattgtctgcgctgaaatggacgaacagtggggctacgtcggtgctaaatcacgtcagcgctggctgttttacgcgtatgacaggatacggaggacggttgtggcgcacgtcttcggacctgcaggcatgcaagattcgcgacagagcttacattcga

SEQ ID NO: 136687 - DNA, 832 bp, Homo sapiens
actgagcccgactctagaggatcaggcagataaaggtaatatacagtgcaccaaccagggtcaggcgggtcattactttatcgatatacttcgccgtttgctctcccggacgaattcctggtacaaatgcaccggacttcttcaggttatctgctgtttcacgcgggttgaaaaccaacgccgtgtagaagaaacagaagaagatgattgcagacgcatagagtaacacataaagcggttgcccaggctgcaaatacagcgaaattgttgtcagccagttccaaccagtaccgcccccgaaccatgacgcgatggtcgccgggaacagaataatactggaagcgaagattgccgggattacccccgccatattcactttcagcggtaaatgtgtgctctgtgcagcatagacacgacgaccttgctgacgtttcgcgtagtttaccacaatgcggcgttgaccacgctcaacaaatacaacaaagaacgtcactgcaaatactaatactgcaaccaacagcaacacgaggaagtgcaggtcgccttgacgcgcttgctcgatagtatgggcaatggctggcgggagtcccgcgacaataccggcgaagataatgattgaaacgccgttgccgatacctcgttcagtaatctgttcgcccaaccacatcaggaacatggttcctgtgaccagacttacaacagcggtgaagtagaatgcaaagcccgggttaatcaccaggccttgcataccaggcatattcggcagaccgctagcaataccgatcggctggaatattgccagcaccagagtaccgtagcgggtgtactggct

SEQ ID NO: 136688 - DNA, 1050 bp, Homo sapiens; identical to SEQ ID NO: 136660

SEQ ID NO: 136689 - DNA, 1689 bp, Homo sapiens
atggggctgttctatatgggcgcaccgctggcgttaacactgggatcaccgctttccggcgcgctgttggagatgcatggatttatggggcatcccggctggttctggatgtttgtgattgaaggattgttggcagtcggtgctggggtattcacattcttttggcttgatgacacaccggagcaggcacgttttctgagtaaacaagaaaaaacgttgcttatcaatcaactggcaagtgaagaacaacagaaagtgacttctcggctgagcgatgcgctgcgtaatggccgagtctggcaactagcgattatctacctgaccattcaggtggcggtttacggattaattttcttcctgccgacccaggttgcggcattgctgggaacaaaagtgggctttacagcgtcggtggtcaccgccattccgtgggttgcggccttgtttgggacctggcttattccgcgctattccgataaaaccggcgaacggcgtaatgtcgcagcgctgacattactggcggcgggcattggtattggtctgtccgggctgctttctccagtaatggcgatcgtagcgctgtgtgttgcagctatcgggtttattgccgtgcagccagtgttctggacgatgccgacacaactgctttccggtacggcgctggctgcgggaattggttttgtaaacctgtttggtgcagtgggcgggtttattgccccgatcctgcgcgtgaaagcagaaacgttatttgccagcgatgcggcgggattactgacgctggcagcggtggcggtcatcgaccgacgtggcacatcattaaataggttaaggaacacgatgatcgcattattaagcaatccctttaaagaacgtttacgcaagggcgaagtgcaaattggtctgtggttaagctcaacgactgcctatatggcagaaattgccgccacttctggttatgactggttgctgattgacggggagcacgcgccaaacaccattcaggatctttatcatcagctacaggcggtagcgccctatgccagccaacccgtgatccgtccggtggaaggcagtaaaccgctgattaaacaagtcctggatattggcgcgcaaactctactgatcccgatggtcgatactgccgaacaggcacgtcaggtggtgtctgccacgcgctatcctccctacgctgtccatcctgttcagctactgacggggtggtgcgtaacggcaaaagcaccgccggacatcagcgctatctctgctctcactgccgtaaaacatggcaactgcagttcacttacaccgcttctcaacccgccgggcagtgacgtcatcgtctgcgcggaaatggacgaacagtggggctatgtcggggctaaatcgcgccagcgctggctgttttacgcgtatgacagtctccggaagacggttgttgcgcacgtattcggtgaacgcactatggcgacgctggggcgtcttatgagcctgctgtcaccctttgacgtggtgatatggatgacggatggctggccgctgtatgaatcccgcctgaagggaaagctgcacgtaatcagcaagcgatatacgcagcgaattgagcggcataacctgaatctgaggcagcacactggcactggctgggacggaagtcgctgtcgttctcaaaaatccggtggagctgcatga

SEQ ID NO: 136690 - DNA, 701 bp, Homo sapiens
aaccttcagttaaaaacctttttgccgtaaatgaattttatagaaataatgatgatttcataaaccctgatctacaagaacggttagtgatcggggattatagcatttcaatatttacttatgacattaaaggtgctaccagtggcttctgtttctatcagctgtccctcctgattcagctactgacggggtggtgcgtaacggcaaaagcaccgccggacatcagcgctatctctgctctcactgccgtaaaacatggcaactgcagttcacttacaccgcttctcaacccgccgggcagtgacgtcatcgtctgcgcggaaatggacgaacagtggggatacgtcggggctaaatcgcgccagcgctggctgttttacgcgtatgacaggctccggaagacggttgttgcgcacgtattcggtgaacgcactatggcgacgctggggcgtcttatgagcctgctgtcaccctttgacgtggtgatatggatgacggatggctggccgctgtatgaatcccgcctgaagggaaagctgcacgtaatcagcaagcgatatacgcagcgaattgagcggcataacctgaatctgaggcagcacctggcacggctgggacggaagtcgctgtcgttctcaaaatcggtggagcagcatgacaaagtcatcgggcattatctgaacataaaacactatcaataa

SEQ ID NO: 136691 - DNA, 3273 bp, Homo sapiens
atggcggaagggatgcgtaccataggtcgcgccatgcttaaaaataagcatatgacgatcacggaatttgttgcccagcggatgcgtgatgcccagcaaaaaggcgagataagcccagacatcaacacggcaatgacttcacgtttactgctggatctgacctacggtgtactggccgatatcgaagcggaagacctggcgcgtaagcgtcgtttgctcaggattacgcgcgatgattggcggtatcttaaccgcatcctgattctctctctttttcggcgggctggtgataactgtgcccgcgtttcatatcaaaccccaacccgtgaaatcaaaaaactcgacggcctgtgggcattcagtctggatcgcgaaaactgtggaattgatcagcgttggtgggaaagcgcgttacaagaaagccgggcaattgctgtgccaggcagttttaacgatcagttcgccgatgcagatattcgtaattatgcgggcaacgtctggtatcagcgcgaagtctttataccgaaaggttgggcaggccagcgtatcgtgctgcgtttcgatgcggtcactcattacggcaaagtgtgggtcaataatcaggaagtgatggagcatcagggcggctatacgccatttgaagccgatgtcacgccgtatgttattgccgggaaaagtgtacgtatcaccgtttgtgtgaacaacgaactgaactggcagactatcccgccgggaatggtgattaccgacgaaaacggcaagaaaaagcagtcttacttccatgatttctttaactatgccgggatccatcgcagcgtaatgctctacaccacgccgaacacctgggtggacgatatcaccgtggtgacgcatgtcgcgccagactgtgaacacgccaacaacattgtctacagagctgttatccagttcagtaccgttgtctacgtcgccgttaccgttgatagtcaggtgaccatcagagttcatagcaacaataccgtaaccgtagttagacttggaagtatcccaggtacggtcgttcaccagatcagcgttcagaacgtaatcgctgctatggatatcgaacacaccagatactacgttaccgttatggtcagcgatgttgccgctggtcagttccagtttgtcagtacggaaagcttcagtatcgaactgatcaacgttcacatccaatacaccgccgttagttacggtgatagtattggcgtacagcattcgcctgaatttcgcagtgaagccctgaagcttgctgaacgcatcggtgttactgccgcagcccgtgaactcagcctgtatgaatcacaactctacaactggcgcagtaaacagcaaaatcagcagacgtcttctgaacgtgaactggagatgtctaccgagattgcacgccgcgacatacttcgcgaagcgcctgaaatgaagtatgtctttattgaaaaacatcaggctgagttcagcatcaaagcaatgtgccgcgtgctccgggtggcccgcagcggctggtatacgtggtgtcagcggcggacaaggataagcacgcgtcagcagttccgccaacactgcgacagcgttgtcctcgcggcttttacccggtcaaaacagcgttacggtgccccacgcctgacggatgaactgcgtgctcaggctgtaccctttaacgtaaaaacccgggcggcaagctgcgccgtcagggctgagggcaaggccccccgaattcagcccgtagttacgcgcaaagcctgctggtcgaaactgtgggcagaatttagcaggcaaaaatcagccagccagctgcatgcctgttttgtcagaatctcagcaggcatccccctcatggcagggattatggggccaagaaccaagtacccaacacaattgaacaaccaccgggaccataataattcccacaaagatttccagcggagcaacacaagcacaattgagatccaggtggtccccccagtgcagtgggcacaatttaaacagttggcacaacttaccgatgagccaccaacagcagcccgaccgcgcgcgcgccgcagcctgggcgtaagggccgccggagccgatagcaataagatcgttttctggctgcaccacgtcaccgttaccggtgatgataagcgatgcagtttcatccgcgactgccagcagtgcttcaagtttgcgcagcatgcgatcggtacgccagtcttttgccagctcaacggcggctttgaccagatggccctgatgcatttccagtttacgttcaaacagttcgaacagcgtaaaagcatccgcagtaccgcccgcaaagcccgcgatgactttgtcgttgtacagacggcggacctttttcacgttgcctttcattacggtattgcccaacgtggcctgaccatcaccagcgatgaccacatggccgttacggcgtacgcttactatagttgtcacgagctgaccccttggttacgaatacagagtacaaaccccgtacaaaaccttgaacgaacggatggaccatccaaggggtcggatattctccgacgtcggtttgggcgtaagggacgacatgggcaattgctgataaatggcattgttcgagttcgaatcggaagatgtaaaaccgtgtatgatggtgtttttgaggtgctccagtggcttctgtttctatcagctgtccctcctgttcagctactgacggggtggtgcgtaacggcaaaagcactgccggacatcagcgctatctctgctctcactgccgtaaaacatggcaactgcagttcacttacaccgcttctcaacccgccgggcagtgacgtcatcgtctgcgcggaaatggacgaacagtggggctatgtcggggctaaatcgcgccagcgctggctgttttacgcgtatgacagtctccggaagacggttgttgcgcacgtattcggtgaacgcactatggcggcgctggcgaacgttttcctggggacgcctgacggtcatgcaccgtggtctaggcagagcatacctgatgtcgacccatgcttgtatggtcgagagcaatccttgcagcgtaacacgtcgaaatgtgtacaggctacagatgggttcggatgtgacgttaaagctgattgcggtaccatacgacgcgactgtggtcgatgcggagactcgactattacccgaagcttgccggacacttggggattctctagaagtcacctgcaagcattgcagccttgggactggcccgtcgtgttacaacagtctgagactgggtaa

SEQ ID NO: 136692 - DNA, 2730 bp, Homo sapiens
atgaatgcagacaccgattactccatcgcagaagctgcctttaataaaggcgaaacagcgatgaccatcaacggcccgtgggcatggtccaacatcgacaccagcaaagtgaattatggtgtaacggtactgccgaccttcaagggtcaaccatccaaaccgttcgttggcgtgctgagcgcaggtattaacgccgccagtccgaacaaagagctggcgaaagagttcctcgaaaactatctgctgactgatgaaggtctggaagcggttaataaagacaaaccgctgggtgccgtagcgctgaagtcttacgaggaagagttggcgaaagatccacgtattgccgccaccatggaaaacgcccagaaaggtgaaatcatgccgaacatcccgcagatgtccgctttctggtatgccgtgcgtactgcggtgatcaacgccgccagcggtcgtcagactgtcgatgaagccctgaaagacgcgcagactcgtatcaccaattgttgtcggataaggcgtgaaagccttatccgtcctggaatgaggaagaaccccatggatgtcattaaaaagaaacattggtggcaaagcgacgcgctgaaatggtcagtgctaggtctgctcggcctgctggtgggttaccttgttgttttaatgtacgcacaaggggaatacctgttcgccattaccacgctgatattgagttcagcggggctgtatattttcgccaatcgtaaagcctacgcctggcgctatgtttacccgggaatggctggaatgggattattcgtcctcttccctctggtctgcaccatcgccattggcttcaacaattacaggaggactaaacaggtagctgggatgccagcgaagtcttcttcgttgcgtagttcacaagaccgggaaatgcgccccggtgcgaaggccgaacggacccgatacgactcccccggttcctacggtgtggccggccctgggttcctaggttcccgggggggttcgccttttgggggccctggaaaatataacaacaccattaccaaatatgcattaaacatagcgccctctgcacaaaatcagagtccacatggcccgaaactgaaccggagacaagaaacacagcatgcgttagactggttagatgcaggttataccttcacctacagcgaagatcaggctctgactccgtacttcaaactggcttacgtctacgacgactctaacaacgataacgatgtgaacggcgattccatcgataacggtactgaagggtctgcggtacgtgttggtctgggtactcagtttagcttcaccaagaacttcagcgcctataccgatgctaactacctcggtggtggtgacgtagatcaagactggtccgcgaacgatttgacgggcattactgcaaaggacgcgcaaatgttatctgtagttaaacctcttcaggaatttggtaagctcgataaatgtttgtccagatacggtacgcgcttcgagtttaataatgaaaagcaagttatattttccagtgatgtcaataacgaagatactttcgttattttagagggagttatctctctgcgtagagaagaaaacgtacttatcggtattacccaggctccttatattatggggctggctgatggtttaatgaaaaacgatataccatacaaattaatatcagaaggaaattgtacgggatatcatctaccagccaaacaaaccattacgcttattgaacaaaatcaactctggcgagacgctttttactggttagcctggcacaatagaattctggaattacgcgacgtgcagctcatcgggcataattcctacgaacaattcgcgcacattatattcatgattgccgcaatgcaaatgggatccgtatggggtgacgatttctcctcaggtcagcattcggtcgcgcgcaaatcccagctgcacaagcccattcttcgtgtgaagtgccacgaagggtttactatatcagcaaacccgaattccagccctagatatcccaccatcatcgaacaggcggaacagccacggatagttgatttctccatcgtccggttcatgtcgatcagccagtgcctgatactggctggctctatgatgcgtactttcatcaagaaagtatacgcagctatcgaagctggcgacaaagctgctgcacagaaagcatttaacgaaatgcaaccgatcgtggaccgtcaggctgctaaagctactgacggggtggtgcgtaacggcaaaagcaccgccggacatcagcgctatctctgctctcactgccgtaaaacatggcaactgcagttcacttacaccgcttctcaatccggtacgcaccagaaaatcattgatatggccatgaatggcgttggatgccgggcaacagcccgcattatgggcgttgggctcaacacgattttacgtcacttgaaaaaactcaggccgcagtcggtaacctcgtgcatacagccgggcagtgacgtgcatcgtctgcgcggaaatggacgaacatgctccggaagacggtcgttgcgcacgtattcggtgaacgcagctatggcgacgctggggcgtcttatgagcctgcggtcaccctttgacgtggtgatatggatgacggatgggtgggcgctgtatgaataccgcctgaagggagagctgcacgtaagtcagcagcgatatacgcagcgaattgagcggatcaacgtgatctga

SEQ ID NO: 136693 - DNA, 855 bp, Homo sapiens; identical to SEQ ID NO: 136663

SEQ ID NO: 136694 - DNA, 750 bp, Homo sapiens; identical to SEQ ID NO: 128996

SEQ ID NO: 136695 - DNA, 2466 bp, Homo sapiens; identical to SEQ ID NO: 128997

SEQ ID NO: 136696 - DNA, 1257 bp, Homo sapiens
atgctcacggcaccaatcattgtggtcaccttcagagacatagttctgacaaaactgatgatggtctggcactcacagagcgggtatgaaaaggcttatgctcacattcagagatggtggtaccgagctattctgctactgacggggtggtgcgtaacggcaaaagcactgccggacatcagcgctatctctgctctcactgccgtaaaacatggcaactgcagttcacttacaccgcttctcaacccgccgggcagtgacgtcatcgtctgcgcggaaatggacgaacagtggggatacgtcggggctaaatcgcgccagcgctggctgttttacgcgtatgacaggctccggaagacggttgttgcgcacgtattcggtgaacgcactatggcgacgctggggcgtcttatgagcctgctgtcaccctttgacgtggtgatatggatgacggatggctggccgctgtatgaatcccgcctgaagggaaagctgcacgtaatcagcaagcgatatacgcagcgaattgagcggcataacctgaatctgagcagcacttctatccttgtgttactgaatggtgccacacagttccaggatctgggcgacttgaacaaagaattggaagagacatatacagatagcaaaaatcatatttcctgcgtcggtaatgatttcggtttcaatgatattttctcccgctacgttgaagcggtaggtcgcgaaggcgatgtactgctggggatctccacctccggtaactctgcaaacgtgatcaaagcgatcgcagcggcgcgtgagaagggaatgaaagtgatcaccctgaccggtaaagacggcggcaaaatggctggcacggcggatatcgaaattcgcgtaccgcactttggttatgccgaccgcattcaggagattcacattaaagtgatccatatcctgatccagttgattgaaaaagagatggttaatttcaccgggcttgtacagcgtggtggtggaaccgggccacataaagatggctggggcattaccttttacgaagtggcctttgaggatgtggcagtgaacttcacccaggaggagtgggctttgctggatccttggcagaaaaaactctacagagatgtgatgctggaaacctataggaacctggcttcagtaggtgatgacgacaacattccttcacttagagaacaagttgcccatcaacgatatttcaagacctggcatgtggaaagggaatacttcagtaaataa

SEQ ID NO: 136697 - DNA, 1236 bp, Homo sapiens
atggccctggaaacctttatcatctacacatctcaactcactatccccgctttacccaaacaacaccccaaaaaaccaacccccttgggggccttcggaccatttggcacccacaggcttttggggcccaaaaaccgcccccgtgaacaaaactggctgctgtggtgtgagcgcggggtgatgagccgtctgcaggcgctctatctgcgcgagcagggctttaacaatgtgaaggtcgataattttcagaccaaagtcgatagctgtacccggcccctggctggtcagcaattttacccgtgcatcccagacgacgcgcttgtccagccattgttcggcgggaattttgtctttcagcgtcgggaagccggtcatattaccaatcgggaagatatcgtgcggcaccagcacggtggctggcgcggcgcaaatagccgcgacgatacgcccggaacggtggaactgtttaacggtttcaaccagcagagtgctatcgcgaaaacactccgcgcctttaatgccaccaggcagcacgatcacgtcatattcgccatcagccacttcgaccagcggcgcatccgccagcagcttcacgccgcgcgagcaggtaatcgccaggttaccatcgctggcgacgctggcagtggtgactttgataccgccgcgaaccagcagatcgatagtggtgacggcttcagtctcttcactaccaggggcgaggcaaaccagtgccgatgcgctcatattcactctcctttctttttaccatttcaaacagtgcgggtgttttccgctgtccctcctgttcagctactgacggggtggtgcgtaacggcaaaagcaccgccggacatcagcgctatctctgctctcactgccgtaaaacatggcaactgcagttcacttacaccgcttctcaacccgccgggcagtgacgtcatcgtctgcgcggaaatggacgaacagtggggctatgtcggggctaaatcgcgccagcgctggctgttttacgcgtatgacagtctccggaagacggttgttgcgcacgttttcgctgtaaagccctattgggacactggggggggcttccactgccgctggatttacatgcagcaggaaaaagagttgctgcaactcagtttgcaacaagggaaatataaccagaagcgcgcggctgaattactggggttaacttatcatcagttccgcgcgttgttgaaaaagcaccagatttag

SEQ ID NO: 136698 - DNA, 1756 bp, Homo sapiens
atgggagtaaatgatgcagtcctcgaaatgcatggccttggcaacgattttatggtcgtcgacgcggggtttgaccaactgctggtggttgagccgccgtatgatcttgagctggattttcactatcgcatgttcaatgctgatggcagtgaagtggcgcagtgcggcaacggtgcgcgctgctttgcccgttttgtgcgtctgaaaggactgaccaataagcgtgatatccgcgtcagcaccgccaacgggcggatggttctgaccgtcaccgatgatgatctggtccgcgtaaatatgggcgaacccaacttcgaaccttccgccgtgccgtttcgcgctaacaaagcggaaaagacctatattatgcgcgccgccgagcagacaatcttatgcggcgtggtgtcgatgggaaatccgcattgcgtgattcaggtcgatgatgtcgataccgcggcggtagaaacgcttggtcctgttctggaaagccacgagcgttttccggagcgcgccaatatcggttttatgcaagtggttaagcgcgagcatattcgtttacgcgtttatgagcgtggggcaggagaaacccaggcctgcggcagcggcgcgtgtgcggcggttgcagtagggattcagcaaggtttgctggccgaagaagtacgcgtggaactccccggcggtcgtcttgatatcgcctggaaaggggaagaactgcaggaaacactcacggagcttgatgaccgggcggttgtcgattatctgattaaaaatcctgagttttttatccgtaatgcgcgcgcagtagaagcgatacgtgtgccgcatccggtacgcggcaccgtttcgttggtcgagtggcacatggcccgcgcacgtaatcatattcatgttctggaagagaacatggcgctgttgatggaacaggctatcgccaacgaaggcctgttttatcgcctactctacctgcagcgcagtctcaccgccgccagcagtctcgacgatatgctgatgcgctttcaccgctgggcgcgcgatctcggcctggcagtcgcgatgccagtcactatcaacaagggcaaccagatcattgaaaaccaactggatacagaaacaataactattagttatgaatttatcctctgtcaacatcttatcgcaaataccgagttcagctatttggcactccctgaaaattataaccgtttgtgtttaccaaattcaaaaaaccaaacaaataatcgtttcaaaacgttaaacagcaaagctattggcaggctacttgctgctggtggcgtatacaatgggaacattgaaggattcagagatactgcggaaaaactggctgtccctcctgttcagctactgacggggtggtgcgtaacggcaaaagcactgccggacatcagcgctatctctgctctcactgccgtaaaacatggcaactgcagttcactttacaccgcttctcaacccgccgggcagtgacgtcatcgtctgcgcggaaatggacgaacagtggggctatgtcggggctaaatcgcgccagcgctggctgttttacgcgtatgacagtctccggaagacggttgttgcgcacgtattcggtgaacgcactatggcgacgctggggcgtcttatgagcctgctgtcaccctttgacgtggtgatatggatgacggatggctggccgctgtatgaatcccgcctgaagggaaagctggcacgtaatcagcaagcgatatacgcagcgaattga

SEQ ID NO: 136699 - DNA, 2036 bp, Homo sapiens; identical to SEQ ID NO: 128999

SEQ ID NO: 136700 - DNA, 1353 bp, Homo sapiens
atgggattatccggctcgggtaaatccacaatggtacgccttctcaatcgcctgattgaacccacccgcgggcaagtgctgattgatggtgtggatattgccaaaatatccgacgccgaactccgtgaggtgcgcagaaaaaagattgcgatggtcttccagtcctttgccttaatgccgcatatgaccgtgctggacaatactgcgttcggtatggaattggccggaattaatgccgaagaacgccgggaaaaagcccttgatgcactgcgtcaggtcgggctggaaaattatgcccacagctacccggatgaactctctggcgggatgcgtcaacgtgtgggattagcccgcgccattaatccggatatattattaatggacgaagccttctcggcgctcgatccattaattcgcaccgagatgcaggatgagctggtaaaattacaggcgaaacatcagcgcaccattgtctttatttcccacgatcttgatgaagccatgcgtattggcgaccgaattgccattatgcaaaatggtgaagtggtacaggtcggcacaccggatgaaattctcaataatccggcgaatgattatgtccgtaccttcttccgtggcgttgatattagtcaggtattcagtgcgaaagatattgcccgccggacaccgaatggcttaattcgtaaaacccctggcttcggcccacgttcggcactgaaattattgcaggatgaagatcgcgaatatggctacgttatcgaacgcggtaataagtttgtcggcgcagtctccatcgattcgcttaaaaccgcggctgtccctcctgttcagctactgacggggtggtgcgtaacggcaaaagcaccgccggacatcagcgctatctctgctctcactgccgtaaaacatggcaactgcagttcacttacaccgcttctcaacccgccgggcagtgacgtcatcgtctgcgcggaaatggacgaacagtggggctatgtcggggctaaatcgcgccagcgctggctgttttacgcgtatgacagtctccggaagacggttgttgcgcacgtattcggtgaacgcactatggcgacgctggggcgtcttatgagcctgctgtcaccctttgacgtggtgatatggatgacggatggctggccgctgtatgaatcccgcctgaagggaaagctgcacgtaatcagcaagcgatatacgcagcgaattgagcggcataacctgaatctgaggcagcacctggcacggctgggacggaagtcgctgtcgttctcaaaatcggtggagctgcatgacaaagtcatcgggcattatctgaacataaaacactatcaataa

SEQ ID NO: 136701 - DNA, 1692 bp, Homo sapiens
atgacggcggcgacggaacagcttaacgcgtcacgcggtcttagcacgcgcgaaatggaacgacaagcggaactggctaaaataaccactgattacatcaactctggaggtagtgagggagacgaaaaactccagaacatgattaaggcgcaaaatgattactacgctgcggaagatgccaaacgcgctgactggttggctggcgctgaaagcgcattcgctgattacggcgactctgcaatggatatgtacggaaacgttaatgagatcgcatcaagtgctctaaacggtatgacggacatgatggttcagttcctcactaccgggaaagcaaactttgctgactttgctaaaaatatcatcagcatgattataaagatgattgctcaaatggtaatcttcaatacgagtctcaggaatgatgggcgatctgtatcttccggcggggccgctgtatcacttgctgccgcagcgggtagcgtggcaacatctggattcaacgcatcaaactcggctccaaaggtggtaaccattcgggaggtggaacggtcagttgacgttagtggaatggaggcctccagtacctcctggatcacaatccgctctttcaccgccgagacatccacttttggcccgacgatgaccgcatcaatgacctttttaccaacatactgctccataattgccagcttgctttccagcttcaagttagccgcagctactgacggggtggtgcgtaacggcaaaagcaccgccggacatcagcgctatctctgctctcactgccgtaaaacatggcaactgcagttcacttacaccgcttctcaacccgcgttggcgcgtaacccaaaccgtgatatcaccatttactggggcgggcgtgaagagcagcatctgtatgatctctgcgagcttgaggcgctttcgttgaagcatcctggtctgcaagtggtgccggtggttgaacaaccggaagcgggctggcgtgggcgtactggcaccgtgttaacggcggtattgcaggatcacgctactgacggggtggtgcgtaacggcaaaagcactgccggacatcagcgctatctctgctctcactgccgtaaaacatggcaactgcagttcacttacaccgcttctcaacccggtacgcaccagaaaatcattgatatggccatgaatggcgttggatgccgggcaaccgcccgcacttatgggcgttggcctcaacacgattttccgccatttaaaaaactcaggccgcagtcggtaacctcgcgcatacagccgggcagtgacgtcatcgtctgcgcggaaatggacgaacagtggggatacgtcggggctaaatcgcgccagcactggctgttttacgcgtatgacaggctccggaagacggttgttgcgcacgtattcggtgaacgcactatggcgacgctggggcgtcttatgaagctgctgtcaccctttgacgtggtgatatggatgacggatggctggccgctgtatgaatcccgcctgaagggaaagctgcacgtaatcagcaagcgatatacgcagcgaattgagcggcataacctgaatctgaggcagcacctggcacggctgggacggaagtcgctgtcgttctcaaaatcggtggagctgcatgacaaagtcatcgggcattatctgaacataaaacactatcaataa

SEQ ID NO: 136702 - DNA, 948 bp, Homo sapiens; identical to SEQ ID NO: 129003

SEQ ID NO: 136703 - DNA, 1122 bp, Homo sapiens
atgctggccaatatcgggttttataatagtaatgtcatccataggagcaaaggagcaattggagagggcccgccagatcctcgaggaattgtagagcagaacctgggaggagacattagcatcccgtgctacaatggaccaaggcctcggcggagcgcgcagaagacaactctgggcccgctaaaccaacccaggatacccagcgcgcagtgcgcaggcgccttcccgcgggtcgcggcggcgggagcgggaggcggcggcggcggcggcagcggcgggagcggcttctgcctcggctggagactgaggcgaaggcggcagcggcggaggaggtggaggagaggcgagggtgaaggcgatggcgacgcggggcacatgaggccgcgaccggcgggacgggccgaggcccggcggaggaggcggctccgggggaacccgccgccgggcgcgcggctcccaaatcgggagggaaacggctcgggggtgtcctgggccgcggaggtgtcgggcgacggtcggggagcccggacagaagcggcgcgcactcggcggcgccccggcggtgccgacaactacccgggcgctgtccctcctgttcagctactgacggggtggtgcgtaacggcaaaagcaccgccggacatcagcgctatctctgctctcactgccgtaaaacatggcaactgcagttcacttacaccgcttctcaacccgccgggcagtgacgtcatcgtctgcgcggaaatggacgaacagtggggctatgtcggggctaaatcgcgccagcgctggctgttttacgcgtatgacagtctccggaagacggttgttgcgcacgtattcggtgaacgcactatggcgacgctggggcgtcttatgagcctgctgtcaccctttgacgtggtgatatggatgacggatggctggccgctgtatgaatcccgcctgaagggaaagctgcacgtaatcagcaagcgatatacgcagcgaattgagcggcataacctgaatctgaggcagcacctggcacggctgggacggaagtcgctgtcgttctcaaaatcggtggagctgcatgacaaagtcatcgggcattatctgaacataaaacactatcaataa

SEQ ID NO: 136704 - DNA, 2943 bp, Homo sapiens
atgaaattgaacaaaggtctaagtaataagcagacctgggagttccattcaggtgagagggctgttgctcagcaggcatgggctggctctcggctctgctccggatttgtggaaactgccctgggtgaaccttgttcagggaatgggccagcagtcccaaggcagcagctgcagggagggttgcagcaggccccagtgtcccagcgcagcaccgtgtggagcagccccagcgcacttctgctcagcagccacattctgggagtccgaggtccagagtataccacggtgagagctactgacggggtggtgcgtaacggcaaaagcacgccggacatcagcgctatctctgctctcactgccgtaaaacatggcaacgcagttcacttacaccgcttctcaacccgaagttatacgatccagccccacttcagcaccacggtcagacggaacaaagacggttccccccctgatggggatatcgccctagagcgcacaccatcgactagccacctcagacccctcgttatgtctctccgagagcctatgctccagagagccagccgctgtccctcgggcatccaaccaacagccacagggtgtcaaggatgtacaccaccagtttacagccagaacttcgcgatacccatcgaaatgctaagggtactggacacagaatgcgcccctagaaggtggaacctgggatgtgcaagcccgctaagagtgacatatgcccagagagcaaaacaggctgttcgtgcccgaagactacgtggaccaacgatacataagtacgtcgtacagcagacccccgtgggtctgttcgaaacacaagagctaagtgtaaatacggttcgacagtttactatgggcgttagatatctcgagtgtacgtgggtgtctatgaaacatcttgaacgcctttgccagagcgcgttcagcgacagctttacccacagctgcagccgcgttttgttaccggtgtacttcagttgttcagcgatagctttttctacagtaaagcagctaccagaacttcagaaccgttcggtgcaattacctgtgcgtaatgtgacgcgggccttcaactccgtaggcgacatttcagccctcgtggtacgcttccaagactccacggacgaacgtcatcttagcataggtctcgatagccgaacctgttttgggaaaaaggcggcctcgaaggagttaagtgtgccgagcggatttcgatcccgtagtacgattccaatgcggaaggtttccgacctggtggttttccaaccagggtcaaatggcgaatacgataccgctatcgccagcatcgccaaacgagcagatgaaggacacaaggaaaatacgaaacctttgtgcaatcgaaagaaacgtcggctatctctataccatgacgcaaacggacgatttactgcgcaagctgtagatcagttacgcaacagcggcagcagcttctcgctggtttacttttctgccacggtctggcctttaaagagcgcgtattattctgttcccggcgaccacgcgtcatggttcgggggcggtactggttggaactggctgacaacaattcgctgtatttgcagcctgggcaaccgctttatgtgttactctatgcgtcgcaatcatcttcttctgtttcttctacacggcgttggttttcaacccgctgaaacagcagataacctgaagaagtccggtgcatttgtaccaggaattgtccgggagagcaaacggcgaagtatatcgataaacgtaatgacccgccgacactggttggcgggtcgccatagcgatcatatagacgtgtacgcagccaccaagcttcgtagcgagtggcgaagagtacgagtgtacctgacaccggaccacgggctcaaagtgtccctaccgcatggtggcattcgctacgcgacatgcgatatcgaccttcttagtgaaggatatacacctctcaggcatgagatcgagccagacacctatgaaggcaggactcaattgggaaatgtacaacaggggggttcaatttcacaccaggccgccataccccccctggggcaaacccgtgatcagagaggtacacagtgctcagcccaacgtggcaaacactgttctcaccggacccctggtgagtgcactggacacatcgacaaggaaccaaaaggctcttacaccacgggctcagcactggatcccgtactcccggacgggccaggttatcccacgttgccttccgccctccacgcaaagttgaccgcggactttaccaaggaccgctgcccccacgaagcccacacaactcggaagatttgttacttcaaactttggacctaccacttggggagccagactatgtgcgcgaaagtcgctgcacccaaactctactgcgacgggattggaccacggaggaccgggattgcggacaacggttgttcaggacctaacaatgtactctggcgaattggctactcattcttgaaaatgttcagtgcgtatgttcgtgcgaatctgcccgccgcaagcctcgagctagttcgccggtggtggggataccagctggcggtggacgattctatgtacagtcgagtgaacgataagtgtcctcgtagtgatgttcctggagcctatttgtcgcgacaggtggatgcgcctaatggcggggagcacaacttggtgtgtcgccgcctccgtggagtgtccacggtggaaccgcctggttggtcggcacactgcgtcgatgtcatcgccaagtggctgtggtggaataacaccaaagttgcccctacggagattccactctcgagagaggaatccgggcttacccaccggtctgatgacacgacttccggatccgttatggcccctataccccgggacgtaatatgcgcctgtagaagagagggcaatatccaccagtacgatcaagtgccctaa

SEQ ID NO: 136705 - DNA, 1440 bp, Homo sapiens
ctattcttccggcggcatacagacgccaattccgccaattctacagtaaccatacgggtttttatgcagatattgctggtggtcatcttcgtcattataaaactgtgtggcgttagcgatttccgtggtgatgtgtcgatcgtcatcttcggcaagcatcgtcgccgataccgaggtgtcatcaatcttaatgttgacgttgtccagtgccacccgtgtcagggttatgggatacggcgtggagagatccagcggaccgctatcttcctcttcttcaacctgttcagaaggaggcatttttttactgtcgatgttgacctgaatgtctttcagcgccagatcattaatacaaacactgctgttccacaggcactcaagcccgacagccagatgcagattgcccgcttttaccgccacgcctggctgctcataacgaacgtcagacaaggtgagatcgcgccagccgccggtgaccttgccaatatccagtccagaaacgccaccgatcccagcaacagtaagataacgataaccacgccgaggctgatttttttccataaactcataattctggccccagaccgatgtaaaactgtaacccgtgttcgtctttatccgcgatcggtacggcaaaatcgagtttgatttgcccgaccggcgattcccagcgcacgccgaccctcgtacctgttttaaaagtcgctgcggcgaatatcgcttacccgcttcggcactatcgacaaacaccgcgccccaccattttccggccacgttgtaccctgagcccttgctgggaggcgaagcaggtgtgggagggaggcagtcgtacttctccgacgtctccttcagggccttcagctctgccgcctgtttctctctggccagctccatcattttggagatttgctgcagggagaggaagtaagcttggcgagaagcccttttaggtgaatgttcgtgtcttgtcgactctagaggatccccggtaagcgagggcatagcgtcattgtttcgcctcatgccggagcaggtaggaccgctgatgacgatggttacatcgatgccagccttagccagcacctctttttcataatcaagactgaagaaccacacgccgccgttttccagccagtggttaacgtttccatactccgatagcccatcaatcatcatctgctcatggttacctcgcacagcccggaaccaaggcatagtaatcagctccaggcactcgacgttttccgcgccgcggtcaacaaggtctccaaccgaaatcagcaaatcacacgcagggtcgaacgaaaccttttcgagttcattcatcagcagcgtgtagcacccatgcagatcgccgacgacgaaaatattgcgccagtcagcgccattaatgcgttgatacatgctcatgcagattttctcctcgccgcgagtcgcagccat

SEQ ID NO: 136706 - DNA, 818 bp, Homo sapiens
acctcattctcggtacccggggatcaacaaaaaatccaacgccagcaccccgcttgagaaagccattaatgcagtgggcggctctcaaaaggtgcttgctgaaaagggcggcggaacgcctcaggccatcaatatgcttaaaaagcgaggtggcagccttccagtaacaaaaatgcgtaaatacgaagaagtaaccggacttcctcgcgaagttctatatccaggtatctttgccgcctaaccggcggctctaaccacgaaatggaaagcaatgcattcacttgcgtatcaacacaataccggaatacacccgggagcgatgataaaccgcgctcaacctaaggcggagccaggtcacgacaaaatccgcgatgcggtccgtgcatggtcgtcgtccctggacaatcaggacgtagtgtcagcgctgattcatcaacagaattccgggagcagggcgggtcccgccatcaagtttcccaaaaagcatcaacagggcgggcccagaactttttcgctttatggaaaacccctttaactccgtatagtaccggaagaacgttagagaactgaccccggcaatcatggctgttcttcctgttgagtttcgtacacgcctggcgccgcagaacgacaccatgtcgctgatcgcatctgccatgaaggaatgttcagaagcaaagcaagccgttctcctgaacgcgcctgagcaccagaaaatgaaggaggtaagcgagggcatagcgtcattgtttcgcctcatgccggagcaggtaggaccgctgatgacgatggttacatcgatgctgggggttatatga

SEQ ID NO: 136707 - DNA, 1514 bp, Homo sapiens
  misc_feature (1)...(1514): n = a,t,c or g
cgagctagtcaggcgcagcttgtcgcgcaggtattcagcaaagaaagtaaagccgccggaggcaatcgccactttccagcccagcgtttccagcttgagcaccagttgcgttaagcctggcatcagcggcagattttcacgcacctgttgcagaatattggcgtcagcgcctttcagcgtcgccacacggctgcgcaggctggcggtaaaatcgagttcgccgcgcatcgcccgttcggttacttccgccaccatctcgcccgttccggccagtttggcaatttcatcaatacattcaatctggatggcggtggagtccatatccatcaccagcaaacccggcgtgcgcaggtgcgggattttccccagcggggcgacatccagctgcgcttcgtgggccaggcgtgtagcccgtgcggtgagtgaacctgccagacgaatcacctgataatcttccacgcaccaggcggcaacaatcaccatcgccgcacccagtttgctgaccatacagcagccagccgctacgacctgcgtgtaatctttaatcatccagaaactggcatcgttaacgtgagaacaaatacaggatccggcaccggtagccagcgtaatcaaggccaggttggtattgggatgtactgccaacaatgggatgaccagaccggcggtagagatcgccgcgacggtggctgaacccagacaaatacgcaggaatgcggccacgccccaggccatcaggatcgggttaaatatccatacccgaaaccaggggtgggaaatatactgaccaacgccagagtcgatgagaacttgcttgaatgcaccaccaccaccgatnatcagcagcagaccggcaatacccgcgatagcttttccgcaagaatccatcaggtcagggattgttttcccgcgccccaggcccatggtatagatcgcgaatagcagtgaaatcagcatggcgatcgttgaattacctaagaacagtatcacgttgtaaaataagcctgaatccgcggcacttttggcatgagtcatctggatgatggtgacaaccgccatcaggatcaccggcagcattgccgtgagaaaactgatcccaaagcctggcatttcgctttcgctgaatcggcgggtcgcgccgagacaggctatattcccctcttttttaaaggcgtccggaataatgcgctggcagaatttattcaataccgggccgcaaagaataaaggttggaatgccgacaatgataccgtatatcagtaccaatcctacatcagcgccatattccctggcgataacagtcgggccggggtgcggcggcaaaaaaccgtgtgcgaccagcaaaccagaaagcatcggcacacacataaacatcggtgatatttttgcttcacgggcaatagcgaataaaataggtaccagaagaattaaaccgacttcgaaaaaaagtgcgataccggactgcgcgaagccgacgaatttcatattgaacagtcgatctgcttcctgcggtc

SEQ ID NO: 136708 - DNA, 1177 bp, Homo sapiens
gcgcatcttcgatggtcatatccagcacttcgtggatggttttgcctttgtacttaatctccagcgtttcacggttatagcgtttacctttgcactggtcgcacggcacgtagatatccggcaggaagtgcatctccactttgatcacgccatcgccctgacaggcctcgcagcgtccgccacgaacgttaaagctgaaacgtcccggcgtatagccgcgcgcacgggattccggtacgcccgcaaacagttcgcgcacaggcgtaaacacgccggtataggtcgccgggttagaacgtggagtacgaccaattgggctttggtcgatatcgatcactttatcgaaatgctccagcccctgaatatcgcgatacggtgctggttcggcgatggtcgccccattcaactggcgttgggcaatcgggaacagtgtgtcgttaatcagcgtcgatttaccggaaccaacccctaacgccagcgccagcaccgacagggtaaacagctcgcgagaaccggttgccgcgctgcgtgccataatccacggcaccagacggcgacctaccagcatcataatggcgataaatgcgatcactttgccgatggtgatccccatatcgactgcaagagtggcaaagcccacatcgccctgttccatcattcctgccactgcgggcagcaacaccagcgtcagaaccattaccaggtcttccacaatcaaccaaccgatggcgatttgcccacgctgactgtcaattaattgccgttcttcaagtgcgcgcagtaacaccacggtactggcggtggaaagacataaaccgaacacgataccggtcattaacgaccagcccagcacggcagagagcgccatacccagcagcgtcgccacggctatctgggcgatcgcaccgggaatggcgatggcctttaccgccatcaaatccttcagcgaaaagtgcaaaccgacgccaaacatcaacagaatgacgcccagttcagccagttccggggcaagcttggtatcggcaacaaagcccggagtgaatggtcctgccagcacacccgctaacagatatcccaccagaggagaaatacgtagtttattggccagcatgccgaggataaaggcgagcacaaggccgccaacaatggtggtgataagcggggtggcgtgatgcat

SEQ ID NO: 136709 - DNA, 2712 bp, Homo sapiens
atggcccatatgaagctggtcgacgaagccaaagcccgcgccgatgtggtcgtcgtcagtattttcgttaacccgatgcagttcgaccgcccggaagatctggctcgttatccacggaccttgcaggaggactgcgagaagctaaacaaacgtaaagtggatttagttttcgccccttcggtaaaagagatctacccgaacggtactgaaacccacacttacgttgacgttcctggcctttcgaccatgctggaaggtgccagccgtccgggacattttcgcggcgtttcgactattgtcagcaagctgttcaacctggtccagccggacatcgcctgcttcggtgaaaaagattttcagcaactggcgctgatccgcaaaatggttgccgatatgggcttcgatattgagattgtcggtgtgccaattatgcgcgccaaagacggtctggcgctaagtcccgtgtgcgaaaagcgcggctggaaaaaatgggcgcagcagcgtggactgcgcaacatgcaatttttcccgctgcaatcgtatgacgctttacccgcactgctgaagatgggcgattgccatctggtggtgcaaaaacgcggcgcggcagatgccgtattgccgtcgaaactgaccaatattctggcagtaggcggtaacgcggtgattactgctgaagcctacacagaactggggcagctttgcgaaacctttccgggcattgcggtttgcgttgaaccggaatcggtcgaggcgctggtggcggggatccgtcaggcgctcctgctgcccaaacacaacacggtggcacgtgaatatgccgaacgcacgctcggggcgttcatacattccgagccccatgtcgttatcttcgggcacattgatctgaattttcgggcagccacgagcaatcagctttttctccagccgattaagcaacgcattggcaatcccacgcccacgaaactctggatgcacgccaagataataagcagacccgcgatgcccgtcataaccgcccatcaccgttccgaccacgtcaccgtttacctcagcgaccaaaaacaaactgacgtcatggttcatcttacgctcgatgtccatttccggatcgttccacggacgcagcaagtcgcaacgctcccaaagggtgatgacctcttcgaaatcttcctggcgaaatacgcgtatctccatggtattcgttacctttttgcggaaaataacaaaatggcggaaatcgcccaattcctgcatgaaaattatttgagcgttgacaccacagtggaagtatctattaccgtaacccgcgatgaaaagcttatcgcgtgcggtggaattgccggaaatattattaaatgcgttgctatcagtgaatccgtccgcggtgaaggactggcgctgacattagccactgaattgataaacctcgcctatgagcggcacagcacgcatctgtttatttataccaaaaccgaatacgaggcgctgttccgccagtgcggtttttccacgctgaccagcgtacccggcgtgatggtgctgatggaaaacagcgccacgcgactgaaacgctatgccgaatcgctgaaaaaatttcgtcatccagggaacaagattggctgcattgtgatgaacgccaatccctttacgaatggacatggtgaccgtattcaccgcattccggaagatcgcaaaaagaaaaaaggcaaacgtaaaccgccattctggacgcgtattgcgctgattgtttccgctgcgggcgtggcgttttcgcacggcgcgaacgacggacaaaaagggatcggcctggtaatgctggtactggtggggattgcccctgctggcttcgtcgtcaatatgaatgcgtccggctatgaaattacccgtacccgcgatgccgttaccaacttcgaacactacctgcaacagcatcctgaactgccgcagaagttgattgcgatggaacctccattgcctgcagcatcgactgatggcacgcaagtaacagagtttcactgtcatccggcaaatacctttgatgctattgcgcgcgttaaaacgatgctgccaggcaatatggaaagttacgagccgttaagcgtgagtcagcgcagccagctgcgccgcattatgctgtgcatctctgatacctccgcgaagctagcgaaactgccaggcgtcagttcacccttccgggtgatcctgtacaactttcgggatctgacgggtcaggacttaaccccggaaaccgtgacgcgtctggctctgcaaaacgagaatatcgttggcatcaaagacaccatcgacagcgttggtcacttgcgtacgatgatcaacacagttaagtcggtacgcccgtcgttttcggtattctgcggttacgatgatcatttgctgaatacgatgctgctgggcggcgacggtgcgataaccgccagcgctaactttgctccggaactctccgtcggcatctaccgcgcctggcgtgaaggcgatctggcgaccgctgcgacgctgaataaaaaactactacaactgcccgctatttacgccctcgaaacaccgtttgtctcactgatcaaatacagcatgcagtgtgtcgggctgcctgtagagacatattgcttaccaccgattcttgaagcatctgaagaagcaaaagataaagtccacgtgctgcttaccgcgcagggcattttaccagtctga

SEQ ID NO: 136710 - DNA, 2586 bp, Homo sapiens; identical to SEQ ID NO: 132234

SEQ ID NO: 136711 - DNA, 1662 bp, Homo sapiens
tcatccgtaaataaagatgctccaagatggtgcgaaaatgaaggaagcccataaacgttcccttgggccgggcttttgcacttgggaacccggttctctagccttgggccaccaaccctgtaccaatttgccggcccgccccagaatcccccccggtttccccttgggggaccgtgccgctacatgcaggacaaacggtgttagttcgcctgccagtttgtacagcgtcgggatcatcagcagcaaaccctgcgatgacgtaaacgatgttgaaagggcacccgtctgcaaagcgccatgcacggtagcgatagcacccgcttccgactgcatttcaaccacgcgtggtgtgtctccccaaacgttctttaagccgtttccggcccaggcatcagcctgttctgccatctgtggaacctgaggggtaactttcatatggagatccagcaagatcacgtcgatatccagtctattcgccagatcgatagcgctcgcgccgtcgcccgcttcggcgaccacttcagagccaggatcaagctccagtaactgacgaacaccgcgtcgcataagtggatgatcatccacaatcatcacctgaaaaggtgttgcttcgccgacagtgaattcagcagtaagcgccgtcagaccagaaaagagattttcttgtcccgcatggagcagattctgccatggcaaaatctggctgatgcgagtccgggaacgacttgctatcgtccagccacatgaaccagctgcgggcgaagcattccggaagatgtgattgccggagcctcggcactggttctcaccttcataatcaagtttgtcattgccgagaatccgcagtggtggcagcaattcctcaaagatcacgtctctatccttgcgatgaacgaagatgaagccgaagcgttgaccggagaaagcgatccgttgttggcatctgacaaggcgctggactgggtagatctggtgctgtgcaccgccgggccaatcggcttgtatatggcgggcggtggtgatgtgaattaaatagtcttctttttctggctgaaactcgtaaccacgggcgaaatcatgcaggcaggcgtagacctcttcgaaatcccacgggttatgcagttcaatctcaacgctcaccacttctgtttctggcgaaacgctggcgatatcgcgtttaagcgtttcaaatagcgagcgcgagcgggcgtcgtgcaacaattccagtcgatcgatgaccaacgattcttgctggcataaacagagtgtcggacgccattttgaccagcgctgactgccgcgcccggcataatccagtacggtaccgacaaagccaaaagccactgttttacgcatcttagaaatccttataaaagacgatatttcattatcggtaaattggctttgcgggaaatctccggttacggacgtaaagatataatcaatccgaatggaacccggcatcagtccagtgcttaaggaccagcaaggaccggtactcgtcgcccgtgacgcaccggcgtcggcgtgctggcagccgtcagcggcaccacagggcgcatgttggcgcaaacgatgaaaatcaatgggatgcgcagcactgcgatacatgcgccgtgcgttgacgtctgcccgaccggtgcgtctatttcgccgatacat

SEQ ID NO: 136712 - DNA, 4502 bp, Homo sapiens
gtaaagtgggataaacgtatcgccagaacgcgttaaacgcgcatcaatcccatgattacgcaaaatggaacggacgtttttagcaatcgccagcaccacatgtttttctttcgaaccgttgcgtccgatcgctccggtatcaattccgccgtgacctggatcgagaacaacgacacgtttgccgccagattttttggctttcggcttgctgtgtccgttgctggtttttaaaagttcgtctttggcgatggcttgcgacattcctgacaacgtcagggcagccaaaccggctttcagcacctggcggcgcgaagtgagtgtttttagtggtttaaaagtgctcatacggcctgagttgtaataataaagttccagatgttatatcgtatcgcgtaatccgttacgacggtttgctgttgagaattgttttacttttcatttcaatagttgacaactccccattatgccgctttttcaaccgattttcgtcagatattggttaattgggccgttcacgccataatcagccttttaacccgcaaaaaggtaacgaatgccatggagatacgcgtatttcgccaggaagacttcgaagaggtcatcaccctttgggagcgttgaaacttggtgcgtccgtggaacgatccggaaatggacatcgagcgtaagatgaaccatgacgtcagtttgtttttggtcgctgaggtaaacggtgacgtggtcggaacggtgatgggcggttatgacgggcatcgcgggtctgcttattatcttggcgtgcatccagagtttcgtgggcgtgggattgccaatgcgttgcttaatcggctggagaaaaagctgattgctcgtggctgcccgaaaattcagatcaatgtgccggaagataacgacatggtgctcggaatgtatgaacgcctgggatatgaacaggccgacgtgctgagtctgggtaagcgtttgattgaagatgaagagaccaccacaacgtgccggaaaccacctttatcgaatggtgtggaccagacatccttcttcctgggaacaaatggtcagtctaaccgtaaggccgagcactacttcctcaacggtaaactcgctgctgtgcgtatggatgagttcaagtatcacgtcctgattcagcaaccttacgcttatacccagagcggatatcaggctaaagcgcgtaatatcgacgtcctgattgccgatacagccggacgcctgcagaacaaatcgcacctgatggaagagttgaagaaaatcgtccgcgtgatgaagaaactcgacgttgaagcgccgcatgaagttatgctgactattgatgccagcaccgggcagaacgcgcttgccccggaactggctgaactgggcgtcattctgttgatgtttggcgtcggtttgcacttttcgctgaaggatttgatggcggtaaaggccatcgccattcccggtgcgatcgcccagatagccgtggcgacgctgctgggtatggcgctctctgccgtgctgggctggtcgttaatgaccggtatcgtgttcggtttatgtctttccaccgccagtaccgtggtgttactgcgcgcacttgaagaacggcaattaattgacagtcagcgtgggcaaatcgccatcggttggttgattgtggaagacctggtaatggttctgacgctggtgttgctgcccgcagtggcaggaatgatggaacagggcgatgtgggctttgccactcttgcagtcgatatggggatcaccatcggcaaagtgatcgcatttatcgccattatgatgctggtaggtcgccgtctggtgccgtggattatggcacgcagcgcggcaaccggttctcgcgagctgtttaccctgtcggtgctggcgctggcgttaggggttgcctttggtgcgcaattccagccagaaaacgaaaccagcgctgcctggggtagtgggtatcaatcaaccgctggtcgatattgaagcgaaagtggatgatgaatttattgagcgttatggattaagcgccgggcattcactggtgattgaggatgatgtagccgaagcgctttatcaggacgtacaacagaaaaacctgattacccatcagtctgcgggtggcaccattggtaacaccatgcacaactactcggtgctcgcggacgaccgttcggtgctgctgggcgtcatgtgcagcaatattgaaattggcagttatgcctatcgttacctgtgtaacacttccagccgtaccgatcttaactatctacaaggcgtggatggcccgattggtcgttgctttacgctgattggcgagtccggggaacgtacctttgctatcagtccaggccacatgaaccagctgcgggctgaaagcattccggaagatgtgattgccggagcctcggccctggttctcacctcatatctggtgcgttgcaagccgggtgaacccatgccggaagcaaccatgaaagccattgagtacgcgaagaaatataacgtaccggtggtgctgacgctgggcaccaagtttgtcattgccaagaatccgcagtggtggcagcaattcctcaaagatcacgtctctatccttgcgatgaacgaagatgaagccgaagcgttgaccggagaaagcgatccgttgttggcatctgacaaggcgctggactgggtagatctggtgctgtgcaccgccgggccaatcggcttgtatatggcgggctttaccgaagacgaagcgaaacgtaaaacccagcatccgctgctgccgggcgctatagcggaattcaaccagtatgagtttagccgcgccatgcgccacaaggattgccagaatccgctgcgtgtatattcgcacattgcgccgtacatgggcgggccggaaaaatgcaacatactgggtcgtagcggctggctgctgtatggtcgtgggctggataaacaacgtctgacccaataccagagcaaactgggtgcggcgatggtgattgttgccgcctggtgcgtggaagattatcaggtgattcgtctggcaggttcactcaccgcacgggctacacgcctggcccacgaagcgcagctggatgtcgccccgctggggaaaatcccgcacctgcgcacgccgggtttgctggtgatggatatggactccaccgccatccagattgaatgtattgatgaaattgccaaactggccggaacgggcgagatggtggcggaagtaacccgaacgggcgatgcgcggcgaactcgattttaccgccagcctgcgcagccgtgtggcgacgctgaaaggcgctgacgccaatattctgcaacaggtgcgtgaaaatctgccgctgatgccaggcttaacgcaactggtgctcaagctggaaacgctgggctggaaagtggcgattgcctccggcggctttactttctttgctgaatacctgcgcgacaagctgcgcctgaccgccgtggtagccaatgaactggagatcatggacggtaaatttaccggcaatgtgatcggcgacatcgtaaacgcgcagtacaaagcgaaaactctgactcgcctcgcgcaggagtatgaaatcccgctggcgcagaccgtgggtcgataccttgctcctactgatggcgatcaacggcgataccaaccaaaagataatatatggaaactattggccccactggtggtgatgggtgtcatgtttcttatccctgtccccgacggtatgccgccgcaggcatggcattacttcgctgtgtttgtggcaatgattgtcggcatgatcctcgagccaattccggcaacagcgatcagttttattgcggttactatttgcgttattggcagtaattacctgctctttgatgccaaagaattagctgacccagcgtttaatgcgcaaaaacaggcgctgaaatggggcctggctggtttttccagcaccacggtatggctggtatttggcgcatttatttttgcattagggtatgaagtttccgggttaggtcgtcgcattgcccttttcctggtgaaattcatgggcaaacgcacgctgacgttgggttatgcgattgtcattatcgacattctgctggcaccgtttacaccttccaacaccgcgcgtaccgggggtacggtttttccggtcattaaaaacctgccgccgttgtttaaatcattcccgaacgatccgtccgcgcgtcgtattggcggctatttgatgtggatgatggtcattagtaccagtctgagttcgtccatgtttgtcaccggtgcggcaccaaacgtgctgggtctggagttcgtcagcaaaattgccggtatccagattagctggttgcagtggttcctctgcttcctgccggttggggttatcttgcttatcattgcgccgtggctttcctacgtgctgtacaaaccggaaatcacacacagtgaagaagtggcaacctgggcgggtgatgaactgaaaaccatgggtgcgctgacacgcagagagctttag

SEQ ID NO: 136713 - DNA, 586 bp, Homo sapiens
accagcgcgcctttttttagcactggcgcaatggagcgagcagccgattcaacgtaggtcatatctggctcatgatcgcccttaaacggcgtgggtacagcaatcagccaggcatccgcttcaactggcgtcgtgctcgctcgtaaaaaaccgccttctacggcagtttttactacactcgccaaatcaggttcgacgatatggatttcgccacgattgatggtatcaaccgcatgttggttgatatcgacaccaattacctgtttttgccgtgaggcaaacgctgctgccgttggcagcccgatataacccagtccgataacagaaatggtcgcaaaactcatagtgatatccgattattttttaacgcttccagaatgcgagagcatgcctgaccatcaccatacgggttatgggcgcggctcatagcttgatattcgttttcgtcttttaaaagacgcgtcacttcctcgacaattcgctgcttatccgtgcctaccaaacgcaccgtacccgccgtcacccgtttcggacgctcagtgggatcgcgcatcaccaacacaggtttccccaacgaaggcgcttc

SEQ ID NO: 136714 - DNA, 557 bp, Homo sapiens
ctgtcttcgggtcagtgttggctcccgggtgtccgcacgggcggacggccagctgggcctccggggcctgggtggcgtggcccccatggccagggtcgctgtctccctggatgcccagctctgacctcatgaagggatgatcgcccttaaacggcgtgggtacagcaatcagccaggcatccgcttcaactggcgtcgtgctcgctcgtaaaaaaccgccttctacggcagtttttactacactcgccaaatcaggttcgacgatatggatttcgccacgattgatggtatcaaccgcatgttggttgatagtaccgtagtgactcgcgttatagtgtgatatcgtatgatgacgtcgcgtgtgcgatacagtggaggatgtgatatgcgatagagacacgtataagcggatgtcgtctgaaggtctgcaaagagatgtgtacattgttcgggccccagtttgtgcgcgaacttcaacagcgtggttgtgatatctttctttgacctgaaaggccacgatatccccaacactgcagcgcacgctgtcgctgctgcag

SEQ ID NO: 136715 - DNA, 1708 bp, Homo sapiens
atgctgccagctcacctagatgcgtgcgtcactacgctgcagaagatccgatggactcttagcgtggtcgatccaactctggctctacgagttccgttaccagccctgtctatacgtgatgacccaccgctcagggcttatctgccaggcaggggtgcactaaaggtcatcaggttcgacgatatggatttcgccacgattgatggtatcaaccgcatgttggttgatatcgacaccaattacctgtttttgccacgcgtcacttcctcgacaattcgctgcttatccgtgcctaccagacgcaccgtacccgccgtcaccgcttccggacgctcagtgaaatactacccgccggactttgacccatcaaagatccccaaactcaagctccccaaagaccggcagtacgtggtgcggctgatggcccccttcaacatgaggtgtaagacgtgcggagaatacatctacaaggggaagaaattcaaacgctcggaaggagacagtgcagaacgaggtctacctggggcctgcccattcttccgcttttacatcaagtggcacgcgctgcctgggcagagattcacctttcaagacagacccttgaaaacacagactacaccatgggagcttgggagccacgcggaatttccagggttgagaagcttcctgggaggaggaggagaagagggttgcagaagggagcgggaggacgagggagcttgaacaaccccatgaaggtgctggagaaccggaccaaggactccaagctggagatggaggtgctggagaacctccaggagctgaaagacctgaaccagcggcaggcgcacgtggactttgagggttatgctgaggcagcaccgcctgtcggaggaggagcggcggagtcagcagcaggaggagttcgagcagaagaccgcggccctgttggaggaagccagaaagcgaagactgctggaggactccgactcagaggatgaggctgctccctcgcccctgcagccagcccttcggcccaaccccaccgccaccctggatgaggccccaaagcccaagaggaaggtggaggtctgggagcagagcgttggcagcctgggcagccggcccccgctgtcgaggctggtcgtggtgaagaaggcaaaggccgacccggactgcagcaacgggcagcctcaggcggccccccaccccaggagccccgcagaacaggaaggaggccaaccctacacccctgacgcctggcgcgtcctccctgagccaactgggtgcatacctggacagtgacgacagcaacggcagcaactgagccctcccaggacccccttcaggggttaaaagtcacacgtccagtttcagccacattgaggcaagcattgctggtggtcagggcaggaggccttggcgtgactggaggccggacagacaagcgcccagcgtgctccaacacatatgggccatccaggtgcctcagcccccaggaggtcccttcctctgtgccctcaccagcctctcaacacctcggggacccctgctgctcctgcccccacctgtcactgtgcttagggctgcaacatccctggagcagcttccaacactacttcagggtggcagtgtttggggcactgggcgagcctgccggcctctagatggcctcatctcttccttccacaaactgtctagaaccgaataaaaggaaacctgccaacca

SEQ ID NO: 136716 - DNA, 475 bp, Homo sapiens
gtcttgaaattgcaaaaggtctactatgcacagtcccagcaaaaggtatttgatgtacgattgaatggccacgtcgtggtgaaggacttggatatctttgatcgtgttgggcatagcacagctcgcgatgaaattatacctatgagcatcagaaaggggaagctgagtgtccagggggaggtgtccaccttcacagggaaactttacattgagtttgtcaaggggtactatgacaatcccaaggtctgtgcactatacatcatggctgggacagtggatgatgtaccaaagcttcattccaaccctcttctgcctctgccggttgtgagaacaaatgactatcctgaacagggtggaggggtgtgggaaagaaaccagccatattggttttggtttctgtatttttcacaatgattaatgaacaaaaacaaagagaaaaaaacacacatcaattaaaggagacaaaaagaggcaa

SEQ ID NO: 136717 - DNA, 534 bp, Homo sapiens
  misc_feature (1)...(534): n = a,t,c or g
ttttgtcactgcaaattgtttattaaaacacaaagcaatggacagtgaaaaacatcctgattttgtactttttggtgggagtggggtgggacatggaaggggtagggtcagatggagacagcccagaaggaaagccagctctatccacccctacagcttccccggccaaccaggttcaaagcccatcagttatatctcactgtgccgctgtcaatgcatgttgtggaagggtgggcttggtttcctgacaagccaggttagaccaataatggttgaagaggctgccctgggctcanaatgggcagctggtccttgcctgggagaactttgtggaaggaaaaggtaagattccttaagtccaaggagagaaccaatccagggtcaaatttcttttcattccctggatcacaacacaccagggaagagaggagtcaagaatgtctctccctgccagtgctcccctcctacctcgcaactcggctctcccttcccgacagttgtcctttgaaaggacggaaagcgcacttcagtttg

SEQ ID NO: 136718 - DNA, 193 bp, Homo sapiens
gtatttgatgtacgattgaatggccacgtcgtggtgaaggacttggatatctttgatcgtgttgggcatagcacagctcacgatgaaattatacctatgagcatcagaaaggggaagctgagtgtccagggggaggggtactatgacaatcccaaggtctgtgcactctacatcatggctgggacagtggatg

SEQ ID NO: 136719 - DNA, 397 bp, Homo sapiens
  misc_feature (1)...(397): n = a,t,c or g
acgaagtgcccatcaaagaggagggggactacgtgctggtcttgaaatttgcagaggtctactttgcacagtcccagcaaaaggtatttgatgtacgattgaatggccacgtcgtggtgaaggacttggatatctttgatcgtgttgggcatagcacagctcacgatgaaattatacctatgagcatcagaaaggggaagctgagtgtccagggggaggtgtccaccttcacagggaaactctacattgagtttgtcaaggggtactatgacaatcccaaggtctgtgcactctacatcatggctgggacagtggatgatgtaccaaagcttcagcctcatccgggattggagaagnnnnnnnnnnnnnnnnnnnnnnnnnnntatgatgaagggtc

SEQ ID NO: 136720 - DNA, 398 bp, Homo sapiens
  misc_feature (1)...(398): n = a,t,c or g
cccacgcgtccggtgtgtcacagttcagccagttttggtttatgcctagagctacttcaaggaactagactaattagctatataggcccagcgatgcttcttattgatcttaatagtatgcccctccttcccctgtcctttcatttctctatccaagtagcagtcaggttcttggtgtgatgggactgaaagaattccagtcagccagagccttggcagctctgaagctaaccttagcatctaagtgtcgatcttgaattccctgnnnnnnnnnnnnnnnnnnnnnnnnnnnnnnnngggggggggnnnnnnnnnnnannnannnnnngagcggggcgccgccgcaaaaaaaccttatttgggtggccaaaattatagtcaggggggcggggggacag

SEQ ID NO: 136721 - DNA, 6557 bp, Homo sapiens
  misc_feature (1)...(6557): n = a,t,c or g
ggcacgagggcgacatgtccccggcggctcaggcggagcggcccgtggcgctgtttttctgagtccggggtggcctggcagccggccgaggacgagggtcggcgggggctgcccccgtggtggtggccgccatgctgggagcctgggcggttgagggaaccgctgtggcgctcctgcgactgctgctgctgctgctgccgccggcgatccggggacccgggctcggcgtggccggcgtggccggcgcggcgggggccgggctgcccgagagcgtcatttgggcggtcaacgcgggtggagaggcgcatgtggacgtgcacgggatccacttccgcaagtgtatccctttgtaaggccgggtgggccgagccttatactatggcatgaaactgccaatcctgcgttccaaccctgaggaccaatcctgttatcaaactgagccgttccaatggaggagacctttggctacgaaagtcccattcaaagagaagggggacttacgtgctggtctttgaaatttgcagagggtctactttgcacagtcccagcaaaaggtatttgatgtacgattgaatggccacgtcgtggtgaaggacttggatatctttgatcgtgttgggcatagcacagctcacgatgaaattatacctatgagcatcagaaaggggaagctgagtgtccagggggaagttgtccaccctttacacaggggaaacttctaccattgagtttttccaaggggtacctatgaccaattcccaaggtctgtgcactcttacatcatggctggggacagtggatgatgtaccaaaagcttcagccttcaatccgggattggagaagaaagaagaggaagaagaagaagaagaatatgatgaagggtctaatctcaaaaaacagaccaataagaaccgggtgcagtcatggcccccgcacacccaacccctatgccttggacaacagcagcctcatgtttcccatcctggtgggccttcggagtcttcattccaaccctcttctgcctctgccggttgtgagaacaaatgactattcttgaacagggtggaggggtgtgggaaagaaaccagccatattggttttggtttctagaattttccacaatgattaatgaacaaaaacaaagagaaaaaaaacacacatcaattaaaggagacaaaaagaggcagagcgagtagagagcagccctcattcaccacctggtcccagacgtgcttcagtcctcgtcctctctttgtggctggctcccagccttctctttcctcttgaggatacttagggtaaactggatccttcctgctcaaggatcctcatttgtatacctagtggaaaggactctgaactcagaggagtcactgtttcttttttttaggttagaaattaacagcagggaaatgccatcttattacctgagacgaccagcactgggagttaggtacggtctgaagttatgtctagataagacttcagacgtcctgggattgaaagaatgtgtgtgaaggggtagaatttgtgcggtaaagacttaaaaaaaaaaagtagggagattaaaaaaaaagaaagaaaatgcttccttatctggaagcctttctggattaatccagtgatggtcccacctttagtgtttcgagctttgtcattgcttgtctcccctggcatgtgccagtttatagactgtccagcatccaagacgtttcggttatgtcgggtcctcagatcgcctctgacttgttaccacaacaaatcattttgatttcagtgcctgttggggacttgatttcttctcaggttttgtttgtttgtttgtttccttaatctggctcatttgaaatttcttctccctctcaaccatcccactaagttatagccaagaagggaaggagacacggggatttggggttctctgcttgaatgtcttctcctttaccacctcaccttgttggtacctccctccctggatctctgagccagcagccaggaggacctgacccagcagttctttactggcccctttgtagggccttgctgccagggggcagggatgctttccagcctgcagcaacagaacacttgaccttaaaagtctcttctggtctttgggattaggaaaaggcttatggttaagcatagcttaaagagcaacctcaagagacttggagcccctactaaagtgactgacccactgtttaagagtgtcctagtatctgatgttcatttattcccatgttcttgtgtgtcaacagttcaagcccagttttgggtttaatgccctagagctacttccaaggaactagactaattagctataataggcccagcgatgcttcttattgatcttaatagtatgcccttccttcccctgtcctttcatttctctatccaagtagcagtcaggttcttggtgtgatgggactgaaagaattccagtcagccagagccttggcagctctgaagctaaccttagcatctaagtgtcgatcttgaattccctgaaaaaatttctataggaaatgaagcttccctggtcccctcctttctggccattgtcatccatttcccagttagggcaacaatgaaggaggacccagccaagctagaaggaattttgtggatgggagacagcaggattagcttcagcttgggctggagcagtcaatataggatctcaggccaggcccgcttttctagaatgtgtttaattttgagtttgctttattagatatgttttttaagagctctgtatatttgaactgctccttatgtgacaaaataggtagctcttgggctcatgtcctgggttttggctctttaatgattactccaggccagcatttagtcgtttgagaattgtagcctgttgttttcgctgtgacttgggtctcagtgctagggtattgagtcaggcagctggagggttgtggcccgaggctgcagtcagaggtatacttcccatagtgcttcacacagctcccctgcttctaaaggataaggtactgtagccttggtcctggggaccacctgcctggggcagtggacatcctaactaaacaggcttctggcagtagctttggttcctatcccatcgaaattccccaaagccctgggccactgccattgggttagtcaagatgaaggaggaggactggctgcctccattttgccttgtttgttagtttgcctgggtctgtctgaggaaggagggggtcccgccttccacctcaacacatcccttcagtgactcagagtctcagaaggaaaccctgactcctggggccatttcctaatggtactgtaagccaagcagctttgcttctgcctctgtttccaagcccacccttttcccctgagctcagggttagggatgggcgcttttcctctctggttgtgaacgaaaagaaggaacatctttctatggctaacaaaaacttaagggggaagtgaggaaacaggaagaagtatggtgggggctggggtagactcccctggagccaagcctatccagctaacaagagctccctggggctggtcacagctggctcatgatgctgaacttgaaagtttttttgtttttgtttttgttttgtggctcctccaagatataggtacatgaagtttaggttaaaggggtgggattctttatttttatttttgtattgtatgtgtcaagaattactctgttgttcaccttttgctttttgcactgtttgttctcttatctgtattttgagcttagtgctaggactgagaggctgcaccatagggaatgtatgggagatggtgaggggtgccagtgaggggtgcgtggaggagaggcctgggctcctctactggatctacactctgtcccaggtttttagatcccactgagcccagctgactgaaaacaaggacagtcagggtgaaacttcttttgccagaagtgtggcctgagttgaatttctgggaggatgacgcagatgtctgctgcagagctgggctgagagttctgcagtctagctctgacttaggtcaggggcctgttggtctctcattggacgtttttgggtctcactcatgcttactgaaacattgtgccaagaaactcctgtgggatttgtgtcccttaaaccagactcacttttctgaaaaatcctccattgtttgaggagaggctgctcaatcgacaccccgagttctcatgactggggaagaaaagttttcttcaggtgtcaatggcgttagactcccaggaagactagccctgcccacagggccacctgttggtttgagagcgtgttcgtgttctctttgccctccctgcctaagagctactgggatcacgttagcgggcatttaggctttgattgagagggcacagttttgagttaggtttacctcccccttttctgtgcctggggaactgttttggtccagctttagaactgtggttttgacttccttatctcttgggagaagcttctgttttaaggaatttctcttccttcttctcctgcctctagcctttcctggaaaggcccggatatggtttctaaaatctcagctgagaactttagaaaacagcagcagtatttttccttttcctagtgctaaaatccctttccctagaaattggctcaccttgggaaacccagggaaagaatcagcaggttctctgccctccctaggggtttggggaaggacccaccccggtcagcacagtgccttttcctctcttgctctgagccagggtggggcattccctctagattcaggtttgggcaggggtcctatagtccctgccatggggctgacttccctgtcccttccctcccctttgctggcctactctgggcataattcaagtgtcttcttggccttggggaatccttagtgggcatcaaatgggcaacatgggaattatttgtcctccatggcccctccagaagggacctaggaagagtagggtgaagctttccaaaagtgaagaagacgaatcttttctttcttttttgtttttaaaggggcaggatggggtatgctttgggctttctcctttctgtgggccccggaggaagggagagattgagggcaagggcaaagttgatagttacattgaaagcagaaccggaaacacccaggaactgttcagaaatctcagaagaaatctgcttctcttccgatggaaacgatataattaacgatcaaagaagctctaagaaaattgcaaaagaagccttaatgttcaagctttagaaagatcagagcaatttttctctttcagtccaaactaagactctctgtatttaaatctctctggggcaagagggctagatttcctcattttgttatgagactagattggtaccagtagatcagctgcctagcgagggcagggtttccttccttgcatctgtgtgggcttgcttcccagtctgggcctggtcctttccagctggccttttggtctagcctgctatgggggggccagattatcttgataaggagcagggtgatttgggggactaggctggggttgggcagggaaaagagcagggatgggatctctttggggacaggttcccccagggagtattaaacacaagggagccagggatttgttgntgggcagcccaagggaaacagttagttgcctgttttggagtttggcagagagggccttggcacctcttgcatccaggcagtcttgtggagatggggggcacatagcactggggaaagcagaactccattctcacctctattttgagcttcagtgctttattttcagtatggaggaaaaacagcaaccaaactgaagttgcgcttttccgtccctttcaaaggacaactgtccgggaacgggagacgccgacgttgcgacggtacggaggggaagcacctggcacgggagacgacacttccttgactcctcctccttccctggtgtggctgggaatccagggaatgaaaaagaaatttgaccctggattggttctctccttggacttaagggaatcttaccttttcccttccacaaagttctcccagggcaaaggaccagctgcctcattctggagcccaggggcagccttcttcaaaccattattgggtctaaccctggcttgtcaagggaaacccaagccccacccttcccacatttgggccctggcttgcttctattcgtgtaccgaagtacttggagaaaaagccatcaagttctttaggcccttgttagctttttaccctaagtttccccatccgtctctcgtgtggaggccaaaccaacttcttttgccagcagcccacaacatgcattgacagcggcacagtgagatataactgatgggctttgaacctggttggccaggggaagctgtaggggtggatagagctggctttccttctgggctgtctccatctgaccctaccccttccatgtcccaccccactcccaccaaaaagtacaaaatcgaggatgtttttcactgtcccattgtctttgtgttttaataaacaatttgcagagacaaaaaaaaaaaaaaaaaaaaaaaaagtcgacc

SEQ ID NO: 136722 - DNA, 2958 bp, Homo sapiens
ttataatttcaggctaattcttctgctgttgtagtattcaatatattccgtaacagcatccttcagttcgcttatattactgaactcatcaagataaaaacactccgactttaaggttccaaagaaacactccaccacagcattatccagacaattgccttttctggacatgctttgtttaataccatgttctttaaggatattttgatatcttctcatacgatactgccatccctggtcagagtgcagaacaggatgctcgtgaggattaagctttttgaatgcctgatcgagcatattctcaaccatgttcatcactggtctttccgaaaggctgtaagaaataacttcgttgttgaagagatctattactggagacaaatacagcttgcgcccattgactgcaaattcagtaacatcggtaacccacttctcgtttggccgcgtagccttgaaatctctttggagaacattaggggcggtttgccctacctctcctctgtaagagcggtatcgcttgaccttaatcgctgctttaagtgagagggttcccatcaggcgctgaacagctttatggttaatctgtttcccttctcgatgacgagacagcgttaccctacggtatccgtatcggcttctattctcgtgataaatctcactaatacgcttattaacgtccgcatacttgtcaggcttgctgagagcctttagatgataataaaacgtactgcgcggtatctccgcagcctttttcgtgggatgagctaaggctttcagcttttttagatacataagccgcgtttcaagaaatcgaacttgcctttcaagatcctcaatgcgtcggtcttttgacagctccaatgctgatgccgctttttctggatcaactgatattgcaatgtttcttttggtgccaatcttgagcgcgcgtaaaccagcttctccgcgctcttcatagaccttcagccacctggctacagaaccactaccagcaagcataaagtgagcagcagcctgattaagggacatgtgctgctcgatcacagctttcacgaccttaatacgcaactctggatcagcactaacgcctttaggtttgggaattaaacctttttctccatgtttttcatagagggcaacccatgtcctgacctgggttcgggggacaccaaaacgtgccgagatgatcctgtaaccatcatcagttgtgaagtagtgattcacgacttcaaggcgcttttcaaaagggtattttggctgtgtatttttattgacttcagtactatctatgtggatcttagatgaccgcagagctttcccttttctttcctttcttcgtagcaatttagaacaaagggataaccctagggagaacgtagcaaacacataatgtaggtcatctagaggtcccttcataatagtttccagttgcatccgctgctcggctttatcgccattgagcaacatccacaaatcctgaacggctggaccattacgtgcatcatccagatcaacaaacattggaccatcgcgccagagaatattcccggcgtggcagtctccatgtagccgcagaacggtgaaatcttcccgccagtgtgctgtaacggcggcaatcagctcatctgtcgctttcaggaatgccgctttcaacccggaaggtatcagtgtagcgtcctcaaacagcttgcgtggctcaatgagatattcgttcaaaccgatggtcgggcgatggataaaaagctgtttgcgccccgtctggtgcatacgccctaaataacgcccaaccgcttccatctgatcgatattatcagcttcgaactggcgaccaccgacgcttggaaaaacagcgaaataaaatccctgatgattcaataaagtctgaccgttaaaggccacaggtgctgcgaccggaacttcatcatttaccagctgcaacgcaaattgatgttcttcgaggatttgatcggctgtccaacgttcagggcgataaaatttgacgacaaaacgtcgacgatcttcgtctcgaaaggcgcatccccattttcgccatctgccggggtttacaagaactggtggtggcaaccggtggttcgttgcatcgcaagctgtgcgaacagcctgaattgctggaacatcgggaagatcccgaactgccggtggaacagcaatatgcaccgtcgcatgaagttcaggttgaagaggggggattactgtctgcgttgttacctgaatgtagcaacttttgggtaaactctcttggctcctgtcttctctgtggttcagtggcatggcagtcttaaaaatggcagcttgggtgcccagtgtgggacctgacccttggtttggtcgagtcggcctgcgcggaagatgtaacggggctaaaccatgcaccgaagctgcggcagcgacgcttatgcgttgttgggtaggggagcgttctgtaagcctgcgaaggtgtgctgtgaggcatgctggaggtatcagaagtgcgaatgctgacataagtaacgataaagcgggtgaaaagcccgctcgccggaagaccaagggttcctgtccaacgttaatcggggcagggtgagtcgaccccttgaaataccagcctttaatgtttgatgttctaacgttgaccgtaatccgggttgcggacagtgtctggtgggtagtttgactggggcggtctcctcctaaagagtaacggaggagcacgaagttggctaatccgcccaagagttcatatcgacggcggtgtttggcacctcgatgtcggctcatcacatcctggggctgaagtaggtcccaagggtatggctgttcgccatttaaagtggtacgcgagctgggtttagaacgtcgtgagacagttcggtccctatctgccgtgggcgctggagaactgaggggggctgctcgagaggaccggagtggacgcatcactggtgttcgggttgtcat

SEQ ID NO: 136723 - DNA, 690 bp, Homo sapiens
atggtgtatcgtcttgcttggcgcggaaattacttcactctcggggaataccgtatactaaaacaagcagctgaacaagaagagacgacgaaccatgattgcattaattcaacgcgtaacccgtgccagcgtaccgtggagggagaagtgacgggcgaaattggcgcgggacttttggtgtattgggtgtcgaaaaggatgacgacgaacagaaagcaaacccgatgccgaaggccagatgaactcaacgtgcaacaggcgggcggcagtgtgctggtggtttcccagtttacctcgccgcagataccgaacgggggatgcgcccaagtttctcccaaggtcatcaccggattcgcgcacaggcgttttatgactatttcgtcgaaagctgcgtcagcagagatgatacgcccaaggaggcctctccgcggaattcaggttgctgaacagctgaatagatttgctggatttggtattggactgcaagaaccaagggtcaggtcccacactgggcacccaactgccatttttaagactgccatgccactgaaccacagagaagacaggagcaaggagggatgggagtctggagctgcctatttgtcatttttctgttgttacctcgctagattggtgaaatgggggagtcctctagtagtcgacctgcaaaatgccggctgtcgcttgtga

SEQ ID NO: 136724 - DNA, 1930 bp, Homo sapiens
atggctggcaagccggagtacgataaaactatctccacgtcgattgtgctcaatgcgctgaacgcgctcggcgtcagcgccgaagcgtccggacgtaacgatctggtggtgaaaaccgtcgaaggcgaccgcaaagtctcaggctcggcctatcgcgaaaccaaagatcgcggcttccaccacggcaccttgctactcaatgccgacctcagccgcctggcaaactatctcaatccggataaaaagaaactggcggcgaaaggcattacgtcggtacgttcccgcgtgaccaacctcaccgagctgttgccggggatcacccatgagcaggtttgcgaggccataaccgaggcctttttcgcccattatggcgagcgcgtggaagcggaaatcatctccccgaacaaaacgccagacttgccaaacttcgccgaaacctttgcccgccagagtagctgggaatggaacttcggtcaggctccggcattctcgcatctgctggatgaacgctttacctggggcggcgtggaactgcatttcgacgttgaaaaaggccatatcacccgcgcccaggtgtttaccgacagcctcaaccccgcgccgctggaagccctcgccggacgactgcaaggctgccttttctctctctacaatagcgatctcaatactgtcatcgacaacgtgctgcgtatttttccgttgctgttgtcgtggatctccttctggttgctgtacagcattgttcctaccatccgcgtacctaaccgcgacgcgattgtcggcgcgtttgtcgccgcactcctgttcgaagcaggaaagaaaggtttcgcgctttatatcaccatgttcccgtcatatcagctcatttatggtgtgctggcggtgatccccattctctttgtttgggtctactggacatgcgtcaccgtggagggagaagtgacgggcgaaattggcgcgggacttttggtgttattgggtgtcgaaaaggatgacgacgaacagaaagcaaaccgtctgtgcgagcgtgtgctcggctaccgcatctttagcgatgccgaagggcaagatgaatctcaacgtgcaacaggcgggcggcagtgtgctggtggtttcccagtttaccctcgccgcagataccgaacgggggatgcgcccaagtttctccaaaggagtaattgacgacatcggctttaatacggaaatcagccagacgcgcttccaccaggcgagccatttgttcaagcgcaaaggtatctaccggctccacttcgctcggcggcggtgtcagcaaatccagagaaggcagcggcgtcgtcggtttatgcaacggacggctgtcgccattacgcatcaacagcggatgaagcagggtatcctgcggttgtggcgcaactggctgttgtggctgctgatactgctgctgcggcgcaaccggttgttgcggctgctgatattgctgctgtggcgcaaccggttgttgcggctgctgatattgtggctgcggcgcaaccggctgttgtggctgctgatactgcggctgcggcggaactggttgttgcggctgctgatattgctgctgcggtgcaaccggttgttgcggctgctgtacaggttcaacaattggcgtaaacaacggttcgtgtggaccatcatccagcaacgctttcattggcgaaaattcaaaatcatccagcgagaacggattcgccccagccggttgttcgccggaataacgttgttgttgagtttgcgcaaactgacgagccagttcagcctctgccgcagcatctgcatcttctgcgtttacgggcacatcatgttgatactgttcgccatagcgttgctgctgtgtctgggcgaactgacgtgccagttcatcctgctgcatcgcatcgatttcatcatcgttgtactgatcgccagaatc

SEQ ID NO: 136725 - DNA, 1143 bp, Homo sapiens
atggtaaagggatcaattcaacaagaagagctaactatcgtaaatatatatgcacccaatacaggagcaccaagattcataaagcaagtcctgagtgacctacaaagagacttagactctcacacattaataatgggagactttaacaccccactgtcaacattagacagatcaatgagacagagagtcaacaaggatacccaggaattgaactcagctctgcaccaagtggacctaatagacatctacagaactctccaccccaaatcaacagaatatacatttttttcagcaccacaccacacctattccaaaattgaccacatacttggaagtaaagctctcctcagcaaatgtaaaagaacagaaattgtaacaaactatctctcagaccacagtgcaatcaaactagaactcaggattaagaatctcacccaaaaccgctcaactacatggagactgaacaacctgctcctgaatgactactggaaccaagggtcaggtcccacactgggcacccaagctgccatttttaagactgccatgccactgaaccacagagaagacaggagccaagaggctataatcacgtgctccgaagacttccgggtttccaacgtgacttccggttgtcagaatttacccctgacgcggcggcggccgacgggaagctgtgtgtgcttaggtcgtggtggccccggtggtggtgggctccgggcgggctcgcgtcatcctgcccccgctgcgatgcatccgcggcgcccggacggatttgatggcttgggctaccggggtggtgcccgggacgagcagggctttggcggcgccttccctgcaaggtccttcagcaccgggtcggacctgggccactgggtgacgactcccccagatatccccggcagccgcaacctgcactggggcgagaagagcccgccctacggcgtgcccaccacctccaccccgtacgaaggccccacggaggaacccttttccagtggcggcggcggcagtgtgcaggggcagagcagtggtgagaagcatggggaccgacacagggatgaggggttactggggccgcggcttgcggtctgcagaacccggaagcggcgcagaggattccggctccatacctcgaaacaatag

SEQ ID NO: 136726 - DNA, 657 bp, Homo sapiens
cggccttcccgcgtcgacccacgcgtccggacaagtggggcatctttaggggccacagtgagctctcaatgatcatctgtagtggcagcaaaagagttcgagccccacttcaaacaacttcataataaaaggccagacaaaagagctgtcagccagttactacagacactcaatgcagacacacgtctagcagtattgggaaaagacttgccttctgccagaacttaacccaaatacacacagagagcaccatgaagccctggattcttctactcgtcatgttcatctctggagttgtgatgcttctgcctgtgctgggaagcttctggaacaaagatccctttctagatatgataagagaaactgagcagtgctgggtacagcctccatataagtactgtgagaaaaggtgtactaaaataatgacttgtgtacgtccaaatcatacatgctgctggacctactgtggaaacatctgcttagacaacgaagagccccttaaatcaatgctaaacccctagattctattggccgatcactactgtgggctgaaggatgaccatctggtctaagaagagtgctgcctacttccttcttgggacacccacctggctctagctgggtaacctttctgctatttcccttggacctctttaa

SEQ ID NO: 136727 - DNA, 412 bp, Homo sapiens
accacgtcacgggggaatgccgctgcccaccaggatacaccggagccttctgtgaggatctttgtcctcctggtaaacatggtccacagtgtgagcagagatgcccttgtcaaaatggaggagtgtgtcatcacgtcactggagaatgctcttgcccttctggctggatgggcacagtgtgtggtcagccttgccccgagggtcgctttggaaagaactgttcccaagaatgccagtgccataatggagggacgtgtgatgctgccacaggccaatgtcattgcagtccaggatacacaggggaacggtgccaggatgagtgtcctgttgggacctatggcgttctccgaaataagacctgccagtgtgtcaacggaggtgtattgcggccggtctggaggatccaaactac

SEQ ID NO: 136728 - DNA, 390 bp, Homo sapiens
ctgcgaggccagctgtgagcagggcacctatggtaacgactgtcatcagagatgccagtgccagaatggagccacctgcgaccacgtcacgggggaatgccgctgcccaccaggatacgccggagccttctgtgaggatctttgtcctcctggtaaacatggtccacagtgtgagcagagatgcccttgtcaaaatggaggagtgtgtcatcacgtcactggagaatgctcttgcccttctggctggatgggcacagtgtgtggtcagccttgccccgagggtcgctttggaaagaactgttcccaagaatgccagtgccataatggagggacgtgtgatgctgccacaggccaatgtcattgcagtccaggatacacagggtatgtatt

SEQ ID NO: 136729 - DNA, 507 bp, Homo sapiens
atgaaggctgaaacatcagtcaggaaagcagctttcatggcaagcaaacttataatgagagtgatattttctctttgcttttcttataaacctccagaatgcctaagattcatcgacttttgtgtgaacatagcctttagcagaaagctggtccaacactctaattttacagatgatgatgctgtggaggaagagctcgcagtgaattatgtctactcaatctatgcatcaaaggagcagattagatacaagcatggtagaagttttgccaatggccatgtgaaagagctgatggaaggggatgtagaaaagcagaaaggtagcccatgccctaaaggagcttacagcctaactgcagagaaagtgtctgctgtttaccatcatttgttaacaagaattcatctagcctctgtgttgcgcataactgggggagacactgttacctatggacagcagcagatgtcaagcaattcatatcttcgcatatgtttccagttgaacatctga

SEQ ID NO: 136730 - DNA, 255 bp, Homo sapiens; identical to SEQ ID NO: 122130

SEQ ID NO: 136731 - DNA, 1347 bp, Homo sapiens
gaggaagagctcgcagtgaattatgtctactcaatctatgcatcaaaggagcagattagatacaagcatggtagaagttttgccaatggccatgtgaaagagctgatggaagatgcctgtgcaactggggcccctgctaggcctactgaagagcctgcccatgccctgcccttcagcagtgtccagacatctgccacaggcacagttggccatcccgtgtgcaccacagcagcagcagctaagcagatgcctgtcctttccttcatccctgctccaagaccccaacactccaggagatacagaaaagacgaaggaagagcgggaagcagaggagcaggagagaagcaatgtacacacaattcccccaggtggctacagaacactgtcagcaatcagggatccagcatgcctggatttcagtctcacgtgccctctctgctgggagcctttgtgcagtgcacaaactgcacgcgtgtatgtagtagccctgctaataaggaagccagctgctatgatattcggatgctcaagcagccatatggagagaccaacacaaccacaattgaactgggctgtgggaaacttggagcaatttcccaggagagcaggaaagacaaaggcttaaagaagaagggccatgcgacacctgtgaggatctttgtcctcctggtaaacatggtccacagtgtgagcagagatgcccttgtcaaaatggaggagtgtgtcatcacgtcactggagaatgctcttgcccttctggctggatgtcacccattccaggatactcagtgcatacacatgcaggagactttagcacaaaggaaagttaccatgatggttgaagattccaaaattggaaagactcaagccattttaaatctgaaactcttcagttctgaggagacagaagaagcttcatttctccagagaaagcgaatcattgtaagcagcgctgcttgcagcagaatcgtgaatggacaaaggagatggccaggggtcccttctccagtccagctcccattctttttgccccacatgccttgtcttctcctgctggatactgctgtaaaggaagggactgttctgatgattattttctttggggtagacttaagtctgctaactctgtttttgttagatggagaaagtcaaatggtaactcaaagttcaagttctaatgggggcgtccaggcaagtgtggcttgtaagaaggacagagggaagaggtttggggactgggtaactcactttattgcctggcaggccagctctgatggtgagagatcagttcccatggatgtgtcctgcctgtcgttggcactggttaagagaactttggaaccgtaa

SEQ ID NO: 136732 - DNA, 1402 bp, Homo sapiens
atgggttggggccagggccctgatgtccagctaatgaatggccatgagaggtcaccaagccattctccccgagaggcgaagaaatctggttctcccttacccactgatatccactgtttctctcctcaatctcagcctgcgatggtgatcactggggtccccactgcaccagccggtgccagtgcaaaaatggggctctgtgcaacccccatcaccggggcttgcccactgtggctgcggggcttccggggctggcgctgcgaggaccgctgtgagcagggcacctatggtaacgactgtcatcagagatgccagtgccagaatggagccacctgcgaccacgtcacgggggaatgccgctgcccaccaggatacaccggagccttctgtgaggatctttgtcctcctggtaaacatggtccacagtgtgagcagagatgcccttgtcaaaatggaggagtgtgtcatcacgtcactggagaatgctcttgcccttctggctggatgttgtctttccctggctggaggcccatctaattttccaagtctctttgaatgcagggcacagtgtgtggtcagccttgccccgagggtcgctttggaaagaactgttcccaagaatgccagtgccataatggagggacgtgtgatgctgccacaggccaatgtcattgcagtccaggatacacaggggaacgagcagcagttccggatgttagaaaggtgccaggatgagtgtcctgttgggacctatggcgttctctgtgctgagacctgccagtgtgtcaacggagggaagtgttaccacgtgagcggcgcatgcctctgtgaagcaggctttgctggcgagcgctgcgaagcacgcctgtgtcctgaggggctctacggcatcaaatgtgacaaacggtgtccctgccacctggaaaacactcatagaggagatgacagagaaaaagcagaatttggccaccttctcattgctttggaagttcagtatacagaaatatcaaactgcattgaaaagtcgcaggaagccagctgctatgatattcggatgctcaagcagccatatggagagaccaacacagaggaagagctcgcagtgaattatgtctactcaatctatgcatcaaaggagcagattagatacaagcatggtagaagttttgccaatggccatgtgaaagagctgatggaaggtccgagccgtcgtattgcggggtcgggtggggaaaaatataagagggatgaggaaaaaaacacccttttaaggggacaaaaccgtggcggtcggggcaagaacccaaaaaagacaaaggcgtgggtaaaaattcaggggcaaaacaaaattgaaatttcgggtgtcggggcagaccgcaagcggtttttccgggaaaaataa

SEQ ID NO: 136733 - DNA, 2212 bp, Homo sapiens
atggagcagaaaggagaattcaagaatgacacgctcatttatgaatttttccacattgtcgccaagccacatccattgccaataaaatcttccacatacactacctttcaatctgctcgtgtgaccagatttttcctggatgctgaaaaagaatgcaggtgtcaagaagggcaggtggaagctgcattgatagccatgggtggcacctgccaaggaactcaaaggttgtcaacagcaggggagagtgaatcagctacgcacatgcgtgagccagccgttcagtgccgccgagacagccagtgcgtgtctgttttggcaggaagaagacgtttcttccaaggagcagcctccccgctacatccagccagtgtcgcccttacacagctgcatgtcaggtgggcatcaaccgctaccatcggccaggtgtctggttttccagggaaaatcagggtttcccctactacaaaccttggagactcagattacatctttactgcatcccactggggattgggacactatggccctgctgtccatgtgcattcccagggtggcatcgatgaaagaggcagcaatgatagtggcaggctgtatgtcaccaacccctgcggaaatgttccctcatggactccgaatattgaccgccttgcagaggacggcgtgaagctgacccaacacatctctgccgcatctttgtgcaccccaagcagagccgccttcctcacgggcagataccctgtgcgatcagggatggtttccagcattggttaccgtgttcttcagtggaccggagcatctggaggtcttccaacaaatgagacaacttttgcaaaaatactgaaagagaaaggctatgccactggactcattggaaaatggcatctgggtctcaactgtgagtcagccagtgatcattgccaccaccctctccatcatggctttgaccatttctacggaatgcctttctccttgatgggtgattgcgcccgctgggaactctcagagaagcgtgtcaacctggaacaaaaactcaacttcctcttccaagtcctggccttggttgccctcacactggtagcagggaagctcacacacctgatacccgtctcgtggatgccggtcatctggtcagccctttcggccgtcctcctcctcgcaagctcctattttgtgggtgctctgattgtccatgccgattgctttctgatgagaaaccacaccatcacggagcagcccatgtgcttccaaagaacgacaccccttattctgcaggaggttgcgtcctttctcaaaaggaataagcatgggcctttcctcctctttgtttcctttctacacgttcacatccctcttatcactatggagaacttcctcgggaagagtctccacgggctgtatggggacaacgtagaggagatggactggatggtaggacggatccttgacactttggacgtggagggtttgagcaacagcaccctcatttattttacgtcggatcacggcggttccctagagaatcaacttggaaacacccagtatggtggctggaatggaatttataaaggtgggaagggcatgggaggatgggaaggtgggatccgcgtgcccgggatcttccgctggcccggggtgctcccggccggccgagtgattggcgagcccacgagtctgatggacgtgttccccaccgtggtccggctggcgggcggcgaggtgccccaggacagagtgattgacggccaagaccttctgcccttgctcctggggacagcccaacactcagaccacgagttcctgatgcatttattgtgagagggttctgcacgcagccaggtggcatcaacgggacagaggaacaatgtggaaagtccactttgtgacgcctgtgttccagccagagggagccggtgcctgctatggaagaaaggtctgcccgtgctttggggaaaaagtagtccaccacgatccacctttgctctttgacctctcaagagacccttctgagacccacatcctcacaccagcctcagagcccgtgttctatcaggtgatggaacgagtccagcaggcggtgtgggaacaccagcggacactcagcccagttcctctgcagctggacaggctgggcaacatctggagaccgtggctgcagccctgctgtggcccgttccccctctgctggtgccttagggaagatgacccacaataa

SEQ ID NO: 136734 - DNA, 2191 bp, Homo sapiens
gcaccgccgcgccggaattgccgggacgacgacttcgtacgaaatcgtagggaaaaacaaactcgaagataatcattcccagctcaaagccttgtgcaagagctctctgccttcacgcttgcttcctttggcagagaaccttcctcttcttgatcggggattcaggaaggagcccaggagctgaggaagtacagagagagacaacatgttacatctgcaccattcttgtgtgtgcttcaggagctggctgccagcgatgctcgctgtactgctaagtttggcaccatcagcttccagcgacatttccgcctcccgaccgaacatccttcttctgatggcggcacgaccatggcgttggggacattggctgctatggcaacaacaccatgaggactccgaatattgaccgccttgcagaggacggcgtgaagctgacccaacacatctctgccgcatctttgtgcaccccaagcagagccgccttcctcacgggcagataccctgtgcgatcagggatggtttccagcattggttaccgtgttcttcagtggaccggagcatctgcaggttttaccaccaatgtagacaacttttgcaaaaatactgaaagagaaaggctatgccactggactcattggaaaatggcatctgggtctcaactgtgagtcagccagtgatcattgccaccaccctctccatcatggctttgagcatttctacggaatgcctttctccttgatgggtgattgcgcccgctgggaactctcagagaagcgtgtcaacctggaacaaaaactcaacttcctcttccaagtcctggccttggttgccctcacactggtagcagggaagctcacacacctgatacccgtctcgtggatgccggtcatctggtcagccctttcggccgtcctcctcctcgcaagctcctattttgtgggtgctctgattgtccatgccgattgctttctgatgagaaaccacaccatcacggagcagcccatgtgcttccaaagaacgacaccccttattctgcaggaggttgcgtcctttctcaaaaggaataagcatgggcctttcctcctctttgtttcctttctacacgttcacatccctcttatcactatggagaacttcctcgggaagagtctccacgggctgtatggggacaacgtagaggagatggactggatggtaggacggatccttgacactttggacgtggagggtttgagcaacagcaccctcatttattttacgtcggatcacggcggttccctagagaatcaacttggaaacacccagtatggtggctggaatggaatttataaaggtgggaagggcatgggaggatgggaaggtgggatccgcgtgcccgggatcttccgctggcccggggtgctcccggccggccgagtgattggcgagcccacgagtctgatggacgtgttccccaccgtggtccggctggcgggcggcgaggtgccccaggacagagtgattgacggccaagaccttctgcccttgctcctggggacagcccaacactcagaccacgagttcctgatgcattattgtgagaggtttctggcacgcagccaggtggcatcaacgggacagaggaacaatgtgggaaagtcccactttgtgaccgccttgtgtttccagccaagagggagccggtgcctgcttatggaagaaaaggtctgcccgtgctttggggaaaaaagtagtccaccacgatcccacccttgcttctttgacctctcaagagacccttctgagacccacatcctcacaccagcctcagagcccgtgttctatccaggtgatggaacgaagtccagcaggcggtgtgggaacaccagcggacactcagcccagttcctatgcagctggacaggctgggcaatatctggagaccgtggatgcagccctgctgtggcccgttccccctctgctggtgccttagggaagatgacccacaaataaatgtctgcagtgaaaagctggagccccgattcctaaattttgtcactcaaattgaaacaaaccagctggccatggtggttgtcatcccagcactttaggaggccaccacaggaggatcactcccgtgatcaaaaccaacctgggcaacatgatgaaactctagctctacaaaacaaaaataaaaaaaaaattagcctgc

SEQ ID NO: 136735 - DNA, 392 bp, Homo sapiens
caagatccaaagaaaaaattttatttacaatagagaattttatttgaaacatgcatttcttgtttttttaaaaacaaatcagcaaatgcagatcaagtttacactccttaaggcaagagtccctatgcacgctgtacatgttcatattaaatccaaaagctgagttaggttgtccaaacaaactcaccagacaggttacataagatagtgtaccacaacaaatttaaattttgaacaaaacacatctctcctcctttggtctcacacagaaattaaagtctccaaatacagacaatactatccattctccagctcttctccagattcacgagtcccagccaggtcggcccatccacactccccgttgaagtctggtcctttcttcagtagtt

SEQ ID NO: 136736 - DNA, 513 bp, Homo sapiens
ccgccttccttaaaaaagaaacagaccaccaagaaacccacagagacccccccagtgaaggagacgcaacaggagccagatgaagagagccttgtccccagtggggagaatctagcatctgagacgaaaacggaatctgccaagacggaaggtcctagcccagccttattggaggagacgccccttgagcccgctgtggggcccaaagctgcctgccctctggactcagagagtgcagaaggggttgtccccccggcttctggaggtggcagagtgcagaactcaccccctgtcgggaggaaaacgctgcctcttaccacggccccggaggcaggggaggtaaccccatcggatagcggggggcaagaggactctccagccaaagggctctccgtaaggctggagtttgactattctgaggacaagagtagttgggacaaccagcaggaaaacccccctcctaccaaaaagataggcaaaaagccagttgccaaaatgcccctgaggaggcca

SEQ ID NO: 136737 - DNA, 614 bp, Homo sapiens
gatgtggttctgagacagtccctgtccctgatggcccacggagcgactcggtgaaatccttggagcgtcgtgcatcagacgctaagattcaggagggcaaagtgaacacacgaaggaagtccacggattccgtccccatctctaagtctacactgtcccggtcgctcagcctgcaagccagtgactttgatggtgcttcttcctcaggcaatcccgaggccgtggcccttgccccagatgcatatagcacgggttccagcagtgcttctagtacccttaagcgaactaaaaaaccgaggccgccttccttaaaaaagaaacagacctccaagaaacccacagagacccccccagtgaaggagacgcaacaggagccagatgaagagagccttgtccccagtggggagaatctagcatctgagacgaaaacggaatctgccaagacggaagcccctcgaaagccacgccaaggggtcaggaaagccgtgattcgcataacttgcaatgggactgggcaaataattgtgaatggaattcgtgcttgtgacttctggttctcacagctgcggatgggggggatcaccatcccaattctgagtcatgttcagccctga

SEQ ID NO: 136738 - DNA, 2118 bp, Homo sapiens
atgggagggtcgcagtccctgcagccagccccagccagcgacctgaacctggaggcttccgaggcaatccttggaaagctttacctggggctgctctgggaggagcatctggtagccccaagttactgctgtgggcagaaacgattccctggaattcagttttggtcgctcagcagtgggtgcatggctggggggcttctcctgccgtcagcatctttcctctgcacccccggcacagtggtatttcctgcaagggaacagccaggcatcagcgactgcctcctcctaggaagaacccatgagcgtggcagctccgtgcccggggcgacagcccagtttccgggcagctgcgcttgtggctgggcagatggcgtggagaatacaacttattcgaaaacgattgctctatatggattcttctttaagataaagggactcaaacatgatactacctcttatagtttttacatgcagagaataaagcacacagacctggaatctccctctgcggtctacgagcacaaccacgtcagcctgcgagcggcacgcctggtgaagtatgagatcagagcagaggccctggttgacggcaagtggcaggagttcaggacaaaccagatcaagcagaagtttgggttgaccacctttcttgagaactgttgctttctggaccgggacataggacgaagcttgaggccgctcttcctctgcttgcgtctgcacggcatcaccaaaggagaaaacagcaccacagccatcaaatatgagcatcaactgatctggttccaaattcatgagagctgctgtgatcacactttcacagatgaggacattgcagctgcggggcagttaagcaactcacaggaggttccacagccagtctggaaaatagtggccgagtatgagaagaccatcgctcagatgataggtaggtgtcctgacctgcgggggctcaggccggccccgatgtttctgaactatgaggaggccttggaagataggaggctcagaacagctcccgagggctcctttgcctctgctgacgccctcctcagcaggctagctcaccccgtctctctctgtggtgcacttgactatctggagcccgacttagcagaaaagaaccccccactattcgctcagaaactccaggaggagttagagtttgccatcatgcggatagaagccctgaagctggccaggcagattgctttggcttcccgcagccaccaggatggccaagcagggaactgtcgacaagggggctacgatgccacccccagctgccagcaggaaggaccccaggcacagcctgcaggtctgaagtgggtgacagtggccagaggttctcacaggtcgcaggacttcagtggagtgaagagagaggctgctcacccaacagacgtctccatctccaaaacagccttgtactcccgcatcgggaccgctgaggtggagaaacctgcaggccttctgttccagcagcccgacctggactctgccctccagatcgccagagcagagcacaaagctcggctggaacgccgggtcactggctcaaccaaccggtggcgtttgcccaaacagcctttctctggggacctgctctcactttcccagatgtgcaaggctctgagcatagactttgaggaagctttgaggaacccagacagttccttcctccaggacaacaccttcctccagcacaacaggggcagaggagccggtcttctggggagaagcttttacacatctggccctctcctttgtgatattgggaagctgcatgtccagaggcagcagatactctcaggtgttctgggctcaggtccagcaccacctcctcttggaagtcaccctgattgctcctccccacatactgccttagttttgatttccatgccttccttcttctacctggttccttacctccctccacctcccatgaaacaacagactgccgggaagcagcgctccccatacaaatccatcctgagtgccagctctgtgctgacctgtgctgctggttctggaaatgccaccagggacaggtggaggccttttcgtcctggagctcatggcctcaccggtcagcagagggtgaagcccaagctgtga

SEQ ID NO: 136739 - DNA, 1967 bp, Homo sapiens
tttcgtccaggggatggacgagtactcaggctttcctcgaatctctgcttgagtggggcagcctcggggcctccggacgctggagaagctcacagcatctgtggccggtggtgcagctaacttttttggtgacattgaaagagatttaggtccaagagatacgagcaggggaattaggggtgggaatttgggggacagaggctgttcttcagcggaaatggcctatgcctcctggcagaggtggtccccagtggaatgggcccggtggatgtggacagcggtgaccagcagtggggactccagtctgctggtgcttcagggagactctggaaaaaggagttccgattctgaagaggcatttgagaccccggagtcaacgacccctgtcaaagctccgccagctccacccccaccaccccccgaagtcatcccagaacccgaggtcagcacacagccacccccggaagaaccaggatggggttctgagacagtccctgtacctgatggcccacggagcgactcggtggaaggaagtcccttccgtacccaggcacactccttctctggcgtcttcgatgaagaccagccgatagccagcactgggactgacatcttggactttgacaacattgagcttgtggatacctttcagaccttggagcctcgtgcctcagacgctaagaatcaggagggcaaagtgaacacacggaggaagtccacggattccgtccccatctctaagtctacactgtcccggtcgctcagcctgcaagccagtgactttgatggtgcttcttcctcaggcaatcccgaggccgtggcccttgccccagatgcatatagcacggagagtgcaaaaagggttgtccccccggcttctggaggtggcagagtgcagaactcaccccctgtcgggaggaaaacgctgcctcttaccacggccccggaggcaggggaggtaaccccatcggatagcggggggcaagaggactctccagccaaagggctctccgtaaggctggagtttgactattctgaggacaagagtagttgggacaaccagcaggaaaacccccctcctaccaaaaagataggcaaaaagccagttgccaaaatgcccctgaggaggccaaagatgaaaaagacacccgagaaacttgacaacactcctgcctcacctcccagatcccctgctgaacccaatgacatccccattgctaaaggtacttacacctttgatattgacaagtgggatgaccccaattttaaccctttttcttccacctcaaaaatgcaggagtctcccaaactgccccaacaatcatacaactttgacccagacacctgtgatgagtccgttgacccctttaagacatcctctaagacccccagctcaccttctaaatccccagcctcctttgagatcccagccagtgctatggaagccaatgcagtgggacggggatgggctaaacaagcccgccaagaagaagaagacgcccctaaagacgatggttgaagatgtgatgtctgtgtgttctctgtttgacacatttagggtgaaaaagtcgccaaaacggtctcctctctctgatccaccttcccaggaccccaccccagctgctacaccagaaacaccaccagtgatctctgcggtggtccacgccacagatgaggaaaagctggcggtcaccaaccagaagtggacgtgcatgacagtggacctagaggctgacaaacaggactacccgcagccctcggacctgtccacctttgtaaacgagaccaaattcagttcacccactgaggagttggattacagaaacttctatgaaattgaatatatggagaaaattggctcctccttacctcaggacgacgatgccccgaagaagcaggccttgtaccttatgtttgacacttctcaggagagccctgtcaagtcatctaccgtccgcatgtcatag

SEQ ID NO: 136740 - DNA, 3454 bp, Homo sapiens
  misc_feature (1)...(3454): n = a,t,c or g
cccaccagggaagcaccccagcaggacaacaggtggggatgtggcaaggaaagctgctcatctctggctgacaccagagaagtgacagtcagcaaagcaggacagagagggacatgtgggccgggatgtggttctgagacagtccctgtccctgatggcccacggagcgactcggtggaaggaagtcccttccgtcccccgtcacactccttctctgccgtcttcgatgaagacaagccgatagccagcagtgggacttacaacttggactttgacaacattgagcttgtggatacctttcagaccttggagcctcgtgcctcagacgctaagaatcaggagggcaaagtgaacacacggaggaagtccacggattccgtccccatctctaagtctacactgtcccggtcgctcagcctgcaagccagtgactttgatggtgcttcttcctcaggcaatcccgaggccgtggcccttgccccagatgcatatagcacgggttccagcagtgcttctagtacccttaagcgaactaaaaaaccgaggccgccttccttaaaaaagaaacagaccaccaagaaacccacagagacccccccagtgaaggagacgcaacaggagccagatgaagagagccttgtccccagtggggagaatctagcatctgagacgaaaacggaatctgccaagacgggagggcctaagcccagccttattggaggagacgccccttgagcccgctgtggggcccaaagctgcctgccctctggactcagagagtgcagaaggggttgtccccccggcttctggaggaaaacgctgcctctttaccacggccccggaggcaggggaggtaaccccatcggatagcggggggcaagaggactctccagccaaagggctctccgtaaggctggagtttgactattctgaggacaagagtagttgggacaaccagcaggaaaacccccctcctaccaaaaagataggcaaaaagccagttgccaaaatgcccctgaggaggccaaagatgaaaaagacacccgagaaacttgacaacactcctgcctcacctcccagatcccctgctgaacccaatgacatccccattgctaaaggtacttacacctttgatattgacaagtgggatgaccccaattttaaccctttttcttccacctcaaaaatgcaggagtctcccaaactgccccaacaatcatacaactttgacccagacacctgtgatgagtccgttgacccctttaagacatcctctaagacccccagctcaccttctaaatccccagcctcctttgagatcccagccagtgctatggaagccaatggagtggacggggatgggctaaacaagcccgccaagaagaagaagacgcccctaaagactgacacatttagggtgaaaaagtcgccaaaacggtctcctctctctgatccaccttcccaggaccccaccccagctgctacaccagaaacaccaccagtgatctctgcggtggtccacgccacagatgaggaaaagctggcggtcaccaaccagaagtggacgtgcatgacagtggacctagaggctgacaaacaggactacccgcagccctcggacctgtccacctttgtaaacgagaccaaattcagttcacccactgaggagttggattacagaaactcctatgaaattgaatatatggagaaaattggctcctccttacctcaggacgacgatgccccgaagaagcaggccttgtaccttatgtttgacacttctcaggagagccctgtcaagtcatctcccgtccgcatgtcagagtccccgacgccgtgttcagggtcatagttttgaagagactggaagccctttgtgnaacactgctgcggaaaaaccaggcatcctgttcccacgagggactgggccccttaaccaaggagttcacacttggcagggtgccagaggaaatcctcccaggaagggagctgggagggccatggggtttggggcacccctttcaggaaggcgatttgaaatttacagcttccccgaggggttcctttgcctctgctgacgccctcctcagcaggctagctcaccccgtcttttctctgtgggtgcacttgactatctgggagcccgantttaggcagaaaaggaaccccccactattcgctcagaaactccagagagaggcttgttcacccaacagacgtctccatcttccaaaacagccttgtactcccgcatcaggaccactgaggtggagaaacctgcaggccttctgttccagcagcccgacctgggactctgccctccagatcgccagagcagagatcattaaccaaggagagagaggtctcagaatggaaagataaatatgaagaaagcagggcgggaagtgatggaaatgaggaaaatctatggccgagtatgagaagaccatcgctcagatgatagaggacgaacagagagagaagtcagtctccccaccagacggtgcagcagctggttctggagaaggagcaagcccctggccgacctgaactccgtggagaaagtctctggccgacctcttcagaagatatgagaagatgaaggaggtcctagaaagcttccgcaagaatgaagaggtgttgaagagatgtgcgcaggagtacctgtcccgggtgaagaaggaggagcagaggtaccaggcccctgaaggtgcacgctggaggagaaactggacagggccaatgctgaagattgctcaggttcgaggcaaggcccagcaggagcaagccgcccaccaggccagccttgcggaaaggagcagctgccgagttggacgccctggaaaggacgctggagcagaagaataaagaaatagaagaactcaccaagatttgtgacgaactgattgccaaaatggggaaaagctaactctgaaccgaatgttttggacttaactgttgcgtgcaatatgaccgtcggcacactgctgttcctccagttccatggaccaggttctgttttcactttttcgtatgcactacttgtatttccctttcctaaataaaattgatttgattgtatgccaggtacctaagggagacctatccagaatttcctggcctattgggtttgcatttccccctagtataattcatagcaagttgaccctcagagttcctgtatcagggagaattgtcttgatttcttttaaataaaagaaccacaattgctgaccttgggccttgccctttgtacacaaaagttccccaggggtgagcagcttttgggatttaatatggaacatgtacagcgtgcatagggggactcttggccttaaggagtgtaaacttgattctgcatttgctgatttgtttttaaaaaaaacaagaaatgcatgtttccaataaaattctttattggtaaataaaattttttctttggatcttggcaaaa

SEQ ID NO: 136741 - DNA, 2451 bp, Homo sapiens
  misc_feature (1)...(2451): n = a,t,c or g
tttcgtgcggctggcccggtttcctggcgacgcggttctgcaggcggttgcgttccccgtcgttaccctctttctcttcccgacgcgtgagttaggccgtaatgccttggctgctctcagcccccaagctggttcccgctgtagcaaacgtccgcggcctctcaggatgtatgttgtgttcacagcgaaggtactcccttcagcctgtcccagaaaggaggattccaaaccgatacttaggccagcccagcccctttacacacccacacctcctcagaccagactcgaattcctgctgggaagtcggctgaaactaaggaaatgcagctcaccactgaaacccacaagaaatcagagtttttcaaagctgtaagctgagacgaacatggtttggtatgactggatgaggccctcacatgcacagcttcactctgactatatgcagcccctgactgaggccaaagccaagagcaagaacaaggttcggggtgttcagcagctgatacagcgcctccggctgatcaagtctcctgcagaaattgaacgaatgcagattgctgggaagctgacatcacaggctttcatagaaaccatgttcaccagtaaagcccctgtggaagaagcctttctttatgctaagtttgaatttgaatgccgggctcgtggcgcagacattttagcctatccacctgtggtggctggtggtaatcggtcaaacactttgcactatgtgaaaaataatcaactcatcaaggatggggaaatggtgcttctggatggaggttgtgagtcttcctgctatgtgagtgacatcacacgtacgtggccagtcaatggcaggttcaccgcacctcaggcagaactctatgaagccgttctagagatccaaagagattgtttggccctctgcttccctgggacaagcttggagaacatctacagcatgatgctgaccctgataggacagaagcttaaagacttggggatcatgaagaacactcaaggaaaataatgccttcaaggctgctagaaaatactgtcctcatcatgttggccactacctcgggatggatgtccatgacactccagacatgccccgttccctccctctgcagcctgggatggtaatcacaattgagcccggcatttatattccagaggatgacaaagatgccccagagaagtttcggggtcttggtgtacgaattgaggatgatgtagtggtgactcaggactcacctctcatcctttctgcagactgtccccnaaagagatgaatgacattgaaacagatatgcagccaggcttcttgaccttcactgcggccccacatgcacctcaggttcaaaatgggtgtcttctggcagccctgcacgtgtgctttctgagtgtctctgtgtgtgcattaatatatgcattccatttgggagcatagcagctgtgtgaatgtatgtaattgtgtgtggggggttttttgttttaagtagttagaagtctgggaaaatgaatttttgaatagtatgttactgcagctttggtaacattaattctatagaattaatgatcagagcaagtttaatttttaaacataaaggtcttggttacacatgtccatgcattccagttaacacatttaaacatatagaaaattcacttcttctttcaagtccttcccctttcctatacttttgctgagatcaaccccaatatcataagaagtttgtgtgatgcctgtatttttagcctaattacccaaggtctctgcctatgcaaaaattcatctttcggtgattgtgggcggccaatacataccttctgtaactcctccctacctattctagatcctgcatatctactggagccatatgaagcctcaggggcactggtgtcctgcaatctttacaagccagccacagtccaggttccagcaacactagctacctaccaaacaaaacacttctgagcttttcttgccatttggttgcctgggacctggaaagtgtttagattcttgataaagatggaaatggaagagaaagaaaattatatatgtatatactaaagatccagacatcagggctgggcacggcggttccgcctgtaatcccagcactttgggaggtccaggcgggtggatctcttgagaccgggaggtcaggaccagcctggccagcgtggtgggacactgtctctactaaagatacaaaagtgagctgggtgtgatgatgcatgcctgtggtcctggctgcttgggaggctgaggcatgagaattgcttgagcctgggaggtggaggttgcagtgagctgagctcatgcgactgcactccagcctgggtgactgagcaagactctgcctcaaaaaaacaaataaataaataaaatcctgacatcctgccatcttttctcttcaatttaaagttgatttcttaatgatgacttcaaaaattaat

SEQ ID NO: 136742 - DNA, 1492 bp, Homo sapiens
aatctgtgggagcagtttattccagtatcacccagggtgcagccacaccaggactgtgttgaagggtgtttttttttcttttaaatgtaatacctcctcatcttttcttcttacacagtgtctgagaacatttacattatacataaggtagacatgtttttatttcttctactttaaggaggactactctgttgtgacagtcctagactggtcttctacactaagacacccatgaaaggagtatgtgctcctaattattcctggctttgtgctctgccaaacccttcctttagcccttcacacatcgcactgaagaatatgatgctgaaggatatggaagacacagatgatgaggatgaagaagatgatgatgatgatgatgatgatgatgaggacaactctctttttccaacaagagagccaagaagccattttttttccatttgatctgtttccaatgtgtccatttggatgtcagtgctattcacgagttgtacattgctcagatttaggtttgacctcagtcccaaccaacattccatttgatactcgaatgcttgatcttcaaaacaataaaattaaggaaatcaaagaaaatgattttaaaggactcacttcactttatggtctgatcctgaacaacaacaagctaacgaagattcacccaaaagcctttctaaccacaaagaagttgcgaaggctgtatctgtcccacaatcaactaagtgaaataccacttaatcttcccaaatcattagcagaactcagaattcatgaaaataaagttaagaaaatacaaaaggacacattcaaaggaatgaatgctttacacgttttggaaatgagtgcaaaccctctttgataataatggggatagagccaggggcattttgaagggggtgacggtgttccatatcagaattgcagaagcaaaactgacctcagtttcctaaagggcttaccaccaactttattggagcttcacttagattataataaaatttcaacagtggaacttgaggattttaaacgatacaaagaactacaaaggctgggcctaggaaacaacaaaatcacagatatcgaaaatgggagtcttgctaacataccacgtgtgaggagagatacatttgggaaacattaaactaaaaaaaatcccttcaggattaccagagttgaaatacctccagataatcttccttcattctaattcaattgcaagagtgggagtaaatgacttctgtccaacagtgccaaagatgaagaaatctttatacagtgcaataagtttattcaacaacccggtgaaatactgggaaatgcaacctgcaacatttcgttgtgttttgagcagaatgagtgttcagcttgggaactttggaatgtaataattagtaattggtaatgtccatttaatataagattcaaaaatccctacatttggaatacttgaactctattaataatgggagtattatatataccagcaaat

SEQ ID NO: 136743 - DNA, 4611 bp, Homo sapiens
atgaagcagctactgcctgcctctggactgctccctctctccagctcccctctcagccctcgccaggagagtccaggagtagaaagggcccatgaaggatgtctgagccagaatcttcaggtccagagagccacgagggaaggagaaatcgatcgtgtggccaagtctggagggcaagagagggcctgtgccagcagtgagacagagagtgaagcgggagacatcatggaccagcaatttgaagagatgaacaacaaactcaactcggtcactgaccccactggctttctgcggatggttcgccgcaataacctgtttaacagccaggctgagtattgtgcccagccctggggactgagtggggagcagcaaggcccacagccccggagcttgcacccagctcccttggcaaggcctgacccaatccagtcccaccctcagaaaagcaaagaaattgaaggggtctctgcagactcttccaaccccgaccctttggatgagggaaatagccggcgttcttctcgcttcaatgtggaggcagtgctgtgttcttcacgtgggagacctgattcctcaatgccagactgctgcagaaatgctgccttggaagccaggagctgccagagcatgacgagcctgttcagtaacactgtgtcaccgacccaggacgggacctcctctcttcccaggaggcagagctcgtttgccaagcccccgctccgtgccctgtatgacctgctcatcgcgcccatggaagggggtgtggtggaaagcacagagcctttgggaaccagcagagctggatttgcatctggcactgcccttttctggctgggtgacaatggcaaagctgcttcccctcctggagtatctgtttcctcattagaaaatgaggatgataacacccaatgcaacaggttagagcagggatacagagaggcagctgtgcctgattggactcaggacttagctctgtgcttgctgcccactctacagtccctgaaggcaaggactgcccctcatctctgtgtccccagcagctgttacaaggcctggtacacgttggcggtcagtaaagtttctggaatgggcctgatgcactccagcggccccgtgggccggcaccggcagctcatcctggttctggagggggagctctacctcattcctttcgccctcctgaagggaagctcctccaatgagtacctctacgagcgcttcggcctccttgctgtcccttccatccgctccctcagcgtgcagtccaagtctcacttacggaagaacccgcccacatactccagctccacatccatggcggctgtcatcggcaaccccaagctaccatcggccgtgatggacaggtggctgtgggggcccatgccatcggccgaggaagaggcctacatggtgtccgagctgctgggctgccagcccctagtgggcagtgtggccaccaaggagagggtcatgagtgccctgacccaggctgaatgcgtccactttgccacccacatctcctggaagctgtcggccttggtcctcacgcccagcatggacggcaaccctgccagcagcaagagctccttcggccacccctacacgatccctgagtccttgcgggtgcaggacgatgccagtgatggggagagcatctcggactgcccgcccctgcaggagctgctgcttactgccgccgacgtcctggacctgcagctgcctgtgaagctggtggtgcttggctcctcccaggagtccaacagcaaagtcacagccgacggggtcatcgcgctgacaagggccttcctggctgccggcgctcagtgtgtcctcgtgtctctgtggcctgtgccagtggctgcttctaagatgttcatccatgccttctactcatccctgctgaacggcctgaaagccagcgccgccctgggggaggccatgaaggtggtgcagagcagcaaggccttctcgcacccctccaactgggcagggttcatgctcatcgggagtgacgttaagctgaacagcccctcatcactcatcggccaggccctcacagagatcctgcagcacccggagcgtgcgcgggacgccctgcgagtgctgctgcacctggtggagaaatccctgcagcgcatccagaatgggcagcgcaatgccatgtacacatcccagcagagtgtggagaacaaagtgggcggcatccctggctggcaggccctcctcaccgctgtgggcttccggctggaccccccaaccagtggcctgccagcggctgtcttcttcccaacctccgacccgggcgaccggctccagcagtgcagcagcacactccagtccctgctgggtctgcccaatcctgccctccaagccctttgcaaactcatcactgcctccgagacgggcgagcagctcatcagccggctccaccaggtgctggttcagctccaggctggcgagaaggagcaggacttggcatcagctcccattcaggtctccatcagcgtccagctgtggcggctcccgggatgccacgagttcctggcagctctagacatggggaagccccaggcccaaatgcttgctgaagggccttgcaggcattccatgaagttgcacaaggagccctatagcgctcatgttcaagatctggaatcttcccgaaggaagcagatgcttatattctttgttcctctaggttttgatctctgtgaagttggtcaggaggaagtaatcctgaaaaccgggaagcaagctaatcgacggactgtgcacttcgcgctccagtccctgctgtctctgtttgggcctgaccggagcggacactcaggtcatgtgggcctgggagatttccaggccctggggacacacccagcccgactgatgttcttaagggccaagctggctacagtgggaagagcaaatgctggcttggaaggtggttatggtttgcaggtggaaccaacggagtctgctgaagattctactgagctacccaagcgcctcagccttgacagctcctcctccctcgagtctcttgcttctgctcagtctgtttccaacgccctgcccttgggttaccagcaaccccccttctctcccaccggtgcggacagcatcgcctcagatgccatctctgtgtacagtctgagctccattgcctcctcaatgagctttgtctccaaacccgagggtggatcagagggtggaggccccggaggacggcaggaccatgaccggtccaagaacgcttacctgcagagatccaccctgcctaggagccagctgcctccccagacccgccctgcaggcaacaaagatgaagaagaatatgaagggttttctatcatcagtaacgagcccttggcgacctaccaagaaaaccgaaacacatgcttctcaccagaccacaaacaaccccaacctgggacagccggaggcatgagagtctcggtgagctccaaagggagcatcagcactccaaattctccagtgaaaatgactctgattcccagccccaactcacccttccaaaaggtgggaaaactagcaagctcagatacaggagaatcagaccagtctagcacagaaacggacagtaccgtgaaatcccaagaagaaagcaacccaaaactggatccacaagagttagcccagaaaattctggaggagacacagagtcatctcattgcggtggagcgtcttcagaggagcggcggccaggtgagcaagagtaataaccctgaagacggcgttcaggcgcccagcagcactgctgtcttcagagcgtcagaaaccagtgcgttcagcaggcctgttctctcccatcagaagagtcagccatcaccagtcactgttaaaccaaagcccccagccaggagctcctccctgcccaaggtgagttccggatatagcagccccaccacctcagagatgtccatcaaagacagcccgagccagcacagtggccggccatcgcccggctgcgactcacagacttcccagctggaccagcctctctttaaactgaagtaccccagctctccttacagcgctcacatttccaaatcaccaaggaacatgtccccaagctccggccaccagtctcctgctggcagtgcaccctccccagctctctcctactcctcagctggatctgctcgctcaagtccagcagacgctcccgacatagacaaactgaaaatggcagccattgatgaaaaggtgcaggctgtccataacctgaagatgttctggcagagcacaccccagcattccacagggccaatgaagatcttccggggggctcctggcacgatgacttccaaaagggatgtcctcagtctgttgaatttgtcaccacggcacaataagaaggaggagggagtggataagcttgaactgaaggagctgtccctgcagcagcatgacggagctccaccgaaagcccctcccaacggacactggcgcaccgagaccacctcgctgggctcactgccgctgcccgccggccctcccgccacagcccccgcgcgccctttgaggcttccttctggaaatggctacaagttcctgtctccaggaagatttttcccttcttccaaatgctaa

SEQ ID NO: 136744 - DNA, 465 bp, Homo sapiens
agtccaggagtagaaagggcccatgaaggatgtctgagccagaatcttcaggtccagagagccacgagggaaggagaaatcgatcgtgtggccaagtctggagggcaagagagggcctgtgccagcagtgagacagagagtgaagcgggagacatcatggaccagcaatttgaagagatgaacaacaaactcaactcggtcactgaccccactggctttctgcggatggttcgccgcaataacctgtttaacagccaggctgagtattgtgcccagccctggggactgagtggggagcagcaaggcccacagccccggagcttgcacccagctcccttggcaaggcctgacccaatccagtcccaccctcagaaaagcaaagaaattgaaggggtctctgcagactcttccaaccccgaccctttggatgagggaaatagccggcgttcttctcgcttcaatgtg

SEQ ID NO: 136745 - DNA, 1545 bp, Homo sapiens
atgggcatcacaaagatgaacatgaatgtgatggaagaagccattggctactttgagcagcaattggccatgctgcagcagctaagtggaaatgagtctgtgctcgacaggggccgggcctatggcaacctgggggattgctacgaagccctgggtgactatgaggaagctatcaaatactatgaacaatatttatctgtcgcgcagagtctgaatcgcatgcaagaccaagccaaggcttaccggggcctgggaaatggacacagggcaatggggagcttgcagcaagcccttgtgtgctttgaaaagaggctcgtggttgctcatgaacttggagaggccttcaataaagcccaggcctatggagagctgggaagtctgcacagccaattagggaattacgaacaagccatttcctgccttgaacgccagctgaacattgctagagatatgaaagaccgagccctggagagtgacgcagcctgtggcctggggggcgtttaccagcagatgggggagtatgacacagccctgcagtaccaccagcttgatctacagatagcagaggaaaccaacaaccccacgtgccagggccgagcctatgggaacctgggcctgacttatgaatccctgggcaccttcgagagggctgtggtctatcaagaacagcacttgagcattgctgcacagatgaatgacttggcggccaagacggtgtcatatagtagccttggaaggacccatcatgccttgcagaactattcccaagcagtcatgtacttacaggaaggtttaaggttagctgagcaactgggccgaagagaagatgaggcaaaaattcgccatggccttggcctctccctttgggctagtggaaacttggaggaggcccaacaccagctttatagggcatcagccttgtttgaaacaatccgacatgaggcacagctgagcacggactacaaactctccctctttgacctgcagacatcatcctaccaggccttgcagcgggtgctcgtcagcctaggccatcatgatgaagccctggctgtggcagaaaggggacggacaagggcatttgctgatcttctggtggaacgacaaacaggacaacaagactccgacccctactccccagtcactattgatcagatcttagagatggtaaatggccagaggggactagtgctttactattccctggctgcaggctatctgtatagctggctgctggctcctggggcaggaattgtgaagtttcatgaacactacctgggtgagaacacagtggaaaactcaagtgacttccaggccagcagcagtgtaacccttccaacagcaaccggctcagccctggagcagcacattgccagtgtccgggaggccctgggggtggagtctcactactcaagtattagaaatgggcactgccggagtctgccctgctacctttccctttttcatgtttctactgctggccaccaagattataaaggtacttgggtgtatgacacctgccatttgaaatctctgcatatgtga

SEQ ID NO: 136746 - DNA, 4228 bp, Homo sapiens
gaggcagtgctgtgttcttcacgtgggagacctgattcctcaatgccagactgctgcagaaatgctgccttggaagccaggagctgccagagcatgacgagcctgttcagtaacactgtgtcaccgacccaggacgggacctcctctcttcccaggaggcagagctcgtttgccaagcccccgctccgtgccctgtatgacctgctcatcgcgcccatggaagggggtgtggtggaaagcacagagcctttgggaaccagcagatctggatttgcatctggcactgcccttttctggctgggtgacaatggcaaagctgcttcccctcctggagtatctgtttcctcattagaaaatgaggatgataacacccaatgcaacaggttagagcagggatacagagaggcagctgtgcctgattggactcaggacttagctctgtgcttgctgcccactctacagtccctgaaggcaaggactgcccctcatctctgtgtccccagcagctgttacaaggcctggtacacgttggcggtcagtaaagtttctggaatggtggaggggaaggcctggatcatcctcctgcttctggctgcaagcacccacgcactgctccagaggccacaagagggcgatataacaccgctagccggctccagagctgccgctgtcagctgccaagccagacccttctccacattttcaggcctgatgcactccagcggccccgtgggccggcaccggcagctcatcctggttctggagggggagctctacctcattcctttcgccctcctgaagggaagctcctccaatgagtacctctacgagcgcttcggcctccttgctgtcccttccatccgctccctcagcgtgcagtccaagtctcacttacggaagaacccgcccacatactccagctccacatccatggcggctgtcatcggcaaccccaagctaccatcggccgtgatggacaggtggctgtgggggcccatgccatcggccgaggaagaggcctacatggtgtccgagctgctgggctgccagcccctagtgggcagtgtggccaccaaggagagggtcatgagtgccctgacccaggctgaatgcgtccactttgccacccacatctcctggaagctgtcggccttggtcctcacgcccagcatggacggcaaccctgccagcagcaagagctccttcggccacccctacacgatccctgagtccttgcgggtgcaggacgatgccagtgatggggagagcatctcggactgcccgcccctgcaggagctgctgcttactgccgccgacgtcctggacctgcagctgcctgtgaagctggtggtgcttggctcctcccaggagtccaacagcaaagtcacagccgacggggtcatcgcgctgacaagggccttcctggctgccggcgctcagtgtgtcctcgtgtctctgtggcctgtgccagtggctgcttctaagatgttcatccatgccttctactcatccctgctgaacggcctgaaagccagcgccgccctgggggaggccatgaaggtggtgcagagcagcaaggccttctcgcacccctccaactgggcagggttcatgctcatcgggagtgacgttaagctgaacagcccctcatcactcatcggccaggccctcacagagatcctgcagcacccggagcgtgcgcgggacgccctgcgagtgctgctgcacctggtggagaaatccctgcagcgcatccagaatgggcagcgcaatgccatgtacacgtcccagcagagtgtggagaacaaagtgggcggcatccctggctggcaggccctcctcaccgctgtgggcttccggctggaccccccaaccagtggcctgccagcggctgtcttcttcccaacctccgacccgggcgaccggctccagcagtgcagcagcacactccagtccctgctgggtctgcccaatcctgccctccaagccctttgcaaactcatcactgcctccgagacgggcgagcagctcatcagccggctccaccaggtgctggttcagctccaggctggcgagaaggagcaggacttggcatcagctcccattcaggtctccatcagcgtccagctgtggcggctcccgggatgccacgagttcctggcagctctagacatggggaagccccaggcccaaatgcttgctgaagggccttgcaggcattccatgaagttgcacaaggagccctatagcgctcatgttcaagatctggaatcttcccgaaggaagcagatgcttatattctttgttcctctaggttttgatctctgtgaagttggtcaggaggaagtaatcctgaaaaccgggaagcaagctaatcgacggactgtgcacttcgcgctccagtccctgctgtctctgtttgggcctgaccggagcggacactcaggtcatgtgggcctgggagatttccaggccctggggacacacccagcccgactgatgttcttaagggccaagctggctacagtgggaagagcaaatgctggcttggaaggtggttatggtttgcaggtggaaccaacggggtctgctgaagattctactgagctacccaagcgcctcagccttgacagctcctcctccctcgagtctcttgcttctgctcagtctgtttccaacgccctgcccttgggttaccagcaaccccccttctctcccaccggtgcggacagcatcgcctcagatgccatctctgtgtacagtctgagctccattgcctcctcaatgagctttgtctccaaacccgagggtggatcagagggtggaggccccggaggacggcaggaccatgaccggtccaagaacgcttacctgcagagatccaccctgcctaggagccagctgcctccccagacccgccctgcaagcaaacaaagatgaagaagaatatgaagggttttctatcatcagtaacgagcccttggcgacctaccaagaaaaccgaaacacatgcttctcaccagaccacaaacaaccccaacctgggacagccggaggcatgagagtctcggtgagctccaaagggagcatcagcactccaaattctccagtgaaaatgactctgattcccagccccaactcacccttccaaaaggtgggaaaactagcaagctcagatacaggagaatcagaccagtctagcacagaaacggacagtaccgtgaaatcccaagaagaaagcaacccaaaactggatccacaagagttagcccagaaaattctggaggagacacagagtcatctcattgcggtggagcgtcttcagaggagcggcggccaggtgagcaagagtaataaccctgaagacggcgttcaggcgcccagcagcactgctgtcttcagagcgtcagaaaccagtgcgttcagcaggcctgttctctcccatcagaagagtcagccatcaccagtcactgttaaaccaaagcccccagccaggagctcctccctgcccaaggtgagttccggatatagcagccccaccacctcagagatgtccatcaaagacagcccgagccagcacagtggccggccatcgcccggctgcgactcacagacttcccagctggaccagcctctctttaaactgaagtaccccagctctccttacagcgctcacatttccaaatcaccaaggaacatgtccccaagctccggccaccagtctcctgctggcagtgcaccctccccagctctctcctactcctcagctggatctgctcgctcaagtccagcagacgctcccgacatagacaaactgaaaatggcagccattgatgaaaaggtgcaggctgtccataacctgaagatgttctggcagagcacaccccagcattccacagggccaatgaagatcttccggggggctcctggcacgatgacttccaaaagggatgtcctcagtctgttgaatttgtcaccacggcacaataagaaggaggagggagtggataagcttgaactgaaggagctgtccctgcagcagcatgacggagctccaccgaaagcccctcccaacggacactggcgcaccgagaccacctcgctgggctcactgccgctgcccgccggccctcccgccacagcccccgcgcgccctttgaggcttccttctggaaatggctacaagttcctgtctccaggaagatttttcccttcttccaaatgctaa

SEQ ID NO: 136747 - DNA, 5063 bp, Homo sapiens
  misc_feature (1)...(5063): n = a,t,c or g
cgctcttgatttcccgggccgacgatttcgtccaacagccagctttatatgggcatcagtcttgtttgaaacaatccgacatgaggcagaggtgagcacggactacaaactctccctctttgacctgcagacatcatcctaccaggccttgcagcgggtgctcgtcagcctaggccatcatgatgaagccctggctgtggcagaaaggggacggacaagggcatttgctgatcttctggtggaacgacaaacaggacaacaagactccgacccctactccccagtcactattgatcagatcttagagatggtaaatggccagaggggactagtgctttactattccctggctgcaggctatctgtatagctggctgctggctcctggggcaggaattgtgaagtttcatgaacactacctgggtgagaacacagtggaaaactcaagtgacttccaggccagcagcagtgtaacccttccaacagcaaccggctcagccctggagcagcacattgccagtgtccgggaggccctgggggtggagtctcactactcaagggcctgtgccagcagtgagacagagagtgaagcgggagacatcatggaccagcaatttgaagagatgaacaacaaactcaactcggtcactgaccccactggctttctgcggatggttcgccgcaataacctgtttaacaggagctgccagagcatgacgagcctgttcagtaacactgtgtcaccgacccaggacgggacctcctctcttcccaggaggcagagctcgtttgccaagcccccgctccgtgccctgtatgacctgctcatcgcgcccatggaagggggcctgatgcactccagcgggccccgtgggccgggcaccggcagctcatcctggttctggagggggagctctacctcattcctttcgcccctcttgaagggaagctcctccaatgagtacctctacgagcgcttcggcctccttgctgtcccttccatccgctccctcagcgtgcagtccaagtctcacttacggaagaacccgcccacatactccagctccacatccatggcggctgtcatcggcaaccccaagctaccatcggccgtgatggacaggtggctgtgggggcccatgccatcggccgaggaagaggcctacatggtgtccgagctgctgggctgccagcccctagtgggcagtgtggccaccaaggagagggtcatgagtgccctgacccaggctgaatgcgtccactttgccacccacatctcctggaagctgtcggccttggtcctcacgcccagcatggacggcaaccctgccagcagcaagagctccttcggccacccctacacgatccctgagtccttgcgggtgcaggacgatgccagtgatggggagagcatctcggactgcccgcccctgcaggagctgctgcttactgccgccgacgtcctggaccttgcagctgccctgtgaaggctggtggtggttgggctcttccagggagtccaccagcaaattcacagccgacggggtcttcgcgttgacaagggctttcttggctgcgggcgctcagtgtgtcctcgggtctctgtggcctgtgccagtggctgcttttaagatgttcatccatgccttctactcatccctgctgaacggcctgaaagccagcgccgccctgggggaggccatgaaggtggtgcagagcagcaaggccttctcgcacccctccaactgggcagggttcatgctcatcgggagtgacgttaagctgaacagcccctcatcactcatcggccaggccctcacagagatcctgcagcacccggagcgtgcgcgggacgccctgcgagtgctgctgcacctggtggagaaatccctgcagcgcatccagaatgggcagcgcaatgccatgtacacatcccagcagagtgtggagaacaaagtgggcggcatccctggctggcaggccctcctcaccgctgtgggcttccggctggaccccccaaccagtggcctgccagcggctgtcttcttcccaacctccgacccgggcgaccggctccagcagtgcagcagcacactccagtccctgctgggtctgcccaatcctgccctccaagccctttgcaaactcatcactgcctccgagacgggcgagcagctcatcagccgggctgttaaaaatatggttggaatgctccaccaggtgctggttcagctccaggctggcgagaaggagcaggacttggcatcagctcccattcaggtctccatcagcgtccagctgtggcggctcccgggatgccacgagttcctggcagctctaggttttgatctctgtgaagttggtcaggaggaagtaatcctgaaaaccgggaagcaagctaatcgacggactgtgcacttcgcgctccagtccctgctgtctctgtttgattctactgagctacccaagcgcctcagccttgacagctcctcctccctcgagtctcttgcttcttgcttcagtctgtttccaacgccctgcccttgggttaccagcaaccccccttctctcccaccggtgcggacaggaatngcctcagatgccatctctgtgtacagtctgagctccattgcctcctcaatgagctttgtctccaaacccgagggtggatcagagggtggaggccccggaggacggcaggaccatgaccggtccaagaacgcttacctgcagagatccaccctgcctaggagccagctgcctccccagacccgccctgcaggcaacaaagatgaagaagaatatgaagggttttctatcatcagtaacgagcccttggcgacctaccaagaaaaccgaaacacatgcttctcaccagaccacaaacaaccccaacctgggacagccggaggcatgagagtctcggtgagctccaaagggagcatcagcactccaaattctccagtgaaaatgactctgattcccagccccaactcacccttccaaaaggtgggaaaactagcaagctcagatacaggagaatcagaccagtctagcacagaaacggacagtaccgtgaaatcccaagaagaaagcaacccaaaactggatccacaagagttagcccagaaaattctggaggagacacagagtcatctcattgcggtggagcgtcttcagaggagcggcggccaggtgagcaagagtaataaccctgaagacggcgttcaggcgcccagcagcactgctgtcttcagagcgtcagaaaccagtgcgttcagcaggcctgttctctcccatcagaagagtcagccatcaccagtcactgttaaaccaaagcccccagccaggagctcctccctgcccaaggtgagttccggatatagcagccccaccacctcagagatgtccatcaaagacagcccgagccagcacagtggccggccatcgcccggctgcgactcacagacttcccagctggaccagcctctctttaaactgaagtaccccagctctccttacagcgctcacatttccaaatcaccaaggaacatgtccccaagctccggccaccagtctcctgctggcagtgcaccctccccagctctctcctactcctcagctggatctgctcgctcaagtccagcagacgctcccgacatagacaaactgaaaatggcagccattgatgaaaaggtgcaggctgtccataacctgaagatgttctggcagagcacaccccagcattccacagggccaatgaagatcttccggggggctcctggcacgatgacttccaaaagggatgtcctcagtctgttgaatttgtcaccacggcacaataagaaggaggagggagtggataagcttgaactgaaggagctgtccctgcagcagcatgacggagctccaccgaaagcccctcccaacggacactgggcgcaccgagaccacctcgctgggctcactgccgctgcccgccggccctcccgccacagcccccgcgcgccctttgaggcttccttctgggaaatggctacaagttcctgtctccagggaagattttttcccttctttccaaatgcttaaagcatcttttattacccattgattttgagcaggcttgcagatgggggcctggcgtttgcttcagcccttccctgagtgcattcccctcacagccaccagcaccctcatgatgctgtgctctgcaggcgaggggcaccaccacgtccaaaggctgccacacacactggtggcttttctgggccacattcaccaaaagccaggacttctgtggggctggtacaggaggctcatggaatttcctacacacttcaccaaatgtttgtttacctttgaactccctgcttctcatctttgatatgattcttcaccaggattttgtacaaaaatgatccatggttcctggggtggggagaggaaagggagccacatattttgctaagaggtatatatgcagtaccttttataccacagaaatacaaatagagctttttcctaaggctttcggttgcctggttgggggtgggatatatgaaatttcagttgaattctacaggaaagtgttatattagcccaaaaacagaaaaatggtttttaaaatgccaatgatttgtaattaaattgtagcaattttggtctcatgatagtgtaatatctcagcaacaatgcaataattcacattgaaacagcgcttccattctgaactcctgctctgcaaatgtcttttgggtcccgctgtcaaccaaacttgaattttcttaaaaaaaaaattatgtaactcttatccaggcattttagaactatgcaattgtgatttaaaatgcaactttgtgcttttaaaacattattgaccttttttgtatatggataaacaacttttggttttattatcaatagtactttgcatttatagctattatttttaaaagctcaaaaagttttttaaaatgtcaaattttgaatagtcatcaataagtaattatcaagtttggaaggaaaggttgaaatgactccgtttccttataagcaaaaaaaaaa

SEQ ID NO: 136748 - DNA, 621 bp, Homo sapiens
atgcatcttctagaagaaaacacagaggtgaagaggattggggccaacctgctggagatttacgagtatcggaatggccaccaggaggtggagagcccctttcaggggcgcctgcagtggaatggcagcaaggacctgcaggacgtgtccatcactgtgctcaacgtcactctgaacgactctggcctctacacctgcaatgtgtcccgggagtttgagtttgaggcgcatcggccctttgtgaagacgacgcggctgatccccctaagagtcactgaggaggaagccctgagttgccatgtaagaagttcaggtggtctgctgagaaactacatggagagactgatcctatcgaagaggtcacaaggagagagaccctcagactacctggagaaaaacaaacgttcagccaccccagtttcctggctgagcagttttccagccatccgactaagacatcagatgtgtgcacagtgcaagctgtcagtggatctaccattctggggtctggaggatggtggccttgtcttccaggacagctcttttgccgtggaactgcttctctgtagacctgttgccaagattccgcaaatgaacccaagcaccaagcaattgctgtag

SEQ ID NO: 136749 - DNA, 3531 bp, Homo sapiens
atggctacagccgtggaaccagaggaccaggatctttgggaagaagagggaattctgatggtgaaactggaagatgatttcacctgtcggccagagtctgtcttacagagggatgacccggtgctggaaacctcccaccagaacttccgacgcttccgctaccaggaggcagcaagccctagagaagctctcatcagactccgagaactttgtcaccagtggctgagaccagagaggcggacaaaggagcagatcctagagctgcttgtgctggaacaatttcttaccgtcctacctggagaactacagagctgggtgcggggccaacggccagaaagtggcgaggaggcagtgacgctggtggagggtttgcagaaacaacccaggagaccaaggcggtgggcatcttctcctaaaataagctcccgtgacaaccaagaacttcctcctgactccatggtgactggaagttggaattattcccaggtgactgtccatgttcacggccaggaagtcctgtcagaggagacggtgcatttaggagcggagcctgagtcacctaatgagctgcaggatcctgtgcaaagctcgacccccgagcagtctcctgaggaaaccacacagagcccagatctgggggcaccggcagagcagcgtccacaccaggaagaggagctccagaccctgcaggagagcgaggtcccagtgcccgaggacccagaccttcctgcagagaggagctctggagactcagagatggttgctcttcttactgctctgtcacaggtgtgccctagttacctctgtaccacagagaatttgtttgaagaaccactgggcataagccatactaaacagggactggtaacgttcaaggatgtggccgtatgcttttcccaggaccagtggagtgatctggacccaacacagaaagagttctatggagaatatgtcttggaagaagactgtggaattgttgtctctctgtcatttccaatccccagacctgatgagatctcccaggttagagaggaagagccttgggtcccagatatccaagagcctcaggagactcaagagccagaaatcctgagttttacctacacaggagataggagtaaagatgaggaagagtgtctggagcaggaagatctgagtttggaggatatacacaggcctgttttgggagaaccagaaattcaccagactccagattgggaaatagtctttgaggacaatccaggtagacttaatgaaagaagatttggtactaatatttctcaagtgaatagttttgtgaaccttcgggaaactacacccgtccaccccctgttagggaggcatcatgactgttctgtgtgtggaaagagcttcacttgtaactcccaccttgttagacacctgaggactcacacaggagagaaaccctataaatgtatggaatgtggaaaaagttacacacgaagctcacatcttgccaggcaccaaaaggttcacaagatgaacgcgccttacaaatatcccctaaaccggaagaatttggaagagacctcccctgtgacacaggctgagagaactccatcagtggagaaaccctatagatgtgatgattgcggaaagcacttccgctggacttcagaccttgtcagacatcagaggacacatactggagaaaaacccttcttttgtactatttgtggcaaaagcttcagccagaaatctgtgttaacaacacaccaaagaatccacctgggaggcaaaccctacttgtgtggagagtgtggtgaggacttcagtgaacacaggcggtacctggcgcaccggaagacgcacgctgctgaggaactctacctctgcagcgagtgcgggcgctgcttcacccacagcgcagcgttcgccaagcacttgagaggacacgcctcagtgaggccctgccgatgcaacgaatgtgggaagagcttcagtcgcagggaccacctcttgtacatctctcctagacaagtccaaggaactactaacgagaagatttcaggaagaggcctacagcaattgcttggtgcttgggttcatttgcggaatcttggcaacaggtctacagagaagcagttccacggcaaaagagcttgctatgggaacgaattgggcctgaccagtgatgacgaggactacgtgccccctgacgacgacttcaacacaatgggatactgtgaagagatccctgtggaagagaatgaagtgaatgacagctcatccaagagcagcatagagaccaagccagatgccagtccacagctgcccaagaaatccatcaccaacagcacactaacatccacagggagcagtgaggcccccgtctcgtttgatgggctgcccctggaggaagaggcgctggagggagacgggtccctggaaaaggagctcgccattgacaacatcatgggggagaagattgagatgatcgctcctgtgaactccccttcactggacttcaatgacaatgaggacatccccactgagctcagtgactcttccgacacacacgatgaaggagaggtccaggccttctatgaggacctgagtggccggcagtacgtgaatgaagtcttcaacttcagcgtggacaagctctatgacctcctcttcaccaactcgcccttccagcgggatttcatggagcagcggcgcttctctgatatcatcttccatccatggaaaaaggaggagaatggaaaccagagccgagtgattctttacaccatcacccttaccaaccctctggctcccaaaactgccactgtcagggagacacagaccatgtacaaggcgagccaggagagtgaatgttacgtgatagatgccgaagtcctcacccacgacgtgccctaccatgactacttctacacaatcaatcgctacacgctcacccgtgtggctcggaacaagagccgactcaggtgtgtcagtgtctgcttccctgtgtgtgtggaagtgccctcggagacggaggccgtgcagggcaaccccatgaagctgcgctgcatctcctgcatgaagagagaggaggtggaggccaccacggtggtggaatggttctacaggcccgagggcggtaaagatttccttatttacgagtatcggaatggccaccaggaggtggagagcccctttcaggggcgcctgcagtggaatggcagcaaggacctgcaggacgtgtccatcactgtgctcaacgtcactctgaacgactctggcctctacacctgcaatgtgtcccgggagtttgagtttgaggcgcatcggccctttgtgaagacgacgcggctgatccccctaagagtcaccgaggaggggctaatttcaagctctaatgtgatgcccctgaacatagaattggggagaaatacacacataggtcttgtgaaccaacgccagcctgctccagagcactctagtgcttccaccagtgctcctgatagtcatctgggcttcccagccatccctcaaggaggggccaatgaagatgagacttga

SEQ ID NO: 136750 - DNA, 1195 bp, Homo sapiens
cgaccgccccggacgaccagggtcgaccatatcaggccggagagcctgctgcgcatgtcagggctgacagcacacacggcctagagacctatagaagggcagctgggcacctgccacccagggtcggagccccgcaccatccggtggcgagctcccgggaaggggctacgcctctacacccaccccccaacctctgacatcgccggccgaacgggagctgccgcttccttcccggccccgctgcacctccccagggagccgagggcgggcgtggacgggaccgacgcggaacgcattctgtatcccagacgggcggccccggcggcttcgggagtggggtcacgcccagctggagaagcagttagggcggacgaagcaggagccgcggggctgggaggattccagtcggaacgcaaccgatcctggggaggcgagagccttggaagccgccagccccagaagatgcctgccttcaatagattgtttcccctggcttctctcgtgcttatctactgagtcagtgtctgcttccctgtgtggggggaaagtgcccttagaaaacggggggcgggcacgggctaaccccatgaagctgcgctgcatctcctgcatgaagagagaggaggtggaggccaccacggtggtggaatggttctacaggcccgagggcggtaaagatttccttatttacgagtatcggaatggccaccaggaggtggagagcccctttcaggggcgcctgcagtggaatggcagcaaggacctgcaggacgtgtccatcactgtgctcaacgtcactctgaacgactctggcctctacacctgcaatgtgtcccgggagtttgagtttgaggcgcatcggccctttgtgaagacgacgcggctgatccccctaagagtcaccgaggaggctggagaggacttcacctctgtggtctcagaaatcatgatgtacatccttctggtcttcctcaccttgtggctgctcatcgagatgatatattgctacagacaggtctcaaaagccgaagaggcagcccaagaaaacgcgccaggaaactccctagaaggtggcagccaaggcttgcaaatcaacagcacccaggacgggctggtcactgggcagcaggatgttggcagccacagggctcgtgagcacatgcctgactttgaggaaccgcccagcgccaagtag

SEQ ID NO: 136751 - DNA, 527 bp, Homo sapiens
tcatgaggaaggaggaacggggaaaatgtgggcaagaggttgtactgtgattaccacaggaaagccaaggcacggcagggtgagtgggcgtaggattggctggtttgaatgatttcggtgggctctggcactaagggctgcctctagttgtcgagtacctggccaagctggcgttgagcactccctggtattgtaatagagtcggtggaaatgtttgctgcattctggtgaaaatgtgaccggccctgtgaaatgctttatgaatttgtcttgtaagttagagtctcttgggaatatttctgcgctccgggacccgctgggagtccggccggccccggccgcggggaggaaaagcaacggcttgggctccttatccgtgacgcgcgctcccctgcgcccccggggcctcccgtgggctccgtgcggggacaaagccagcgccagcaggaagagtgcgggcaaaggggcgccgggcttaaggggccgcatgttcgctagccgcgggcgcgtgggtcgaacctggaatt

SEQ ID NO: 136752 - DNA, 6532 bp, Homo sapiens
cctaaattaggttgtagttcaccacttgtagaggcagcttcaggccaaatttaatttaatttaataaactaatgaaataaataagggagagtctgattcagttgaattgtatttggagttagaaatgtttattttaaagttcaccagaggatttaaatatacactgaagtttaagaatcattgctgtacaaaggtgaaaaataacatgctcttttaattttgtagtctgtcaagaactacaccaaatgtcatgtgagaaatgagcagatttgtaacaaacttaccagctgtaaaagctgttcactaaacttgaattgccagtgggatcagagacagcaagaatgccaggctttaccagctcatctttgtggagaaggatggagtcatattggggatgcttgtcttagagtcaattccagtagagaaaactatgacaatgcaaaactttattgctataatcttagtggaaatcttgcttcattaacaacctcaaaagaagtagaatttgttctggatgaaatacagaagtatacacaacagaaagtatcaccttgggtaggcttgcgcaagatcaatatatcctattggggatgggaagacatgtctccttttacaaacacaacactacagtggcttcctggcgaacccaatgattctgggttttgtgcatatctggaaagggctgcagtggcaggcttaaaagctaatccttgtacatctatggcaaatggccttgtctgtgaaaaacctgttgttagtccaaatcaaaatgcgaggccgtgcaaaaagccatgctctctgaggacatcatgttccaactgtacaagcaatggcatggagtgtatgtggtgcagcagtacgaaacgatgtgttgactctaatgcctatatcatctcttttccatatggacaatgtctagagtggcaaactgccacctgctcccctcaaaattgttctggattgagaacctgtggacagtgtttggaacagcctggatgtggctggtgcaatgatcctagtaatacaggaagaggacattgcattgaaggttcttcacggggaccaatgaagcttattggaatgcaccacaatgagatggttcttgacaccaatctttgccccaaagaaaagaactatgagtggtcctttatccagtgtccagcttgccagtgtaatggacatagcacttgcatcaataataatgtgtgcgaacagtgtaaaaatctcaccacaggaaagcagtgtcaagattgtatgccaggttattatggagatccaaccaatggtggacagtgcacagcttgtacatgcagtggccatgcaaatatctgtcatctgcacacaggaaaatgtttctgcacaactaaaggaataaaaggtgaccaatgccaattatgtgactctgaaaatcgctatgttggtaatccacttagaggaacatgttattacaagactttcgattgattatcaatttaccttcacgcttattacaggaagatgatcggcaccatactgccatatactttatagtaaacccaaaacaatctaacaaaaatctgcatatatcaattaatgcatcaaacaactttaatctcaacattacctgtccttgttgatcaacagctggaacaatatctggggaagagacttatattgtttccaagaataatatactggaatacagagatagtttttcctatgaaaaatttaactttagaagcaatcctaacattacattctatgtgtacgtcagcaacttttcctggcctattaaaatacagattgcattctcacaacacaatacaatcatggaccttgtgcagttttttgtcaccttcttcagttgtttcctatccttattgctggaggctgctgtggtatggaagatcaaacaaacttgttgggcttctcgacggagagagcaactgcttcgagaacgacagcagatggccagccgtccctttgcttctgttgatgtagctctggaagtgggagctgaacaaacagagtttctgcgagggccattagagggggcacccaagccaattgccattgaaccatgtgctgggaacagagctgctgttctgactgtgtttctttgtctaccacgaggatcatcaggtgcccctccccctgggcagtcaggccttgcaattgccagtgccctaatagatatttcacaacagaaagcttcagatagtaaagataagacttctggagtccggaatcgaaaacacctttcaacacgtcaaggaacttgtgtctgagaaatggaaaccgctcctgtatattctgtactgttttacttcgggcttctgttaaagctgttctatggccttggattttatggaggcagatctctgtatcatccagagcctgagtacagtttccttccaaatggacaatgacccaggtggccaaagaatgttcatgagttttataaaagtattgatggtcacaggtgataaagtcagtttttaccactatcttaggcttattatagctaacattaaattactctggaaaaagatgtatattgtttcttaatgaagatgaaaaatatgtaattcatataaatcaactgtttatatcccaagactttaaagaaagacattttttaatgcctgaatgatgagaattgtacagtttttgcctcataagcaaacttgaatcacctgtgtatgaacagggaatgaacacattgcaatggctttaaatgctcttttatctcgttgtaaaggtaaggcaagattttgatgtagtaggatgtaggtaatgtatttaaatatttcatatgaccatatcgtgtccaaactcagtctgaggaatgtgacagctttccgcctaactaggaatgcagaccaggaatgagttccaactcattctgtggcaactttcacaggggggttttatttggaatgctcagtgtagaggacattcctgtcatccatgccaactacctaactcgttattcagagctgataggagcatgggaaaagtctgtccagcgattcagttgttcccctccttccaaaaacaggcctccattaccacaacctggaaaagaggccgaatgggttatttttacagcatacaaggtttttgttccagtatgataatttttaattgcctaagaatcattggatcagacctaaatgatccatctgcatttttataagaatggatctttctttgcccttcctctcctagctgctagatcttaactaccttttacaaatgttacaaaatgtattttagaggcgacatctctcaagatgacctgagttccttcctgccaactgttccacctagaatacaagtagagaagagcactggctggcaagcatcaacaggagtcttcttcccaacacgagcgcatccatgtcctgagaaaaagtctgtggtttagaaaatatgtccatggttgcccacagtcagcacactcttagtgactcaaaattctgaattatggcagaaaggaaaaataaaacatacttcacattagaacacagaatcatttacatcctaatactggaccacagttcacctaaagctcagtagcattaacagatatagtttggaatttgcagtttcctcacttcagggtgacaagatatgtataacagtgacaagaaatctccaaagctgctggtatatggatatagctttgttaaatatggaaggtcctttaaatacaattgatgtttagtacctataatatgtacttttccatattcctttggatttctggaaggttatggacactttacctgtttaacagctaatgccatagttacttgcatgcccatggttgtacagtagcagactatgaccctattgtgatattaagtgtttatttcataatgccatttatacatagctgaatttggatgaggattggaatgtccatatataagaggaaatgatccatacaatatgtagttgccatccttaatgtaagatttcctaggttgccatcctaacccatgactatgtcattattttgataattaggcatttatgaattatagtatatattcctcatgttggcatgataattttgctattttccatgcattaaaaataagacaaattccttagagtaattttagtaattttatctataatctgtggggtttttttggagggggaggccactggttgtttctacttccctgtgatattttctctctcattaaaggaatgagctaagtttgtaaatatctcctaaaaacaatcaagtaattttattagcttcttttggaccctctaaatattgacttctctcatgaaaaaataaattgatgaaactaatgattacaaagatataatcattttttaaaaagtgattgcccaatgtatttctctaacaattgtcacaagagaaagcataacaataaaaatacaaaaacatacagatttagatgtaaaatctatataagctatatttttagggaggctaagcagatagtattactgtggaagaattatcaagttttattcacctcaaatcccactgggttcttaaaacttgaaaattcaaattgtagagaattatgagacacaatgtgatgtttagttaaagtcatgctatacctttctgggccacatattgctaactctgtggctaattatgcaattaattctcaacgtatcaaagcttttcactggcagtaaattctttgccctcaggtgaagtggattgaaaagacatcaaggatcaaggataatcactttgaatctgttggtttttccccctacattccagacactttaaatttggatgctttcattttttttaaatcaaaccacacaaatatgcagatactttcccagaatttcgcagttaaatggctgatcctcttgaaaactaaccttaatggaattctaaacatttcagtttagaatgactttgaaaaattccttagatttttaggatgttttattctgccaagtatgaaaaaaaaatggttaaatacaatggagttttaaaaattgagggctggggattctatttgaactagaaaattcctattggaaaagaatttgcacatacttacagattcagctaataaattttaagaggattaggattctcataattctttaaatgaaaatttgttttagtgatacacagagatgcccgatactatagtgtgatgttcagtaggaaaacttcaaatagttcgtatttaaaaaggtaattgatccttgctgtacttcccaacatctcatcttcttttagctgcagcaagatagaggtgactgtatggctacagttcatggtataagagcatttagggtgcacactggcacacaggctggaaaacgggcactggacccagctttcaggtgtgtggtgctgggtaagtttcacctttgaagcctcagccttccatctgtaaagggcggtaatggtgcccacctttcgaggcattgcgaggctagatggtaacacacagaaagctcccacagtgggaccttgatgcagcgtagctggtattaacaaccgtggggacaccaggccactctttttctaccaaatgttttatgaatccacctattaaatttcatccatcttttgggcgcaggtaaaggtcaatcaggtttttcaaaaagactccctgaataactttaagttcctgtatttctaagatatagggatttctacaaaacgactttgacatttagtcaataaaaacttaaacctttcttaaatctatagtgttaggagaggttttcttaaaattactgactgatgacattgagacaagagcatcaatgatcacctttcacgtacaaactaggcaagacagggtcagtgcttacattttgtggttatacatgatacatcttttctcagtgaacataaaactatgatttgaaaggtgtcttatatttaaaaaagattgtaaaatgaaaactgaccaaatgaactaattctacccacctatggtctttttaaatgtcgagtttcaaaacccatttgccgtatactagagtgagcttggaaacttacctgattacaggaattgcttgggttcaggcagattcccactttcacctctagagatttagattcagaaacactggggtaggccctggagagcagtactcttaacaagctcctcagtgcttcttaccattaggcaaattagggaaacactgcattgggtcaaagtgctgcctttaatcgaccattagagggagttctctaaataacaaagttattactctaattcaaaatgctttaaagaattttccaaggaatacaagccatctggttggtgttagttatagcagtgatttcattagagtgtacatttaacattttagttttatcaaaattttttgaaattaagaattagaaccagagctcctatcagtatatatgtacacaggtgtgcatgccagtgttcaaaacagattgtgtaaaagttcaagcccgttttagaaagccaacattttatgttataatatgctgttaatcaggactttattaaataaaaacattggctcttccaacccccac

SEQ ID NO: 136753 - DNA, 419 bp, Homo sapiens
  misc_feature (1)...(419): n = a,t,c or g
cttgngntcggaaggccccagcaaagtggacatccagacggaggacctggaagatggcacctgcaaagtctcctacttccctaccgtgcctggggtttatatcgtctccaccaaattcgctgacgagcacgtgcctgaaatcaacagcagtgatatgtcggcccacgtcaccagcccctctggccgtgtgactgaggcagagattgtgcccatggggaangaactcacactgcgtccggtttgtgccccaggagatgggcgtgcacacggtcagcgtcaagtacccgtgggcagcacgtcaccggcagccccttccagttcaccgtggggccacttgggtgaaaggaggcgcccacaagggtgcgggcaggaggcctgggcctgggaagagagggagaagcgggaattcccagcttgaa

SEQ ID NO: 136754 - DNA, 444 bp, Homo sapiens
gctgccagtctacctgtggactttgcaattgatagtcgagatgccggggaaggcctgcttgctgttgtaaaatgccttcagaaataagtcctagactggactcttgagggacatattggagaatcttaagaaatgcaagcttgttcagggggctgagaagatctgagtacactaggtgcaaacagaactcttggtggaacagaccagccactgcagcagacagaccaggaacacaatgagactgacatttcaaaaaaacaaaactggctagcctgagctgctggttcactcatcccaaggtccgtcccatgacataacactccacacccgccccagccaacttcaatgggtcactttttctggaagataatgatctgtacagacaggacagaatgaaactcctgcggctctttggcctgaaagttgggaatggttgggggagag

SEQ ID NO: 136755 - DNA, 404 bp, Homo sapiens
actgtcgggagcatttgtgacctgaacctgaaaatcccagaaatcaacagcagtgatatgtcggcccacgtcaccagcccctctggccgtgtgactgaggcagagattgtgcccatggggaagaactcacactgcgtccggtttgtgccccaggagatgggcgtgcacacggtcagcgtcaagtaccgtgggcagcacgtcaccggcagccccttccagttcaccgtggggccacttggtgaaggaggtctccatgaagcatgtaggcaaccagcaatacaacgtcacatacgtcgtcaaggagaggggcgattatgtgctggctgtgaagtggggggaggaacacatccctggcagcccttttcatgtcacagtgccttaaaacagttttctcaaatcctgga

SEQ ID NO: 136756 - DNA, 447 bp, Homo sapiens
atttatgaaacaaggctaggggaagatgggcagagaaaaaggggacacctagtttggttgtcatttggcaaaggagatgacttaaaatccagaaatgaggtgtagggaattttgcctgccttcctgcagacctgagctggctttggaatgaggttaaagtgtcagggacgttgcctgagcccaaatgtgtagtgtggtctgggcaggcagacctttaggttttgctgcttagtcctgaggaagtggccactcttgtggcaggtgtagtatctggggcgagtgttgggggtaaaagcccaccctacagaaagtggaacagcccggagcctgatgtgaaaggaccacgggtgttgtaagctgggacacggaagccaaactggaatcaaacgccgactgtaaattgtatcttataacttattaaataaaacatttgctccgtaaaaaaaa

SEQ ID NO: 136757 - DNA, 463 bp, Homo sapiens
ggtctgaagaaattctgcagtggcgagcagtttcccacttgccaaagatcccttttaaccaacactagcccttgtttttaacacacgctccagcccttcatcagcatgggcagtcttaccaaaatgtttaaagtgatctcagaggggcccatggattaacgccctcatcccaaggtccgtcccatgacataacactccacacccgccccagccaacttcatgggtcactttttctggaaaataatgatctgtacagacaggacagaagtggccactcttgtggcaggtgtagtatctggggcgagtgttgggggtaaaagcccaccctacagaaagtggaacagcccggagcctgatgtgaaaggaccacgggtgttgtaagctgggacacggaagccaaactggaatcaaacgccgactgtaaattgtatcttataacttattaaataaaacatttgctccg

SEQ ID NO: 136758 - DNA, 396 bp, Homo sapiens
gaaagtccgtgcttggggccctgggctccatggtgggattgtcgggcggtcagcggacttcgtggtagaatccattggctctgaagtggggtctctgggtaagtggacacagctgaccagcatcttctggaggactgaggattacagggctttcagggctgtgtcacgctggatgttggggccttgcctatcctcaatacctttagcttcctggcctcctggccaccctaagccatctctgcgtgctgctggacatttgcagttgcctctgataccagcattgattcattcaggagaccttgagggcagaaaccttatgtgggtattgtgcctaaaacaatgcttggaacgtagtaaacacttagcatatagtgttgactgacctttatagtttag

SEQ ID NO: 136759 - DNA, 772 bp, Homo sapiens
  misc_feature (1)...(772): n = a,t,c or g
cacatgccttctggggagacagcaccactgaggattgtggacacagggaccggcacgggtactgttagnatatgcccccactgagttcggggctccatgagatgcacatcaaatacatggccagccacatccttgagagcccactcaggttctacgtaactaccccaacagtgnnaagtgtttctgcatacggtccaggcctcgtgtatggagtggccaacanactgccaccttcaccatcgtcacagaggatgcaggagaaggtggtctggacttggctattgagggcccctcaaaagcagaagagccccggccgcggctgagtcgcgctccgggtgtggacggagccggagcctccccggggctcggtgaggacacagggccccaagccccgggccttcaagtcttgaccgagcgcatccccggcccttctgcgcccacacctgagtttttgtctgtaggagtttccgcagtttgctaagaatcgacatctagaggagtactcaccacttaattgatgatcaatacacgttccttgaaagaaccgatagcatgcgatcgatacagagcatctgcactgggattgtccgccccgcctgtcagggaggcctcgggggctaatggagctgagggtatagtcggccttggaccctcgcttttttcctttcctgtactatgaagataactgccttatctccccctcaggactgttttggggattaaataggacgtttaaattaccaacgctctttgaaataaacatttcaaaatt

SEQ ID NO: 136760 - DNA, 590 bp, Homo sapiens
atgccggtaaccgagaaggatctagctgaggacgcgccttggaagaagatccagcagaacacgttcacacgctggtgcaacgagcacctcaagtgcgtgaacaaacgcatcggcaacctgcagaccgacctgagcgacgggctgcggctcatcgcgctgctcgaggtgctcagccagaagcgcatgtaccgcaagtaccatcagcggcccacctttcgccagatgcagctcgagaatgtgtccgtggcgctcgagttcctggaccgtgagagcatcaagctcgtgtccatcggtgagttctctggccgggcccaggcgcccactgtggtgccgacccgcccccgcgcgtgcacccctgcggagggcgaggatttcccgcagcgcgcccccacctcggagataagggggagtcgtccccagggagcttttggtatggaggtgaaatacaggcaaggaagctggcaattaaaatacagtgtaatagaagaagacactggagactatggaaccatagaagcattgagtgcatttcctctcaccttcaaccactcaaccttccaagctggggatatctggctacagagccaaag

SEQ ID NO: 136761 - DNA, 611 bp, Homo sapiens
aaataaatgaagcataagcattgaaaatgaggggtcagaggggctttacttacattatactaatgtgaaattccctatgtgagaggtgtagtaattgagttggggtggctacgtggaatagtttataaagggagtttgcatgaattttggcaataagcagaccagcataaataaatggtgcacatttcactttcttttccactctttccagaggcgcaggaattggtgggcttggcataactgttgagggaccatcagagtcgaagataaattgcagagacaacaaggatggcagctgcagtgctgagtacattcctttcgcgccgggggattacgatgttaatatcacatatggaggagcccacatccctggtgagctattcctcagagaggaccccagagaataattgattttgcaggaaaatgggtttgattttggttatctctctgagtggggaaaacaatctgatatttgtaatagctgcaaaaggagagtttttcttagggctacatctccaagattatctcaactcccagtagaaccggtaacatggcaaaaagcatcggcttataattttgactgggaaacagtgtgcgtgggttgaggacct

SEQ ID NO: 136762 - DNA, 2479 bp, Homo sapiens
gtgtgccactgcacctggccattattatggaaaattttaggcatatacaaaagtagagacaggggtgtcttacatgctcatgaacccatgatccagtgacatccgttaatggcattttggaatcatatttcatctgtttttgtcctcaaatgttttgaagcaaatttcagcattacatcatttcactcttaaatatctcagtatggttctctaatagttgaagactccatttacatttatataaggagcataatttacacttgtgtaacccaaaggaatgaccaagcctgtgcttctctccccagatagcaaagccattgtggatgggaacctgaagctcatcttgggtctggtgtggacgctgatcctccactactccatctccatgcccgtgtgggaggatgaaggggatgatgatgccaagaagcagacgccaaagcagaggctgctggggtggattcagaacaagatcccctacttgcccatcaccaactttaaccagaactggcaagacggcaaagccctgggagccctggtagacagctgtgctccaggtctgtgcccagactgggaatcctgggacccgcagaagcctgtggataatgcacgagaagccatgcagcaggcagatgactggctgggtgtcccacaggtcatcactcctgaagaaatcattcacccggatgtggacgagcactcagttatgacttacctgtcccagttccccaaagccaagctcaagccgggggctcctctcaaacccaaactcaacccgaagaaagccagggcctatggcagaggaatcgagcccactggaaacatggtgaagcagccagccaagttcactgtggacaccatcagcgccgggcaaggagacgtgatggtgtttgttgaggacccagaagggaacaaagaggaggcacaagtgacccctgacagtgacaagaacaagacatactctgtggagtatctgcccaaggtcaccgggctacacaaatcaattcgggaggatcgaaacggcagatcgcaaaaaacagtacatacagaaggagacatgaacatgaacatcaaaaaaattgtaaaacaagccacagttctgacttttacgactgcacttctggcaggaggagcgactcaagccttcgcgaaagaaaataaccaaaaagcatacaaagaaacgtacggcgtctctcatattacacgccatgatatgctgcagatccctaaacagcagcaaaacgaaaaataccaagtgcctcaattcgatcaatcaacgattaaaaatattgagtctgcaaaaggacttgatgtgtgggacagctggccgctgcaaaacgctgacggaacagtagctgaatacaacggctatcacgttgtgtttgctcttgcgggaagcccgaaagacgctgatgacacatcaatctacatgttttatcaaaaggtcggcgacaactcaatcgacagctggaaaaacgcgggccgtgtctttaaagacagcgataagttcgacgccaacgatccgatcctgaaagatcagacgcaagaatggtccggttctgcaacctttacatctgacggaaaaatccgtttattctacactgactattccggtaaacattacggcaaacaaagcctgacaacagcgcaggtaaatgtgtcaaaatctgatgacacactcaaaatcaacggagtggaagatcacaaaacgatttttgacggagacggaaaaacatatcagaacgttcagcagtttatcgatgaaggcaattatacatccggcgacaaccatacgctgagagaccctcactacgttgaagacaaaggccataaataccttgtattcgaagccaacacgggaacagaaaacggataccaaggcgaagaatctttatttaacaaagcgtactacggcggcggcacgaacttcttccgtaaagaaagccagaagcttcagcagagcgctaaaaaacgcgatgctgagttagcgaacggcgccctcggtatcatagagttaaataatgattacacattgaaaaaagtaatgaagccgctgatcacttcaaacacggtaactgatgaaatcgagcgcgcgaatgttttcaaaatgaacggcaaatggtacttgttcactgattcacgcggttcaaaaatgacgatcgatggtattaactcaaacgatatttacatgcttggttatgtatcaaactctttaaccggcccttacaagccgctgaacaaaacagggcttgtgctgcaaatgggtcttgatccaaacgatgtgacattcacttactctcacttcgcagtgccgcaagccaaaggcaacaatgtggttatcacaagctacatgacaaacagaggcttcttcgaggataaaaaggcaacatttgcgccaagcttcttaatgaacatcaaaggcaataaaacatccgttgtcaaaaacagcatcctggagcaaggacagctgacagtcaactaa

SEQ ID NO: 136763 - DNA, 9695 bp, Homo sapiens
  misc_feature (1)...(9695): n = a,t,c or g
ggcggccaggggcgggcggccgcagagcagcaccggccgtggctccggtagcagcaagttcgaaccccgctcccgctccgcttcggttctcgctccttcggcccttgggcctccaaacaccagtccccggcagctcgttgcgcattgcgctctccccgccaccaggatgccggtaaccgagaaggatctagctgaggacgcgccttggaagaagatccagcagaacacgttcacacgctggtgcaacgagcacctcaagtgcgtgaacaaacgcatcggcaacctgcagaccgacctgagcgacgggctgcggctcatcgcgctgctcgaggtgctcagccagaagcgcatgtaccgcaagtaccatcagcggcccacctttcgccagatgcagctcgagaatgtgtccgtggcgctcgagttcctggaccgtgagagcatcaagctcgtgtccatcgatagcaaagccattgtggatgggaacctgaagctcatcttgggtctggtgtggacgctgatcctccactactccatctccatgcccgtgtgggaggatgaaggggatgatgatgccaagaagcagacgccaaagcagaggctgctggggtggattcagaacaagatcccctacttgcccatcaccaactttaaccagaactggcaagacggcaaagccctgggagccctggtagacagctgtgctccaggtctgtgcccagactgggaatcctgggacccgcagaagcctgtggataatgcacgagaagccatgcagcaggcagatgactggctgggtgtcccacaggtcatcactcctgaagaaatcattcacccggatgtggacgagcactcagttatgacttacctgtcccagttccccaaagccaagctcaagccgggggctcctctcaaacccaaactcaacccgaagaaagccagggcctatggcagaggaatcgagcccactggaaacatggtgaagcagccagccaagttcactgtggacaccatcagcgccgggcaaggagacgtgatggtgtttgttgaggacccagaagggaacaaagaggaggcacaagtgacccctgacagtgacaagaacaagacatactctgtggagtatctgcccaaggtcaccgggctacacaaagtcacagtcctctttgcaggacagcacatctccaagagcccatttgaagtgagtgttgacaaggcccagggagatgccagtaaagtcactgcaaaaggtccagggttggaagctgtagggaacatcgccaataagcccacctactttgacatctatacggcaggagctggtgtgggtgacattggtgtggaggtggaagatccccaggggaagaacaccgtggagttgctcgtggaagacaaaggaaaccaggtgtatcgatgtgtgtacaaacccatgcagcctggccctcacgtggtcaagatcttctttgctggggacactattcctaagagtcccttcgttgtgcaggttggggaagcctgcaatccaaatgcctgccgggccagtggccgaggcctacaacccaaaggcgtccgtatccgggagaccacagatttcaaggttgacaccaaagctgcaggaagtggggagctcggtgtaaccatgaagggtcctaagggtctggaggagctggtgaagcagaaagactttctggatggggtctacgcattcgagtattaccccagcaccccggggagatacagcattgccatcacatgggggggacaccacattccaaagagcccctttgaagttcaagttggccctgaagcgggtatgcagaaagtccgtgcttggggccctgggctccatggtgggattgtcgggcggtcagcggacttcgtggtagaatccattggctctgaagtggggtctctggggtttgccattgaaggcccctctcaggcaaagattgagtacaacgaccagaatgatggatcgtgtgatgtcaaatactggcccaaggagcctggcgaatatgctgttcacatcatgtgtgacgacgaagacatcaaggacagcccgtacatggccttcatccacccagccacgggaggctacaaccctgatctggttcgagcatacgggccaggtttggagaaatctggatgcattgtcaacaacctggccgagttcactgtggatcctaaggatgctggaaaagctcccttaaagatatttgctcaggatggggaaggccaacgcattgacatccagatgaagaaccggatggacggcacatatgcatgctcatacaccccggtgaaggccatcaagcacaccattgctgtggtctggggaggcgtgaacatcccgcacagcccctacagggtcaacatcgggcaaggtagccatcctcagaaggtcaaagtgtttgggccaggtgtggagagaagtggtctgaaggcaaatgaacctacacacttcacggtggactgtactgaggctggggaaggtgatgtcagtgttggcattaagtgtgatgcccgggtgttaagtgaagatgaggaagacgtggattttgacattattcacaatgccaatgatacgttcacagtcaaatatgtgcctcctgctgctgggcgatacactatcaaagttctctttgcatctcaggaaatccccgccagccctttcagagtcaaagttgacccttcccacgatgccagcaaagtgaaggcagaaggcccagggctcagcaaagcaggtgtggaaaatgggaaaccgacccacttcactgtctacaccaagggggctgggaaagccccgctcaacgtgcagttcaacagccctcttcctggcgatgcagtgaaggatttggatatcatcgataattatgactactctcacacggttaaatatacacccacccaacagggcaacatgcaggttctggtgacttacggtggcgatcccatccctaaaagccctttcactgtgggtgttgctgcaccgctggatctgagcaagataaaactcaatgggctggaaaacagggtggaagttgggaaggatcaggagttcaccgttgataccaggggggcaggaggccaggggaagctggacgtgacaatcctcagcccctctcggaaggtcgtgccatgcctagtgacacctgtgacaggccgggagaacagcacggccaagttcatccctcgggaggaggggctgtatgctgtagacgtgacctacgatggacaccctgtgcccgggagcccctacacagtggaggcctcgctgccaccagatcccagcaaggtgaaggcccacggtcccggcctcgaaggtggtctcgtgggcaagcctgccgagttcaccatcgataccaaaggagctggtactggaggtctgggcttaacggtggaaggtccgtgcggaggccaaaatcgagtgctccgacaatggtgatgggacctgctccgtctcttaccttcccacaaaacccggggagtacttcgtcaacatcctctttgaagaagtccacatacctgggtctcccttcaaagctgacattgaaatgccctttgacccctctaaagtcgtggcatcggggccaggtctcgagcacgggaaggtgggtgaagctggcctccttagcgtcgactgctcggaagcgggaccgggggccctgggcctggaagctgtctcggactcggtaacaaaagccgaagtcagtattcagaacaacaaagatggcacctacgcggtgacctacgtgcccctgacggccggcatgtacacgttgaccatgaaggatggtggcgaactcgtgccacacttccccgcccgggtcaaggtggagcccgccgtggacaccaacaggatcaaaggctttggaccaggaatagaagggaaagaatgtgttccgggaagctaccaccgactttacagttgactctcggccgctgacccaggttgggggtgaccacatcaaggcccacattgccaacccctcaggggcctccaccgagtgctttgtcacagacaatgcggatgggacctaccaggtggaatacacacccctttgagaaaggtctccatgtagtggaggtgacatatgatgacgtgcctatcccaaacagtcccttcaaggtggctgtcactgaaggctgccagccatctagggtgcaagcccaaggacctggattgaaagaggcctttaccaacaagcccaatgtcttcaccgtggttaccagaggcgcaggaattggtgggcttggcataactgttgagggaccatcagagtcgaagataaattgcagagacaacaaggatggcagctgcagtgctgagtacattcctttcgcgccgggggattacgatgttaatatcacatatggaggagcccacatccccggcagccccttcagggttcctgtgaaggatgttgtggaccccagcaaggtcaagattgccggccccgggctgggctcaggcgtccgagcccgtgtcctgcagtccttcacggtggacagcagcaaggctggcctggctccgctggaagtgagggttctgggcccacgaggcttggtggagccagtgaacgtggtggacaatggagatggcacacacacagtaacctacaccccatctcaggagggaccttacatggtctcagttaaatatgctgatgaagagattcctcgcagtcccttcaaggtcaaggtccttcccacatatgatgccagcaaagtgactgccagtggccccggccttagttcctatggtgtgcctgccagtctacctgtggactttgcaattgatgcccgagatgccggggaaggcctgcttgctgttcaaataacggaccaagaaggaaaacccaaaagagccattgtccatgacaataaagatggcacgtatgctgtcacctacatccccgacaagactgggcgctatatgattggagtcacctacgggggtgacgacatcccactttctccttatcgcatccgagccacacagacgggtgatgccagcaagtgcctggccacgggtcctggaatcgcctccactgtgaaaactggcgaagaagtaggctttgtggttgatgccaagactgccgggaagggtaaagtgacctgcacggttctgaccccagatggcactgaggccgaggccgatgtcattgagaatgaagatggaacctatgacatcttctacacagctgccaagccgggcacatatgtgatctatgtgcgcttcggtggtgttgatattcctaacagccccttcactgtcatggccacagatggggaagtcacagccgtggaggaggcaccggtaaatgcatgtccccctggattcaggccctgggtgaccgaagaggcctatgtcccagtgagtgacatgaacggcctgggatttaagccttttgacctggtcattccgtttgctgtcaggaaaggagaaatcactggagaggtccacatgccttctgggaagacagccacacctgagattgtggacaacaaggacggcacggtcactgttagatatgcccccactgaggtcgggctccatgagatgcacatcaaatacatgggcagccacatccctgagagcccactccagttctacgtgaactaccccaacagtggaagtgtttctgcatacggtccaggcctcgtgtatggagtggccaacaaaactgccaccttcaccatcgtcacagaggatgcaggagaaggtggtctggacttggctattgagggcccctcaaaagcagaaatcagctgcattgacaataaagatgggacatgcacagtgacctacctgccgactctgccaggcgactacagcattctggtcaagtacaatgacaagcacatccctggcagccccttcacagccaagatcacagatgacagcaggcggtgctcccaggtgaagttgggctcagccgctgacttcctgctcgacatcagtgagactgacctcagcagccttgacggccagcatttaaggccccatctggccgaggacggagccctgtctcctgaagagggttgcccaacaaccacattggcatctccttcatcccccgggaagtgggcgaacatctggtcagcatcaagaaaaatggcaaccatgtggccaacagccccgtgtctatcatggtggtccagtcggagattggtgacgcccgccgagccaaagtctatggccgcggcttgttcagaaaggccggactttcngaagatgtctgacttcatcgtggnacacaaggggatgcaggttatggtggcatatccttggcgggggaaggccccagcaaagtggacatccagacggaggacctggaagatggcacctgcaaagtctcctacttccctaccgtgcctggggtttatatcgtctccaccaaattcgctgacgagcacgtgcctgggagcccatttaccgtgaagatcagtggggagggaagagtcaaagagagcatcacccgcaccagtcgggccccgtccgtggccactgtcgggagcatttgtgacctgaacctgaaaatcccagaaatcaacagcagtgatatgtcggcccacgtcaccagcccctctggccgtgtgactgaggcagagattgtgcccatggggaagaactcacactgcgtccggtttgtgccccaggagatgggcgtgcacacggtcagcgtcaagttaccgtgggcagcacgtcaccggcagcccctttccagttcaccgtggggccacttggtgaaggaggcgcccacaagggtgcgggcaggaggccctggcctgggagagaggagaagcgggagtcccagctgaagttcagcatttggacccgggaagcaggcgctggaaggcctctccatcgcttgttgaagggccccagttaaggccgagattacattcgatgaccataaaaatgggtcgcgcggtgtatcttatattgcccaagagcctggtaactacgaggtgtccatcaagttcaatgaatgagcacatcccggaaagcccctacctggtgccggtcatcgcaccctccgacgacgcccgccgcctcactgttatgagccttcaggaatcgggattaaaagttaactcagccagcatcctttgctataaggttgaatggcgcaaaaggcaagattgatgcaaaggtgcacagcccctctggagccgtggaggagtgccacgtgtctgagctggagccagataagtatgctgttcgcttcatccctcatgagaatggtgtccacaccatcgatgtcaaagttcaatgggaagccaggtggtttgaaaccccttcaaagtgcgcgttggggagcctgggacaagcggggaaccctgccctggtgtccgcctatggcacgggactcgaagggggcaccacaggtatccagtcggaattctttattaacaccacccgagcaggtccagggacattatccgtcaccatcgaaggcccatccaaggttaaaatggatttcccaggaaaacacctgaagggttacaaagtccatnttacaccccccatggcctccctgggtaaactaccctgantccagcgttcaaatacgggttgggcccaaaccacatccgtggggcagtccccttccaaggcccaaggtgacaggcccagcngttctagtttagcccctggcctccagcccaaacgagaaccctcatcccatccctggtggagtccagtgacccaggtcgtcttacagagaacctgctatagccgcccatttcccaaaggaatctttgggacgcccagccaaggtgacctcctaagggggcaagggctctcaaaaggcctttgtgggccaagaagagttccgttcctggtggactgcaagcaaaactggctccaacatgctgctgattcggggtccatgggcccaccccacccctgcttggaggtctccatgtaagcatgtaggcaaccaagcaatacaacgtcacatacgtcgtcaaggagaggggcgattatgtgctggctgtgaagtgggggggaggaacacattcctggcaggcccttttcatgtcacagtgccttaaaacagttttctcaaatcctggagagagttcttgtgggttgctttttgttgcttgttttgtaatttcattttatacaaagccctccagcctgttttgtggggctgaaaccccattcctataaatattgctggtgtaaaatgccttcagaaataaggtcctagactggactcttgagggacatattggagaatcttaagaaatgcaagctttttcagggggctgagaagatcctgagtacactaggtgcaaaccagaactcttggtggaacagaccagccactgcagcagacagaccaggaacacaatgagactgacatttcaaaaaaaacaaaactggctagcctgagctgctggttcactcttcagcatttatgaaacaaggcttaggggaagatgggcagagaaaaaggggacacctagtttggtttgtcatttggcaaaggaagatgacttaaaaatccgcttaatctcttccagtgtccagtgttaatgtatttggctattagatcactagcactgctttaccagctcctcatcgccaacacccccatggttctgtgggccttcttacacttctcagagggcagagtgggcagccggggcaccctacaggaaattcagaggggcagagtgggcagccagggccccacattgtctcttcaagtacctgtccccttcgctctgggtgattattttctttgcaggaatcaccacacggaggaccatcccggcaagtcatgggttttgctttaagttttccaaagtccgtttcagtccctttcctttggtcttgaagaaattcttgcagtgggcgagcagttttcccacttgccaaagatccctttttaaccaacattaggccttgtttttaacacaccgctccacgcccttcatcagcctgggcaagtcttaccaaaatgtttaaagtgatctcagaggggcccatggattaacgttnacgccctcatcccaagggtccggtcccattgacataacactccaacacccggccccagccaactttcatgggggtcactttttcctggaaaataatggatctgtaccagaccaggaccagaatgaaacttctgcgggtcctttggccctgaaagttgggggaatggttggggggagagaagggccagccagcttatttggtggtctttttcacccattggccagaaaccagtgagagcctccgtggtgccagaaatcccagaaatgaggttgtagggaaattttgccctccctcccctgcagaccctgagctggcctttggaatgaagggttaaagtgtcaggggaacgttgcctgagccccaaatgtgtagttgtggtctgggcaggcagacctttaggtttttgcttgctttagtcctggaggaagtgggccactcttgtggcagggtgtaagtatctggggcgatgtgttggggggtaaaagtcccacccctacagaaaagtggaacaagcccggagcctgtatgtgaaaggaccacgggtgttgtaacgctgggacacggaaagccacaactggaatcaacacgccgactgtaaattgtagtcttataacttattaaataaaacgatttgctccgtaaaaaaaaaaaaaaaaaaaaaaaaagggcggccgct

SEQ ID NO: 136764 - DNA, 520 bp, Homo sapiens
atgggccaggatggacacgatcgcggcgcgaaagtgatcgccagcgcctattccgatctcggtttcgacgtagatttaagcccgatgttctctacacctgaagagatcgcccgcctggccgtagaaaacgacgttcacgtagtgggcgcatcctcactggctgccggtcataaaacgctgatcccggaactggtcgaagcgctgaaaaaatggggacgcgaagatatctgcgtggtcgcgggtggcgtcattccgccgcaggattacgccttcctgcaagagcgcggcgtggcggcgatttatggtccagccagcatcatgattaatgaagccacgctggcagaaagtattcgccgcttacgtcagggtgagcgtgccacactcgcccaggccatgacgctggtggaaagccgtcacccgcgtcatcaggcactaagtacgcagctgcttgatgccattatgccgtactgcggtaacaccctgcgactgggcgttaccggcacccccggcgcggggaaaa

SEQ ID NO: 136765 - DNA, 3147 bp, Homo sapiens
ttaaatcagacatccccccccctccacgcagaggcgtgacagctcctcaccatttgtccccttgtgcaaacagtcgatgccaagagcagggttcatctccttcacctgtctggctcggacttcggtcatagtctggatgggattcatgccactgttttcagagagggccatggggatgacctccagtgcgtcggcaaacgctctcatggcatactgttctaaggtggggcacttatccgcctcttggctaactgccaggggcacaggatatctcagcagccctcctccatacaccacacgattatcgcggatgaggttccggatgacacacaaagcatcgtgaaaggatcgtttcgctccaaccactcctgtggttccatctccaatttcatcatcctgagacttggacagttccaccatcagcttggcaatctgatgatcaacatccatcatgcttaagatggtggccccatcattagttacagtcacatctccatccttatccaccatcatcttatcaagcccatttggtccaagtgatgttctcattgtatttgctacagcctttgctgccattatatgagacattgagcggaggcttctttccaaggatccatgtggctgggtcatcttggacacaaaatcctccagccccagtgaagtttcagatgactgcagctctggaccaacatcttgatggtcacttcctgagagacccgctgccatcgcatttgttgtttgcggactgatagtctggttgtttttgccatcaatacaaagaaatattcctgtcgttacccaacccgtagaaattttaccctccacccacaggaagcgggatacgcggctactttttgtggtctgttcaatgatgtgggcggcgaataatctgccagcgtactcatggcgacgactccggcggttgagctggaattgcaaattcttaatgccatcttccttggtattctctgtggtatcggcatgctttattttcaggacttgatgccagtcgtcggctggagtatgctgattggcggtctgattctgttgcctttttatgccagacaaggaacaaactttgtcgttaacggcagtttgattctggcgtttttttatttggtggtcattggtacgtccctgacatttagtctgtaccctctcctgttctgagcatgtgagagggaaagcagctgccatctgaggagggttgcaggggcaggttggttttccggggttgtgacggagagattgtataaggaggctgctgttctggactgagttccagagggtcagggaaggaagagagggagagccaggcagtagcaggtagcctgggaggctaaggctggaagacctggtctcatccaatactatggcgttcccgcacggtggctccggggtctcccctgcggccggcacgacatccgccttctgagtttgtccttgagtggaaatcacaaacatcattttcagcaaaaatgaacaagtggggttctttaaattgtaaatgtcttcagaatccttgaccatgactttggagcccagcgtggtttttgctgtctgaatcaggggttcggtgtcctttatgtcaacaaggacgctatcgctgatcttgtccaggtgttcaatagcaacacgagcagcctgctcatagccatcggctattctgattgggtgaatgcctcggtctagcaattgctccgcttcttctaacaaggcaccagccaggactgatggagggagctgcctgtagggcccaggccaggctctgttgtaggcactaaaggtacagcagggaatgaagccaagctcgtgctcttgagacacagataagagaaaggtgggtacagctccattacagacactggtcagagaggtgacatcttccaggcacactggctgagcaagtggcccaacaagcctctctgtcagtgtgggcagagctcgtgtctgcagactctgtgtgctcactgctatccccgccacagaggtcatcctgtctggaaggtccacatagtagggcaggtcttcctcacttagatcacttcttggtgggcatttctctggttccttctctacttcagcccagatggcttctcgatccacggtggtgaactgtcctcgaggcaggcgttcctcaggggcaccctcctgcggctcagattcaccacacgcctctttgcacgtgggcttcttcctgttaaaccaacggtgtaaatcctctggctggggttccttgaagaagtccctttttcctggtggcttatttttaggccaggtgccaatgcccgcgttgttgaccagcacatccaggcctccgtactccttgagcagaaagttgcgaagtgcatggatgctctgagggtcattgatgtccagctggtggaagcgaggaatcaggccctcagcctgcagcttctgcactgccgcaaggccccgtgcctcgtcccgtgcagtgagcaccacatcccctgagaattgctgacacaggtcacgagtgatcgcaaagccaatgcccttattagctccagtcaccagtgcaatgcgattgttcagccactcaattaaattccttctggcctcgtcaatgtagggcttgtctgcaggtgagcaatcttctctcttccgatgcacgaacccatgagtctgcccagaaaatgttttaatttgatattcaactttgcagtgttctttcaacttctgagtcagcaaagatacccattgcatgcgcattaaccaggtgagaacctggtcggcgcgccaccacagggccccgcggtagtttaccacgccagagaaaccacgcagaacctcgtccaggacaaaaaacgtggcccagcgcggatgtggctgggctttaacccaagctgctctctcttcccagaaggctcttctctgacttgctgccaaaacacaaagtcgcttggaggtgaaggcaaatattagttcagctggcaagctcctctccacgtcctcatcaaagcccccagctccatgagcttctgggctgttcctgtggatttctgcactctctgtgttgaaacatctgcttccagcacagacaggattgtcccattgatagttattctgtgggtgggggtgcatggcttttctacttgatgaagagattttgagaggtgacagcat

SEQ ID NO: 136766 - DNA, 1593 bp, Homo sapiens
atggtttacaaaatgcgttatcggtctcagcacccctatagcatcaaggaaaagcagatgaagagtgaagtgttgtccgttaaagagaaaattggttatggcatgggagacgccgccagccacattattttcgataacgtaatgttatatatgatgttcttttataccgatatttttggcattcctgccggttttgtcggaaccatgtttttggtcgctcgtgcactggatgcgatttccgatccttgcatggggttgttggccgatcgaacgcgctctcgctggggtaaatttcgtccgtgggtactgtttggcgcactgccattcgggatcgtctgtgtactggcctatagcacgccagatctcagtatgaacggcaaaatgatctatgcagcaattacttacaccctacttaccttactttataccgtcgtcaatatcccttactgcgcattgggtggtgtaatcaccaatgacccgactcagcgtatctcgctgcaatcctggcgttttgtgctggcgaccgcgggaggcatgctttctactgttctgatgatgccactggttaatttaattggcggtgataataaaccactcggtttccagggcgatttaagcccgatgttctctacacctgaagagatcgcccgacctggaccgtacgaaaacgacgttcacgtagtgggcgcatcctcactggctgccggtcataaaacgctgatcccggaactggtacgaagcgctgaacaacacatggggacgcgaagatatctgcgtggtcgacgggtggcagtcattccgccgacaggattacgccttcctgcaagagcgcggcagtggcggcgatttatggtccagcacactcgcccaggccatgacgctggtggaaagccgtcacccgcgtcatcaggcactaagtacgcagctgcttgatgccattatgccgtactgcggtaacaccctgcgactgggcgttaccggcacccccggcgcggggaaaagtacctttcttgaggcctttggcatgttgttgattcgagagggattaaaggtcgcggttattgcggtcgatcccagcagcccggtcactggcggtagcattctcggggataaaacccgcatgaatgacctggcgcgtgccgaagcggcgtttattcgcccggtaccatcctccggtcatctgggcggtgccagtcagcgagcgcgggaattaatgctgttatgcgaagcagcgggttatgacgtagtgattgtcgaaacggttggcgtcgggcaagtcggaaacagaagtcgcccgcatggtggactgttttatctcgttgcaaattgccgggggggcggatgatctgcagggcattaaaaaagggctgatggaagtggctgatctgatcgttatcaacaaagacgatggcgataaccataccaatgtcgccattgcccggcatatgtcgagagtgccctgcatattctgcgacgaccgcctatgcatcgtgttcctagaaaccctaaggtcaacctgcttcctggaaccgctatggccaatctgctgtcctaggaccgcaatggccacgctgggtcctaggaaccgctatg

SEQ ID NO: 136767 - DNA, 1153 bp, Homo sapiens
ttacgccagcgtactcatggcgacgactccggcggttgagctggattgcaaattcttaatgccatcttccttggtattctctgtgtatcggcatcttattttcagacttgatggtccggctatagcgtgccgcggcgcggggcggcgcgggtgtgtggtgtgtcgcctcttctgtgtggctgtcgggttgtgtcctgtggttcgtggcggtgttgttgtcctgtgcattggtgttcggtaaggtgtctgtttagctctcgtctgtggtggctgtgtggcgggttgtgttggtctctcgttattggggggtgttggtgtggagttcagtgcccgtgttcgggatcgcctttgatgtccggtggagctgaagagatcgcccgcctggccgtagaaaacgacgttcacgtagtgggcgcatcctcactggctgccggtcataaaacgctgatcccggaatggtcgaagcggtcagggtgagcgtgccacactcgcccaggcctgacgctggtggaaagccgtcacccgcgtcatcaggcactaagtacgcactgcttgatgccattatgccgtactgcggtaacaccctgcgactgggcgtaccggcacccccggcgcggggaaaagtacctttcttgaggcctttggctgttgttgattcgagagggattaaagtcgcggttattgcggtcgatcccgcagcccggtcactggcggtagcattctcggggataaaacccgcatgaagacctggcgcgtgccgaaacggcgggttgccaaactggtcgttaacgtgagctttaactgctacgtctgtgcgaccattacctgaccttccggtatctccagactggtaatcgtcgcgaattaacatctgcagcgccgtcaaatttacgtcccgggctataggcacaccgtcggtagtgcaatttgtgtagctcagcgtggtgtcggctacctttgtgcagcggtgttcgtctttctgcagcagcacgtacgttaagcagattgaagcagcaaagccgaaagaaaaaccaaccgccttctcgatggtaatggcctgtacctttatgtccctgtacgggtggttgtacacttttacaccggctcccgcggtgtcggcgcgtagtggcaccacccggcttgcccccttcat

SEQ ID NO: 136768 - DNA, 1188 bp, Homo sapiens
atgaggaccggaattttagctccagatcgactgcaagaacaaaccagcaatcccaagaggccccacagaccctctgaaggaagcggacttctcctgcaggaccggaagagacaccccaaatactgtgagtgccccagctgcggaagtgggaaagggagaccctcctctcccaagcacacacctccactggagaagctgaaggtctgtttgcgggagaagtttccgactttacttggaactgagtcaagttacatttgtggacaaaaccttcagcgtttctatgaagacgtattcatggggagaacatgtttcttgagagaagaaggcgactatgaggactttagttgccaagtatatggggtaggtttggcagtgacatcagcgattggagccatgctcctggaggctgagaaaggaggactgcttgaggtcataagttcaagatcagaatctctacaaaaagatttaaaaagaaaaaatagaggaggaggaggaggaagaggaggaggaggggaagaggaagaagaagaggaaggagaagaagaagaaggaggagaaggagaagaagaaagcagggaggatagggagtgctggttgggagctctgaacatttttggttgtgtgtgtgaaaacgccctatgtgttggcgcttgccccgtgggggcgctgacgatgggcgagcaggtggtgcagaccaattctgcccgttgtattggctgtcagagttgcgtcagtgcgtgcccgtttggaatgatcaccattcagtcgttgccgggggatacccgacaacaaattgtgaaatgcgatctctgtgaacagcgggaagaggggccagcctgcgttgaatcttgcccaacacaggcgctgcagttgcttactgaaagagaactcaggcgagtccgccagcagcgtattgttgtcagcgaaatctccgcgctgaaaggcgcggagaatctattagattgcccaaccacccgcgtaaaatgcgaccagtgcggcagtaatgatcaccgtaccaatattcagcttttgccattcgcgtgcaaagacgcggcctacgaccagtgtcacaaagcccagcataataccggtaacgatattacaagtcagaacgatgaacacggcacacaccaggccagccatagcgtcaataaaatcattgaaatccagcttcgagacgttacttaa

SEQ ID NO: 136769 - DNA, 3012 bp, Homo sapiens
atgggtgagccggggccggatggtcgccgtcgtcctcgtccggtagcgggttcagagtttgaattgcccgccgatgttctgattatggcctttggtttccaggcgcatgccatgccgtggttgcagggcagcggaattaaactcgataaatggggcctgattcaaaccggtgacgtcgggtatttacctacccagacgcatctgaaaaaagtctttgctggtggtgatgcagttcatggcgcggatctggtacagcgactggacagcatcagtgcgccggtgatgtgccatcagtgtgaaaacgccccttgtgttggcgcttgccccgtgggggcgctgacgatgggcgagcaggtggtgcagaccaattctgcccgttgtattggctgtcagagttgcgtcagtgcgtgcccgtttggaatgatcaccattcagtcgttgccgggggatacccgacaacaaattgtgaaatgcaatcgctgtgcactggaagagatcctgcgtcagggtcgcgagatgatccaatggtcgtcaccgaaaccgcaaaatggtgactggcacatcggtcgcggcgtcgccattatcatgcagaaatcgggtatcccggatatcgatcaggctaactgcatgatcaaactggaatcggacggcacctttatcgttcattctggcggtgcggatattggtactggtctggatactgtagtgacgaaactggcagcagaagtgctgcactgcccaccgcaggacgtgcatgttatctccggtgataccgatcatgcgttgtttgataaaggcgcatatgcctcgtccggtacttgcttctcgggtaacgcggcgcgtttggcagcggaaaatctacgggagaaaattctgttccacggcgcgcaaatgttgggtgagccagtggcagatgttcaactggcaacgccgggcgtcgtgcgcggcaagaaaggcgaagttagtttcggggatattgcccataaaggcgaaaccggcaccggctttggttcactggtgggaactggcagttatatcacgcctgatttcgccttcccgtatggcgcaaacttcgctgaagttgccgtcaacacgcgtacggaggcggaattagggcatgtcggtaatgaaaccgtttatgaggaagcgctggcgggctatcactataccgatcctgaccaggcggctgaatttgttgaacgtacgggctgtgattcattggctgtcgccatcggcaaccagcatggggtttatacgtcagagccacaattgaactttgaggtcgtcaaacgcgtacgcgatgccgtttctgttccgctggttttgcacggtgcatcggggatcagtgatgccgacattaaaactgcaatttcgttgggtatcgcgaaaatcaacattcatacggagctctgtcaggccgcaatggttgcagtgaaagaaaaccaggatcagcctttcctgcatttagaacgtgaagtacgtacgctgacattggcaccgattgtgactcgcggctatgaatccagtaaacgagatgtgcggattgaaggcacgggtatcttaggtggtatgaactatcgggtcagcgaagggccgttacaagggatgaatttctttcttgctgccgataaagggcgggaaaagcgcgatggcagtacgctgggcgatcgcctgaattactgggatgtgaaaatgagtattcagtatgactttatgctgaagatcgaagatactaacgtttttcgactgctcctgctgggaagcctgttcagccttagcgccagggcctgtacggaatgcgaggttgactggtctacaatcacggcctcgaatttaccgttccgcttccagcaggctccaggcccacggaactcgctggggcgctataaattcaatatgccgagttcagaggccatttatttgcatgacacgccgaaccacaatctgttcaagcgtgatacacgcgcattgagctcaggctgtgtacgagtgaataaagcttccgatctggcgaatatgctgttgcaggatgcaggctggaatgacaaacgtatttctgatgcgctgaagcagggtgatacacgttacgtcaatattcggcagtcgattccggtgaatctctactacctgacggcctttgttggtgcagatgggcctgcaggcagcgagttgccacatcgagcttcaattcgagtctggtaccggtcgcacgcattacttctcgcgccatcattgcgagaagacctatctgagcaatttgctaaaggcgtgcagctgcataacgaaaaagatctcactaagcctgcggtgctggaagtgattaccccaacgcaggttcgtctgaccatcagcgaagggcgttatcatcaggtgaaacgcatgttcgccgccgtgggtaaccacgtggttgagctgcatcgtgaacgtattggcggtattacgctggatgctgatttagcccccggtgaatatcgtccgttaactgaagaagaaattgccagcgtcgagcccgttgtgaccacccgacagcattcgtcgtttgctattgtttttatccttggcctgctggccatgttgatgccgctgtcgattgatatgtatctgcccgcgctaccggtaatttcagcgcagtttggcgtaccggcgggcagtacgcagatgaccctcagtacttatattctgggctttgcgttggggcagttaatctacgggccgatggcagacagcttcgggcgtaagccggtggtgctcggcggtacgctggtgtttgccgccgccgcggtggcgtgtgcgttggcaaacaccatcgatcagctgattgtgatgcgtttcttccacgggctggctgcggctgcggccagcgtggtcattaacgccctgatgcgcgatatttacccgaaagaagagttctcgcggatgatgtcgtttgtcatgctggtgacaaccattgcacgggatcctctagagttacctgacagcatctattcatattttctgttttttcttatatga

SEQ ID NO: 136770 - DNA, 837 bp, Homo sapiens
gatatgttaaactctgtttgatacgaaggcatcgtgatgaaaccgttaattatcgttaatccggctgactgtattggctgcccgtacttgtgaaagtagcctgtgtggtcgctcacccttcagaacaggagttgaatgccgatgtctttttaccccggctgaaggtacagcgactggacagcatcagtgcgccggtgatgtgccatcagtgtgaaaacgccccttgtgttggcgcttgccccgtgggggcgctgacgatgggcgagcaggtggtgcagaccaattctgcccgttgtattggctgtcagagttgcgtcagtgcgtgcccgtttggaatgatcaccattcagtcgttgccgggggatacccgacaacaaattgtgaaatgcgatctctgtgaacagcggtaagaggggccagcctgcgttgaatcttgcccaacacaggcgctgcagttgcttattgaaagagaactcaggcgagtccgccaacagcgtattgttgtcaccggtgagaatcctctttgaaagaaaactgccccccttaagggcgcggagaaatctattaaattgccccacccaccccggcggaaaatgcgaccagtgcggcagtaatgatcaccgtaccaatattcagcttttgccattcgcgtgcaaagacgcggcctacgaccagtgtcacaaagcccagcataataccggtaacgatattacaagtcagaacgatgaacacggcacacaccaggccagccatagcgtcaataaaatcattgaaatccagcttcgagacgttacttaacatcagcaaacctacgtacatcagagcgggtgcagtggc

SEQ ID NO: 136771 - DNA, 349 bp, Homo sapiens
aaaccagcaccgctgcgtgaatgttgcgcgaggccagaatagcaatgatgaagaagccgaggatacccagaagtacgctgtgagaagtcagattaccgatgctcaccagcgtttccgggttagcgacaatcacacctgcgtttttcagccccatcatgccaatgaacagaccgataccgctggtaatacccacacgcagactcaccggaatgttggctatcatccagtagcgaacgcggaaaatcaagattgcgcccatcccgacctgccacggcaagcccatcgcctgtacaacgacaaaagcgaagaacgcattcaggcccatagcgggtgccagtgcaactggcag

SEQ ID NO: 136772 - DNA, 2240 bp, Homo sapiens; identical to SEQ ID NO: 124813

SEQ ID NO: 136773 - DNA, 2319 bp, Homo sapiens
atggctctgacatctggagttcacactggtgagaaaccctacaaatgtgctcaatgtgaggaagccttcagcaggaagtcagaactcattatacatcagataattcatactggggagaaaccgtatgaatgtacagaatgtgggaaaacattctctcgcaagtcacaactcatcatacatcagagaacccacactggagagaaaccctataaatgtaccaaatgtggaaaatccttctgtcagcagtcacatctcattggacatcagagaattcacacgggagaacaaccttatctgggacttagtgtggctgagcgacctaaggagtacgaagacgaccgggctctcaagatggcggccccatgcggaaacagctccagggagcagccatgttgcttcctgaacaaagcctctgaagatgcggaacgggcaaaaccgcccagtacggaacggcgcagcctcgggagcccgcctccactgctgatacccaggcaaacaggatttggagtggacctccagcaaactccaacagacctgcagctgagggtcctgactgttagaaggaaaactaacaaacagaaagacatccaccgggatcctctagagtcaccccagtggcgtaccgtgacgtgtgccgacctcgtggtttctaagtggccgctgttggcaaccgtagccggccatgtaaacttctcggttaagaagatggagtgtatactctggtttactgccgagccctggggggggccgagcgccggtgtcttggaagggttcccgggcgagaaacgtgcctcaaagagccacgagagaggtcccccaaatctggtgtcaaccgcgggggacccccctcacagaaagcggaggacaaccacacccactcacttcatcacggaagaacggcctctacacaacagaggagggagtgacagacaacgccgagcgtgtgatggacccacccccaaaagagaagtgacgccaccaccgaactatatcaaaaacggccagaaaaaggaaaacaaaaaaggaaagatttctgattttgactacttaaggggctttatttacatacaaggcaacccttttgctagccagattcgtgagggcagcatctgcatccttgaagagctctgtgattgctcttctctgtatgccagatctaacagtgggaaccgcagtcactcaactacaaaatttaaatgcaatgggaataattggatcccgaggtggcaacgagccaagtggcggcactcaaccatcaaaggcaaggatcctttcagcaagcaagagacctgctcaagcccaattacgtatacaccacttccatttgatgatggaatgctgctgtgcgtgccccactttatggctacatgggtcagaaagcacccagttcatgatagacagttcaggttgcatggccaaataagagagctaaactgggatgtggtccggcccgaacaatttacgggcgttgcgacaaattgcagcggcattacttatccgcaaggtggttggctgtgcccagcagaactgacccgtaatgtgctggaactggcgcaacagcagggtttgcagatttattatcaatatcagttacagaatttatcccgtaaggatgactgttggttgttgaattttgcaggagatcagcaagcaacacacagcgtagtggtactggcgaacgggcatcaaatcagccgattcagccaaacgtcgactctcccggtgtattcggttgccgggcaggtcagccatattccgacaacgccggaattggcagagctgaagcaggtgctgtgctatgacggttatctcacgccacaaaatccggcgaatcaacatcattgtattggtgccagttatcatcgcggcagcgaagatacggcgtacagtgaggacgatcagcagcagaatcgccagcggttgattgattgtttcccgcaggcacagtgggcaaaagaggttgatgtcagtgataaagaggcgcgctgcggtgtgcgttgtgccacccgcgatcatctgccaatggtaggcaatgttcccgattatgaggcaacactcgtggaatatgcgtcgttggcggagcagaaagatgaggcggtaagcgcgccggtttttgacgatctctttatgtttgcggctttaggttctcgcggtttgtgttctgccccgctgtgtgccgagattctggcggcgcagatgagcgacgaaccgattccgatggatgccagtacgctggcggcgttaaacccgaatcggttatgggtgcggaaattgttgaagggtaaagcggttaaggcggggtaatctgctctcgcagtg

SEQ ID NO: 136774 - DNA, 2919 bp, Homo sapiens
ttaatatccctgctcgaaatagctttcgagaataataaccgcagaggcagagtcaactttgcctttgttgagcgcccgatagccgccctgttcaaacagaccggaacgggcttccacagtgctaagacgctcgtcatggagctttacttcaacaccgaaacggccatgaatacggttggcaaatttacgcgctctggcagtcaatggttgctcggtgccgtccatattcagcggcaaaccgacgatgatttcgtccggggtgaatctgtcgatatcggttttcggttcgccgaagacgataccgtgttcagccagcgctctggcttcttcgataacttttgctacgtgcagcagtgctttagaagggatacagccgacgttcaggcaaacaccgccaagggtgttgtaacgttctacgattacggtttccagaccatcaaacagcgccacgcccaatgcccctgaaacggcaaacacgcgcgccaggccaatcgcccccagggcttccagccgatccgcatcctggacaattttagcttccgttgttaagggggcgatttgcgcgctgaaactgtgagcggcaatggcatgacaaacggcctcgattttctccgccggaaattgctcgaactcttcacggagcaggcgacgcgtctcttctgccgccaggattgaagaacgctgcctttgcggatgatttttcgccaggctcacaatatcgtgaaaataacaggcggttaaaatcaccagcatatcgacatcgtcatctgccgccagcttctgtgccgtagcccagacgcggcgaaaatgacacacgtcatgggccgcgtcctggtgctgatgatggtttttcaaccagttttcgaactgtgcctgccagtgttgtaagtccatacgcgcttgattttcctcggtggtaatgtgttcatccatcatcgtttctgagcaagaaatcacctcgcgactgaaagcaacagtcgcatcacaggttgctgattcagccggattaaacagccgtaaaatcacttcttgtcggtcttcagctttcttaagtgcgcttatcaggcatcccactgggggcattttcaacaaactataactttccggcacgttgaatccggctttgttgagcttcatcacatcccatgggattttgttgtaacactgtaccactgcgaccatcgcggcctgccgctggcccttatcagcacggaagggacaacagcgtggtacgcagaatacgatgaatggggtaacctgctgaatgaagagaacccgcatcagctgcagcagcttatccgcctgccggggcagcagtatgatgaggagtccggcctgtattacaaccgccaccgctattatgacccgctgcaggggcgatatatcactcaggatccgattggggctcatataccacgtacgtcccggctcgttataggtatacgccccggcaccggcgatatagttggcccctgccaaatcgcccgtggtctgggcattacccgcacgccacaaacgtttgtcgaacagattgtccacgccgccggtcagactgacattcttcgtcacatcccaggtcgcgctcaggccaacaatgctgtaaggactaatttctttggtttccggtccaaccgctggctgacctttatagttgtacttcttcggctgctgcttgccgtaccaggtgaaggtcgtttgcatcgacaaatcttcccgtgcctgccagctcagcgttgagttcaacgtatactccgggatgatcgacaaacggtcgcccgtggttttgttttcactcttcagcatataagtgatgttattggtccacatcaccgtttcgctaaccggtacgtttaacgatccttccagaccttcaaccaccgctttcggcacgttatcccactgatagagatcggtgcctctaaaggtaaaggtttcgcaggtaccgttaagcgctggaacttccgtacccaggacgctactcacggtaactccttgtctcaccgcgttccgggttctatcggtcagaaccagactccgggcagaggttatttttttccgagccgcatcaaggcgatatgcggtgatggggccagcgtggaaaatcgctttgccgttgagatcgtaagggatcggacgtttcagttcgatcaaacggcggtgacaaacgtcgcggcaggtcaccagcgtaccggtcaggtagatcacatcgccgacgcgaatatcttgcagatcttcagctttgatcggggttgtcaggatctttttcataacgcggttaccatcggcttctacaccgacgactttgccatcgcgctgtacgaggttatcgacgcggatcccggtaattaactgcgcgcccgcttcttcggcctgctccatcagccaggcatcaaatttactgcgcaaaacggagtaagaacgctgggatggcgaggtttcgtcaccattgcagtagtccatagtcatcgctgacttttccgtcataaacgcgagtttttcatgggtgatcaggcgttctacgggggcggagtcggcgaaaccaggaataatgtgttccagactgtgggcatagagacgcccgccggtgacgttcttggcacctgcggaattgccacgctcgataactaacacttgcgcaccttcgcgggcgagcaccagtgcggcaaccgaaccggcaagccctgcaccgacgatgatggcgtcaaagatatcttcggacataagagctccggcgtcgccaacaatgccgtaatccgcgtactggaagatcggcgcatttttatctttattgatggcgaaaatggtttgcgacgcgttagcgccaaccatgtgctggatctgcccggagatccccaccgccaggtacagttcaggtttcagcatcaggttggagataccgacatagcgttcgtgctccat

SEQ ID NO: 136775 - DNA, 2415 bp, Homo sapiens
atgacccaaagtaacgggcagacgttggttgttgataccgatgaacagccacgcactgacgccagcgcagaaggcttagcccgtttaaatccttcatttgatagtctcggttctgtgacagcgggtaatgcatcatccataaacgatggcgcagctgcggtaatgatgatgagcgaagccaaagcacgagcgttgaatttacccgtgctggcccgcattcgcgcatttgccagcgttggtgtagatccggcattgatgggaattgcgccggtgtatgcgacccgccgttgcctggagcgtgtaggctggcagttggctgaagtcactccgccagaagaagcgaaagagatcccacaggttgcaggctctctggaagaagcactgaacgaactggatctggaccgcgagttcctgaaagccggtggcgtgttcactgacgaagcaattgatgcgtacatcgctctgcgtcgcgaagaagatgaccgcgtgcgcctgggatcggtggcaagcacatcacgccgggatgcgacgcaaatgcgtcttatccggcctacacgggttgatgatgtggtaggccggagcagtgtggcactggaaaaccagggcaaatgggcgcaggcggcagcacttcagcggcaacgactggcgctggaccccggcagcgtatggattacttaccgactttcgcaggatctctggcaggccggacaacgcagccaggccgatacgttaatgcgcaatctggcgcagcagaagtcgaacgacccggagcaggtttacgcttacgggctgtacctctctggtcatgaccaggacagagcggcgctggcgcatatcaatagcctgccgcgtgcgcagtggaacagcaatattcaggagctggttaatcgactgcaaagcgatcaggtgctggaaaccgctaaccgcctgcgagaaagcggcaaagaggcagaagcggaagcgatgctgcgccagcaaccaccttccacgcgtattgacctcacgctggctgactgggcgcaacaacggggatcctctagagtcaccagcagcagcaagctgcatggttgcggcattggcggattaccatgtgccggaaagaccgtgcagctctattcaagaaggtggtccccacaaagacagcgggaagaaatgcggggcccaggaagagcactccagagcgagactcaccgaagagttatcggtcaccggtcaccggagtacagtacagcacacggcaggctgacggcgttcacaccacgcagcgaatctggatatccgcatccgtatgccacagacccggcaggtaacgctgcccgacccggagctgcacccggacagcaccctcagcatgtggccggataccgtatcgcccgtgacgcgcactatctttaccggtatgaccgtcacggcaggctgacagagaaaaccgacctcatcccggaaggggttatccgcacggatgatgagcggactcaccggtaccattacgacagtcagcaccggctggtgcactacacgcggacacaatatgaagagccgctggtcgaaagtcgctatctttacgacccgctgggccgcagggtggcaaaacgggtgtggcggcgtgaacgggacctgacgggctggatgtcgctgtcacggaaaccgcaagtgacctggtacggctgggacggcgaccggctgaccacaatacagaacgacagaacccgcatccagacgatttatcagccggggagcttcacgccactcatcagagttgaaaccgccaccggtgagctggcgaaaacgcagcgccgcagcctggcggatgcgcttcagcagtccggcggcgaagacggtggcagtgtggtgttcccgccggtgctggtgcagatgctcgaccggctggaaagtgaaatcctggctgaccgggtgagtgaggaaagccgccgctggctggcatcgtgcggcctgaccgtggagcagatgcaaaaccagatggacccggtgtacacgccggcgcgaaaaatccacctgtaccactgcgaccatcgcggcctgccgctggcccttatcagcaaggaagggacaacagaatggtgcgcagaatacgatgaatggggcaacctgctgaatgaagagaacccgcatcagctgcagcagcttatccgcctgccggggcagcagtatgatgaggagtccggcctgtattacaaccgccaccgctattatgacccgctgcaggggcggtatatcactcaggatccgattgggctgaaggggggatggaatttttatcagtatccgttgaatccagttacgaatacagatcctctggggttagaagtttttcctagaccattccccttgccaattccatggcccaaaagtcctgcacaacagcagcaatggtacccaacgttttgctgctga

SEQ ID NO: 136776 - DNA, 4770 bp, Homo sapiens; identical to SEQ ID NO: 118283

SEQ ID NO: 136777 - DNA, 2926 bp, Homo sapiens
aggggagcgcgcgcggggaacggctatgtcgcgttcgcattctcgaatgccggtatcgccttccggatcgcggtgcggtgccacttcgcgaaacgagatgcgcatacggggcgcggatcgctgagcagggccgtggccggtgcggagtcgtgggcggatcgcgagagcaatacgattggcgatgcgattccattccaggttccttgcggatcctatgcgaaggcgatggctttgatgggggacagagaccagtgcgaagtggtgccagtcgcatgcgagtgaatggcgggggatgccatacgcgcggtcgcgtccctatgaaagaaaacgatcaggcgctccacagccgccacgtttgacccgatccgcgttagatggctatgacgcacgacgtgtcattacgctccggcggcccagaaaccgatgccattgtagtgcacatcacccagcatccagcccagcagcgtcgtcgccacgatagaaaccagcaccgctgcgtgaatgttgcgcgaggccagaatagcaatgatgaagaagccgaggatacccagaagtacgctgtgagaagtcagattaccgatgctcaccagcgtttccgggttagcgacaatcacacctgcgtttttcagccccatcatgccaatgaacagaccgataccgctggtaatacccacacgcagactcaccggaatgttggctatcatccagtagcgaacgcggaaaatcgtcagtaacagcagacctatcgcgccccagaagattgcggcccatcccgacctgccacggcaagcccatcgcctgtacaacgacaaaagcgaagaacgcattcaggcccatagcgggtgccagtgcaactggcaggttagcaaacagtcccatcataatactgccgaatgcagcgatcagacaggaatttggtattacgctcgatcctgaagaggtattcacgtttcaaggtgtaaaactgtacgaatatcgatattttcctgactgtgtacgtagcagaaacgaggccggcatcttggtggaacaaatcttatccaccctgttttccgtgggggagcatttctccttgaagagagcgcctttctttaaagttcccagtttgcggtcgttttacgcctttgggggtttaacaactggggtcgtgagaaggaatgggaaccacggtgtaaacacgccggcgcgaaaaatccacctgtaccactgcgaccatcgcggcctgccgctggcccttatcagcaaggaagggacaacagaatggtgcgcagaatacgatgaatggggcaacctgctgaatgaagagaacccgcatcagctgcagcagcttatccgcctgccggggcagcagtatgatgaggagtccggcctgtattacaaccgccaccgctattatgacccgctgcaggggcggtatatcactcaggatccgattgggctgaaggcggggatggaatttttatcagtatccgctgaatccggttcagtatatagattcaatgggactggcatcaaaatatggacacttaaataatggcggatatggagcgagacccaacaaaccgcctacgcccgatccaagtaaattgccggacatagcgaaacaattaagactgccatatcctattgaccaggccagtagtgcgcataatgttttcaaaacattcttcagagcattaagcccttacgactacacactgtattgcaggaagtgggtaaaaccaaatctgacttgtacgccacaggatgattcccagtatccagggatggatacaaagacagcaagtgattacctgccacagacaaattgccggtaccgagctcgattgtatcatgtactactggggttgttccatgagttgtttgccagtgggtatttgcgtggccacctgacattagccatcgcagaactggaaagtggtgatgaccactccgctcaggcggtgcatacgaccgttagccagagtctggaaaaagccattggtgctggtgaattgtcgccgcgtgaccaggcgctggtgaccgatatgtgggaaaacctgtttcagcaggcgtcacagcagtcggataaggcgttcacgccgcatccggcaaacactgcgagagcagattaccccgccttaaccgctttacccttcaacaatttccgcacccataaccgattcgggtttaacgccgccagcgtactggcatccatcggaatcgagaaagcactcatcgataaggtcgcggcgacaacagttgcgacggtggtacgcataactttcataatgtctcctgggaggattcataaagcattgtttgttggctacgagaagcaaaataggacaaacaggaagaaaaatgccccgcttacgcagggcatccatttattactcaaccgtaaccgattttggccaggttacgcggctggtcaacgtcggtgcctttgatcagcgcgacatggtaagccagcagctgcagcggaacggtgtagaagatcggtgcaatcacctcttccacatgcggcatctcgatgatgtgcatgttatcgctacttacaaaacccgcatcctgatcggcgaagacatacaactgaccgccacgcgcgcgaacttcttcaatgttgaatttcagtttttccagcaattcgttgttcggtgcaacaacaataaccggcatatcggcatcaattagcgccagcggaccgtgtttcagttcgccagcaagcgtaggcttcagcgtgaatgtaagagatctctttcaacttcaatgcgccttccagcgcgattgggtactgatcgccacggcccaggaacagcgcgtgatgtttgtcagagaaatcttctgccagcgcttcaatgcgtttgtcctgagacagcatctgctcaatacggctcggcagcgcctgcagaccatgcacgatgtcatgctcacgcattaccat

SEQ ID NO: 136778 - DNA, 783 bp, Homo sapiens
ctttatgactgccctcgactctagaggatcaccgatttcggcgtgaagaaaattatccgcgtgggttcctgtggcgcagttctgccgcacgtaaaactgcgcgacgtcgtatcggatgggtgcctgcccgattccaaagttaaccgcatccgttttaaaggccaagcctttggcggtatcgctgacttcgccatggggcgtaccgcagtagatccaggtaaagcactgggtattaatgctcgcgtgggtaacctggtctccgctgacctgttctactctccggacggcgaaatgttcgacgtgatggaaaaatacggcattctcggcgtggaaatggaagcggctggtatctacggcgtcgctgcagaatttggcgcgaaagccctgaccatctgcaccgtatctgaccacatccgcactcacgagcagaccactgccgctgagcgtcagactaccttcaacgacatgatcaaaatcgcactggaatccgttctgctgggcgataaagagtaattgtgtttcgctgcaaggcgattgccttgtgaagccggagcgggagactgctccggctttttagtatctattcatttttctctccagcttgaatattttcgctatacttttcagtgaaatgtgttaataaatctattcaagtatctattcacgaatctattcattaatgagcgagctgactgatcttttactgcaagggccgcgttctgccccggaattgcgccagcgtctggcaatcagtcaggcgacgttctcacgccttgttgccag

SEQ ID NO: 136779 - DNA, 759 bp, Homo sapiens
cttgacgccggagaaactcaccagactgacgcccgccgcaatcaactcctgcggcattggctctttcggcaaaccgtactggctaagatcgaccagcgagccactgcctaaatcagtcactacgggaacatccagctctttgccgagcgccaccagttccgcttcatctatcgctttggtgaacccctgaatgctgtagttactggtatgtactttcatcaacagtgcggtattttcattcaccgcctgacgataatcattcgcgtgcgtgcggttggtggtccctacttcgtgtagggtgcagcctgcctgacgcataacatcgggaatacgaaacgcgccgccaatctccaccagttcgccgcgagaggccggcacctcttttccgctggcagtggccgccaacatcaataacaccgccgccgcattgttattgacgatacaggcatcttccgcccccgtaatacggcacagcagctgcgccagcgcccgatcgcgatgtccgcgtccggcgtcgtccagatcatactcgagggtcactggcgaacgcatagcctgcgcaacggcttccaccgcggcttccgcctgtaaagctcgcccaaggttggtatgcagcacggttcccgtcaggttgatcaccggacgcagcgcgctctgcgcttctttcgtcaaccgggcatcgacttcttgcgcccagttttcacaccacgcaggcagcgtctggctgccacgaatcacttctcgcgcttcgtcgagcat

SEQ ID NO: 136780 - DNA, 2807 bp, Homo sapiens
cggcacgctgcccgggtgtggagcaatgcacacatgccctagcggcccagcgactcatctcgtccgccgtcgcatcgtccgcctccccgcttgtgtcgtcaccagagcgaacgtgccgactccctcccgacctgtcaatgcgacaatcggcgcgtttcactcgggatagatggcatcccaggggcggcgtctgtcagcacagtacccatggtcaccgtttcaatacgcagacccgtcccgtacccaccgttcccggtaggctggtcttcaccggtacctccaaagcgcccaaaatttccgtaatgggtcccggtatgggtatcccgtcatgctccatctccgccaaagaactgatcaccgatttcggcgtgaagaaaattatccgcgtgggttcctgtggcgcagttctgccgcacgtaaaactgcgcgacgtcgttatcggtatgggtgcctgcaccgattccaaagttacccgcatccgttttaaagaccatgcctttgccgctatcgctgacttcgacatggtgcgtaacgcagtagatgcagctaaagcactgggtattgatgctcgcgtgggtaacctgttctccgctgacctgttctactctccggacggcgaaatgttcgacgtgatggaaaaatacggcattctcggcgtggaaatggaagcggctggtatttacggcgtcgctgcagaatttggcgcgaaagccctgaccatctgcaccgtatctgaccacatccgcactcacgagcagaccactgccgctgagagtcagactaccttcaacgacatgatcaaaatcgcactggaatccgttctgctgggcgataaagaagaagatcgggtgattcgctttggtaaagcacgggcaacgcgatatgcactgctgcgtccttatcgcggaattgagcgtattcccgtctggcgggtggacgataccggaaaggcgcataaattcgccgacatccggttgtgctggccgcagggaagttgtctggatgttgcgaaagcgcgagaagtgattcgtggcagccaaccgctgcctgcgtggtgtgaaaactgggcgcaagaagtcgatgcccggttgacgaaagaagcgcagagcgcgctgcgtccggtgatcaacctgacgggaaccgtgctgcataccaaccttgggcgagctttacaggcggaagccgcggtggaagccgttgcgcaggctatgcgttcgccagtgaccctcgagtatgatctggacgacgccggacgcggacatcgcgatcgggcgctggcgcagctgctgtgccgtattacgggggcggaagatgcctgtatcgtcaataacaatgcggcggcggtgttattgatgttggcggccactgccagcggaaaagaggtggtggtatctcgcggcgaactggtggagattggcggcgcgtttcgtattcccgatgttatgcgtcaggcaggctgcaccctacacgaagtagggaccaccaaccgcacgcacgcgaatgattatcgtcaggcggatttccagtttgacgatttcgtcatggcgttcacgcagaatatcaacggcccgacgcagaatacgcgagcgctccatggcggtcataaacgcccagattttttgcccctgctgggcgcttttcacggcgcgatcgacatcctagcgcccggcggcctgcacggatacagtcttccatccagtttctttcacgcactagcattgagtgcggcttttccaggcaaacggtgcaagctgtctgtgcatctaccattctggggtctgaaggatggtggccctcttctcacagctccgctaggcggtgccctagtagggattgtgggaggggtggggggctccaacctcacatttcccttccacacaaacttcctcaatgtacgcttcgttattaggcggatatcccatcggcaccaccacttttaccgtatcgccaaattgctgatgaacggcgcgcaaggcagcaatatgctcattgctgcggtcgccggagttccccaccagaatggtcattttcccttcacggttgccgatcgtttcgccatcgtattgagcgaagggtccatccgcgtcgggaagaacagcagttcgcccggcacctttgggtgcgttttggcaaaaaagctcaaatcgccgcgggtggcaaatacacagccgactcgcttttgcgccaggcgacgtagcggggacaataagcttatatctcaagcccactggaaagctccatacggtctgccgccccagatatgccagaaaaactggctgggcttaatgccaccactcaacagagccagccacagtgtgggattgaactgaccgtggaagaaaaaacgctgctgacggttagcttttgctttcgcgatgaccgcttccgccagcgattttttcccagggaaaaattgcacagaaagcgccggacagctatcacttaagccgtcgtccttgccaacaaccataaactcgcgcgcgtgctcgctcgtcgcggccagcgcgtcattaaaaaaccgcaaaacggttcggttatggtgaggtgatatccaatcccagtatgtgaatcagtacagtcaagtccaattacgtcatgagtaatcctcccctctacaaagagaaaaatatctgatataagggtccaaatatgtctgctgcgcgaccattgcaacaagcgcagggattaggcagtgggcaaatcccttcaataaagtgatgtggtctgtactaccgccagaatataaaaacgcaaggtcgctttgtcgttcatatagagtcggccggcaggcatgacaagacgtgcga

SEQ ID NO: 136781 - DNA, 705 bp, Homo sapiens
atggaaaccgtggcttacgctgattttgcacgtctggaaatgcgcgtcggaaagattgtggaagtgaaacgccatgaaaacgccgacaagctgtacatcgtacaggttgatgtggggcaaaaaacgctgcaaaccgtgaccagcctggtgccgtactacagcgaagaagagctgatggggaaaacggtggtggtcttatgcaatctgcaaaaagcgaaaatgcgtggtgaaacgtcggaatgcatgctgttgtgtgcggaaaccgatgacggcagtgaaagcgtgctgttaacgccggagcggatgatgcctgcgggcatcggatggcgacgtcgtatcgccatccgatttgatattacgcctcttcgacacttactcgcatgccgccagcccttacgcgccgcttttgatcaccagttcacactgttcaatgatatgctggctgatatctgccacgcgttcgataaaggcgctggaacaggaaaaaaaattcccatgtgtcgtgggagggacgccgtgggagatataccatggggtatacagttagcagccgtgtatgctctttgtgacttgagtcccagcaatccagcagaaatttccaagatcctggaagcttggcggagagaggcctccaaaagcgttccgtctgcgattgtcagctgcctagaggaagtcagtgccctgagcacagaggagcttggctga

SEQ ID NO: 136782 - DNA, 1599 bp, Homo sapiens
gcgcttaataaagcgagcaactttccaggcacgcttaatgcaatatccatagaggaagaatgctagcaaaaagagcaccagcatgacccactccgggacaaaatgagaatattctgccagcacgccaatggaagcgagcagtgctgcggcaagggtaatcagcacaaacgcctgacgggaagtaaacccggcacgcatgatcaaatggtgaatatgctgacggtcaggagagaatgggctcatgcctttacgcaggcgacggtacataatcgccaccatatccattagcggaatggcgattatccacaaagcggtaaccgggctgatgggatgggttttgccctgggtcgtttcgagcaggatccagataacggtaaaaccaatcagcgtactgcccgcatcacccataaagactttgtagcggcgacccaggataccaaggttaagcatgatgtatggcaggatggcggcgatcatcgcaaagcaccagattgcgaggctggtttgcccgtcgaaccacaaaatcataccgattgctgcaaacgagacgcaggacaacccgcccagcaagccatcaatgccatcaaccatgttgaacgcattaatggccgcccagacggcaaatagcgtcaggaagtaaccaaacggtccgagcaccatctcccaggagccaaagatataacccaggctactgagataaagcttgccgaacaccatcataacaatgccaacagcggcctgtatggtggcaacagcaaagccgatgcggcgttgctggatgaaatgattaacaacatccagtttatccccggagactttacccgcgcggtcaatgacagcgtgaagcttattgccgaaaccgcgccgctctatgaagatgtcatctggcgaacgcatctccagccgcaggatcccacgctccttctcctgactcactgagtaaatacggaagaggtggggctcctttgccgctctgcttgctcctctgatagctacacctccaaggacttcacagccactgtctccactgatatcgagttctagtccttcctcaccagcctctcctgttggccaggtttctcccttccgtgaaaccccagtgcctcctgccatgtctccatggccagaggaccccagacgtgcctctcctccagatccttctccatctccatctgcagcttcagccagtgagagggtagtgccgtctcctctgcagttctgtgcggccacgccgaagcacgcacttcctgtgcctggccgactcccaccctgtgcatctggccacgcaatgccctgctggcgggcaaaaataaagtaaccaagatcgcactgacgaagtagcgccagataggcgtcaaattccagtttttcgctcagaatttgtagattttcttcgctgaataactccagccccgcctgacgaacttcctcaatgtacgcttcgttattaggcggatatcccatcggcaccaccacttttaccgtatcgccaaattgctgatgaacggcgcgcaaggcagcaatatgctcattgctgcggtcgccggagttccccaccagaatggtcattttcccttcacgttgccgatcgttcgccat

SEQ ID NO: 136783 - DNA, 1455 bp, Homo sapiens
  misc_feature (1)...(1455): n = a,t,c or g
ctagaaattggtcatgagctttctttgaacattgctctgaaagcgggaacgctttctcataaagagtaacagaacgaccgtgtagtgcgactgaagctcgcaataccataagccgtttttgctcacggatatcagaccagtcaacaagtacaatgggcatcgtattgcccgaacagataaagctagcatgccaacggtatacagcgagtcgctctttgtggaggtgacgattaccaacatgttcggtaatactttcctgcacagcttcgacaagatccgatgttgccagcggttaatgggcagatggttcacctcggtgaatcgcagaatccgcagctgcatcagcatggtggtattntggtggaaaatagccgccagctcgcggattttcgctgcgccaacaccacaaatctctgctggccattcggcggttttcgctattccgtcactctcgcccagcaaataagaggcgaagacggcataacctgtggtgcaacgcgccagaaacgcttcgtcgtgccaaccattttccaccagcgtatgggcgatccccagcatcagcgcaacatcggtgcccatgtgcggtgccacccactccattttatcgccaaagaaatcgacggtttccgatcgcattggatcaatgcagatcagctttttcccgctgtcacgcagtgcagaaaagtaagaaagcccctgctcatcggatgcattccacgcaattttcagcgtattgagtgggttagcactccacagcaccacgacatcgctatgttccagcaccagcggccaactggtctgctgttgataaacttcactaccacccacgacatacggcatgatcgcctgtgccgcgccggtcgaataatcccccagatgcccggtataaccgcctgccagcgccatatagcgttgtaataatgtcgaggccttatgcagcacgccgtttgaacgccagccgtaggaaccagcaaaaatcgatgccggaccataagcctcacgaatgcgtttatgttgttggtgaataagatccagcgcctcatcccaactcacgcgaacaaattcatcctgcccacgaatgccttgcgggttttccggtgacgcaagaaagccttttcgcaccattggaaatcgtacccgcgtattgctgtgaacctggtcgcgaaccgcgctctgcaaggagttttccattcgcgccacgcgagctaacgtgagtacaactcgagctcggtaccgggctatgacgcgagacgctggatctggtcgtatctgccggatgggcgtgagcacgccggatatctggggcggtaaccgcgacaccggagacaggaacgttatgccagctcgattcgggcgctgaatgccactaccgggagactggcgtggagctaccatagcgttcaccacgacctgtgggacatggatcttccaggcacagccgacgctggcggacat

SEQ ID NO: 136784 - DNA, 5921 bp, Homo sapiens
  misc_feature (1)...(5921): n = a,t,c or g
tcacggaagagatactgtcgacatcgaataatcccccagatgcccggtataaccgcctgccagcgccatatagcgttgtaataatgtcgaggccttatgcagcacgccgtttgaacgccagccgtaggaaccagcaaaaatcgatgccggaccataagcctcacgaatgcgtttatgttgttggtgaataagatccagcgcctcatcccaactcacgcgaacaaattcatcctgcccataggttttctcgccgctttttagcggcaaaatcgggtaacgtgtcggtgcccgcgcccgcaggcaggcctttatcaaaactccaccggtaagcatcagcgagttaatcggcacaccgcgacggctgacgcgagtcaaaaacttcggcgcattaccctgcacagaaaaggccaaacagcatgcggctgttagagtaaaccccgctgttatacactgacagcgatgctaccagaatgacgaagttcagcgcagaagctaccacgttgctgtcgagattatggaaaatcatcacaaacgggctactgttggatttcacttccacccacggatagagcgccagtaaaaccaccagtgaaccgatgtaaaacagcaggatgcgatacaccacctgatttaccgcttttggaatgcttttttccggatcgcgcgcttcagcggcagtaatcccaatcagctccagaccgccgaaggagaacataattaccgccagcggacaaaatcagcccattccagccggtggcgaagaaaccaccgtagcgccagaggttgtcgatactggctttctcgccgccgtgaccagaaaacagcagccacaggccaaagccgatcataccgatgattgccagcactttaatcaacgcaaaccagaactcggtttcgccatataagcgcacgttcaccaggttaacggcgttgatgataataaagaaggcggcagcccaaatccacgttggaacatccgggaaccagtactggagaaaattagattttaattctccaggtggttcttcaccagtagaaaattctgattgttccacaaatagcagattatctttctctcctgaaaatatcctcatccaaaaccaagacattgtgagagaagctgcagtgcagggagatgggcagaagcaaaggcagcctcaggccacagatctggactccagtgggacacatggcagtgagatgcttccagccacagaagtgactgtgtcaggagggttttctgttgaagaaaccagctgtggagacacagggagatctggtggtgaggccctggctgttgcaaatgattctaccagcacaccacaaaatgctaatggactttggaaattgaaatctacaactcccggtggtgctttgcctgagtgttttggcaccacagacactactttttcttcagcattttgcagaaaacatggagagacacaggatacctcccaaagtagcctgcctggtaccttacattgttacacaggcattcgagaggggggagacgacactgaggtagagagtgaggcatttagctgcagtgaggggagcgaacagcaagatgctcctgatgactcacagaaaaatttaggagacacagatgctgctgtagccgaggtgagaccttccttagaggtaggttatttgacgtcagctctgcaagattttaacataagtactttttctgagctggatagactttccacatcagaggttgtgatgtttcttgagagctgtcagttaggggattatagttcaggggactctgtttctgaatgttctagtaaaggaaccctaagtaaagaaatgaacaaagaattaaaggcaagtgaaataggagaaaaatacagaaagcaaccctgtgaggaagaaacacttggaacctgtgaagagtggattgaatcagaggaagatgattattcgttaaaaaatacaagtcagctcactcagtgttctttggaaactctgtctgaggttctgaccaagattaggcaagaacttcaaacaaattctgaagattgcaatggtaaagatactggcagtttattgctcttaaatgtaaataacaacatgaccactgagaatttaaaagagaaaagtccatttcgggaaacgactggctcctcatcacatgcttcagaaccaaccccacaagcagctgccttggacactgagggcagctctcccatcagcggtatgcctcagaatgaaaaccctcagagcagaccagaggcccgttcagatgcaggcaggcaaaccgatggtggggaagaagacctgccagaacctgtggagccatcagccttgtgctctgactctgtgatggagccatccatagagcaaagttctaactgcgaggccgaaacaacatttcagtgtcagatagcaacagtgacctcagaagttataaacgtacttataaataaggatcagaatctagtcattgaaaagggggacaactggacaatcatcagtggtgtagctgtcttgccacatgtggaccaggtcacactgtgtgacattcctggagacatccctatttctcaggatcaaggagagctggaagctggttgcatcccagtgacttctgctgagaagtccccagaggccagtcacactggccctgcatttcaggaggctccatgtggcaataatctttcatgtccccaagaggatgtttcaagcagtggtcagagcaccaactttgataagagtcgtttgcgaaatagacccagttaagcctagtatatggattagttctcaaatctatgatcaaaacttcgagactcagattgttgcgtctgatcacacatattataactcaaaactagagccatctggcaaaaataagaatcgatcaaagatttcaaacaaagatcagtcaaacaaaccagtaaaaacttcagccgtcgagcagagttgaaactcatcagagtgaagttgctcagtcattttcaggggaaaaagctaatacaaaaactcaaagaagccaaactcagaccattttagcaaatgctgatacatccactcctacagattgttctcctgacacactgagtaaaatacggcaagaggtggggcctcctttgccgcctctgcttgctcctctgatagctacacctccaaggacttcacagccactgtctccactgatatcgagttctagtccttcctcaccagcctctcctgttggccaggtttctcccttccgtgaaaccccagtgcctcctgccatgtctccatggccagaggaccccagacgtgcctctcctccagatccttctccatctccatctgcagcttcagccagtgagagggtagtgccgtctcctctgcagttctgtgcggccacgccgaagcacgcacttcctgtgcctggccgactcccaccctgtgcatctggccacgctgctgtgggagggcctcaggagaattctgtgaaaatccttgacaccatgtatccagagttatctgccagggcccggaccctcaacatcctcaaagggaatattcaactcacacgaggtccgcctgctgactgtaagaatttaccgggacctgccagtgctatgataggattcaaaacgatcacttcagcagcaactgcttttgtcaaaactgggagcagctctggtggtgactgtaaccaagacaagtcaagagatttggggactcagcaggattcaagcgggaaaagaacactgtcaacgtctacactgagaagtgctaaaagactgcgcctggacactgggtccccagaaccagaaaccaggggagtcactgcagaaggaatccacaaaaacctcccagggaacctccctccagctgaagttgcaacaacaaatgaggaaagaagttgttctagtccagccgtcagtgcagtttcacagttgcctttaagcccaaaagaaactgtggagtcccatgataaagccatagctaatgccctgaagaaaattgcagagttttcttttgatctgttacctgtcattcgtagtcatgtgtatgtgggaaatatctccaaaaagcccgtaatgagagatcaagagaaggaagttgtttatgaatttagcacaacaaaaaagcatttagcagagtgcttgcttcactctattctctcagaactaaaaattcagaagatatctatggaccacaattacattcacgccctctgcagggtgtatgtgggtatttgtcggcaactcggagacttggaaagagctcgtttgttttgctacagcctacttaaaagaagattttccggagtctgaaaaattaacttttgtttattgcaaacatgtggcatgatatatttctctctcaatcggtgattaataaagcaatgcagttagttgccaggcaacgtgctaaaggagaggatttgaactgcttgagagcttttcttaattgggaaaagaatgccccgggagatgatggcttcatggtttctaagctgcttttgaccatacaggtatgtccaaaaacttaatttcaacctagtgaaaaatttggtgaagacctaagtgataacacttgggaatacatatttgccattgatctgctctgctgccatcagaaatggatctggacgcatgataacatcataagtaaggagctgtggcctgtgatggataaatggataaaatacagaaaaggacatgcaaacattgcgtatactcctgatattattatagcctcaatactgaggctgattggtcgtttaggccaattgggtttgaaagaaggatttccatctgctgtgaaaaatattagttcggttattggtatgtttatacagcatgctcacgatgaagatataccatggggtatacagttagcagccgtgtatgctctttgtgacttgagtcccagcaatccagcagaaatttccaagatcctggaagcttggcggatagaggcctccaaaagcgttccgtctgcgattgtcagctgcctacaggaagtcagtgccctgagcacagaggagcttggctgacctgggatgccactgaggcttgagaagtgccttgacacattttgaacacaaatagtttgatcagctttcagaatacaaagggaggtttcaaaacctaaagacatataatagataaaacagaccacaggctctccttattgtttggcaaggagacaggagaaacaagcagtcgcatagtcgattttccctaaatctaatacgtttcacttaaggctgttgtgatctgtgacatatgggttatattattgtgtctttgtcaaacaacaaaaacttgaacttagccctttttttgctgcagaaagtgtccttttagtggcttcttaaaattgagtgggcattttataatgaacttaccaatataaaaacatgattttggttcctgaggctgttgttgttgggacttgtgttccaatgaggtgactaggggaaaaataaattgggccaaaaacctaggagttttctgctatctttggctggggaaatggagttggcaaaagtttttctccaagatgtagtgcgtaattgatcagagcaaaacatgcagagcccttagcagaaaccccactttaatgcattttcttcatatccctaaagttccttaaaaatatgtgacaatgcatcaggaagaggagaactgaagagtagaagttcccttgcagatttttttatccagtgacatgtaatgagcaattcacagatgagcgcaggcagagctctgtgtgcccgtgtacatatggaccgtgctatgatgtgtctcacattggatgatattcccnctttgggaattttagtatttgtatatagaaaatgggttttaataactctaccatggttttgatttgtcttatattcgttatttcttaaaactcttggtatgtgtttttataataaaaaaataaaaggtaagccatgggatatt

SEQ ID NO: 136785 - DNA, 1476 bp, Homo sapiens
taggcccacctctcgcatcacaatagcccctaggaataccggctcaaaacattgtacagaaaactccgcagacacacaacgcatgtcagttctagggaaatctaaactcagatttaaggaggaaacagtaaaagtgaaggaaaatgcagacaactttaatggatactaacttttccttgatataattctctaaaatatacagctacttcataaatgaacttgacagaaacaagtgtaatgaatataaacagtaaagttaacatcttggactgaagcactggcattcggtttacctgaccttatttctggttggattttacatttgcataactaaaagggttcaccagaattctaccaaaacacagtctatccccagagcagattccaatctccgccctcaaaggcacagactccacgctatctagaggcgtgatccccctgcccatttctgaggctgggagcctgcagtgtggcctttgggctaaagatggcgacagagatcaacgttggcgctgcctttttggggctaggttctgaatgagctctaacatttaattcttcaaatacttagcagctactgtgtgtcagcccttgtgcctcaaatccccgcctcacttacagtagatgcatccttccacgcaatgcgtgagagtagaactggatcctgtgatgacttcaggaagtccgggtgtccattctgttgggtaacaatttttgttagctcccccttgtcacgagggacacagcccctgctctttaggagtttagagcttaggagggaaggtagatattagacacatactcatttcaacatttttcccacctatgtgaaggagcatcacacgaatgcttgatcccttctccccatgacagagacgttgctgtgaatctgtctcctgtacactcattccctccaattcccttggatgttcttgcccaggctctggtcacagaattgggtgacaaaggatgctgggagccttgagttctagcagaggctcttccatactggaatattgatcacatatcattttgagaaggctcatacggggcagtgagccatgatacaaaaaatagcccttgggtattgaaggttggctgcataaaggacagcagacgtaggtatcagctagttatgcattttgtagactggttccagtgcacacattccaatgagtgctcataggtttatgtgagaaaatgtgttatttttgataccttcttccacatgcctctccctgttcacaccctctgcttcagacactggtctcctcacgattctccaaagacacactccaggcacgatgctactccagagcttcagcagtaggccttgtgttttgaacacttgatccccaattacctgcctgggttggttcctcagagaggcctacgctggttacccccgtgaaaacctgcaatatgcaccccctcaaatctcagcacccttagattacctatggtactatcacattc

SEQ ID NO: 136786 - DNA, 972 bp, Homo sapiens
acttttctgttcctagttaaaataaatatgtccttggcaaagatttgaacaaaagagggatatattatgaacgtacattccttatgtttaataatcagtgtaagacactgaagatttcagaaaatgtttcaaagtactgtagaaacaaccctgaaaattgaaacctgtaatttgttatcttaattggcaacttgttgctgtttctgattttaaaacatgccccatgaatttctttgagactttttctccattaagaagtggagtatgattttttcctcccctttgaatgccagactgaccattagtgaaatagaacgaggccaaaaagttatgctgaatgacttctgaagcgaagtcatcaaaagttatatagtttctgcctgactctctctctctcctagcccttactcttgaaacccagttgccatattgtggggaagcccaggtgtcatgaagaggccaagcaaaggtggtttggccaacagtcccgctgaggtcccagcagagatccagcatcaatctccagacctctccaaactcctagagagcaggggctgtgtccctcgtgacaagggggagctaacaaaaattgttacccaacagaatgggacacccggtcttcgtgaagtcatcacaggatccagttctactgtcacgcattgcgtggaaggatgcatctactgtaacctgggtgatagagcaagaccctgtcctgaggaggaggaggaggaggacgagaaggaggaggacgaggatgaggagaagacgaggacgatgatgacgaagcgacgtagaatgagaggaggagaggacgaagatgatgtagacgaagaagacgcagaagtagcagaagtaggccgacgaggaggcagaggaataggaatcaagtgtgattatccattaacttgtttaagattttgcatttactcagcctcttctgcatttaccagcagctgttctggccacagctga

SEQ ID NO: 136787 - DNA, 272 bp, Homo sapiens
tatcggcaagctgtactggtttatgccgccaagcgccaacctcgcgctgcgggagctggggatcgtgctgttcctctcggtcgttggtctgaaatctgggctaagctggattggttatggtgccctgatcaccgccgttccgctgattactgttggcattctggcgcggatgttagccaaaatgaattacctgaccatgtgcgggatgctggcaggttccatgaccgatcctccggcgctggcgtttgctaataatcttcatccaaccagcg

SEQ ID NO: 136788 - DNA, 1453 bp, Homo sapiens
cgagatgctactcattactaagtcgagctccgcacccggggatctacataagcattgcggagcgggtataattcgacttaactccgcaaatttcacgcttaacagccttcttcccgccgaaaaaaagctggcggaagagtttgcggtatcgcggatgaccatccgtaaagccattgacctgctggtagcgtgggggctggtggtccgccgccacggtagtggcacttacctggtgcgcaaagatgtactgcatcaaaccgccagtctgaccgggctgggggaggtgttaaaacggcagggaaaaacggtcaccagccaggtgctgatttttgaaatcatgcctgcgcctccggccattgccagccagttacggattcaaatcaacgagcagatctacttctcccggcgcgttcggtttgtgtgaagggataccgctgatgctggaagacagctatatgccggtaaaactgttccgtaatctttcgctgcaacatctggaagggtcgaagtttgaatatattgaacaagagtgcgggattttgattggcggtaattatgaaagcctgacgccagtgctcgccgatagactgctggcgcggcaaatgaaggtagcggaacacacgccactgctgcggatcacctcgttgtcatatagcgagagcggggagtttttgaattattcagtgatgttcagaaatgccacgcaaattcaagggtggaggtcccattttcggcgccctccacccgaaaaagagtttaaccgttcctccagaaagagccccgccagtatttggggggttaataatgcgcaagaaccattcccaacggatagacagtggcgtaagagagcgccgccgcaccgctggttggatgaagattattagcaaacgccagcgccggaggatcggtcatggaacctgccagcatcccgcacatggtcaggtaattcattttggctaacatccgcgccagaatgccaacagtaatcagcggaacggcggtgatcagggcaccataaccaatccagcttagcccttcgccattgaccagggtattcacaaaatccccaccagatttcagaccaacgaccgagaggaacagcacgatccccacgtcccgcagcgcgaggttggcgcttggcggcataaaccagtacagcttgccgatactgccgatacgcccgaggatcaacgccataatcagcggtccgcccgccagccccagtttcaacgcggccgggaatcctggcacaaagacgggaatagaacctaacaatacgcctagcccgatgccaataaacactggcagcatctgaacctgttgcagtttattcggcgcattccccagcacattggcaacggcatcaattgcggacggacgccccaccagattgaggatatcgccgaactgcaggctgatatcccactggcgaccagttcgaccccggcacggt

SEQ ID NO: 136789 - DNA, 493 bp, Homo sapiens
aggagatgaaatgacaacgtcaaccctccagaaagccattgatctggtgacgaaagccacagaggaggacaaagccaagaactacgaggaggcgctgcggctgtaccagcatccggtggagtacttcctccacgcttatcaagtatgaggcccacagcgacaaggccaaggagagcattcgagccaagtgcgtgcagtacctagaccgggccgagaagctgaaggattatttacgaagcaaagagaaacacggcaagctctgcctcaaagaccgagtgacataagccattcccaccctcctaggttcacatccagggctgtgtcttccttgggggaggagatggtgtcgtttagatcagggtaaggcagtcaggcgggtgttcaccactgccttttcttcctctgagcgtgagaacactgaacccagccactgcccctgggtccctgtcctggaaatggtctaataaatccttttcccttcttgagctaaaaa

SEQ ID NO: 136790 - DNA, 934 bp, Homo sapiens
tttttttttttgggaagaaaaagaggtttaattggcctttctagttcttcatggctagggaggcctcagaatcatggtaggagaccaaaggcacttcttacatgctggtggcaagagaaaatgaagaaacaaaagtggaaacccctgataaacccatcagatctcgtgagacttcaccatcacgagaatagcacgggaaagaccagcccccatgattcagttacctccccctgggtccctcccacaacatgtgggaattctgggagatagatacagttcaagttgaaatgtgggtgggggcacagctaaaccatatcacacttttaatgtcactgtattcctggtgagacgtgacagtgttaatgaggaagacatcaaggcattggggctacagattgccagagtcccatgcaaatcatgagtcgctcggaccacccagcccgagttctgaaggagcccgtcctcctcagatgctagggacccacagagcattctctttgggacttccttagagaccggaggggtcgagcccctctgacactgaggggcagctgccccagtcagatccatttggtttcaggtctgtggcccctctcgcaccaaccccagcatgatgattgatgacctcctgactccatgctcaccaggggacccaggagccatggagatgacttggatggatgtccctggggacaaactcttagagcctgtggtttgcatggtaagtgacttgacaggggagggaagagggctgcacagagcccagaaaattgagggtttgggtccagaataaaaacggtcttctccaggccaggcatggtagctcacgccttgtaaatcccagcactttgggaggccagggtgggcagatcacaaggttaggagttcgagaccagcctagccaatatggagaaaccctgtctctactaaaaat

SEQ ID NO: 136791 - DNA, 2460 bp, Homo sapiens
tttcgtggggtgtggggcggacccaggagatgaaatgacaacgtttacccttcatataagagagggctgaacaaatgccccggccctgccaagagccggtcaggaggtttattgtttgctgtgcctggaaccgtgggtctgcggtgggtctgcctgcctggtaactggtgccggatctgaggaggagaattctggtcatgcttcgtgcaggcgttggtgaagctgcggtttttaaaaccaggctttaaaaccataaagccattgatctggtgacgaaagccacagaggaggacaaagccaagaactacgaggaggcgctgcggctgtaccagcatgcggtggagtacttcctccacgctatcaagtatgaggcccacagcgacaaggccaaggagagcattcgagccaagtgcgtgcagtacctataccgggccgagaagctgaaggattatttacgaagcaaagagaaacacggcaagaagccagtcaaagagaaccagagtgagggcaagggcagtgacagtgacagtgaaggggataatccggagaaaaagaaactgcaagaacagctgatgggtgccgtcgtgatggagaagccccaacatacggtggaacgacgtggccgggctggagggggccaaggaggccctcaaagaagctgtcattttgccaatcaaattcccacacttgttcacaggcaagcgcaccccctggcggggaatttctgctgttccgaccccctggcacaaggaaattccaaccggcccaaggccggggcaccaaaggccaccaactccaccttcttctctgtgtcctccctcagatgtgaagtccaagagactgggggaaaccgaaaagctggtctagaacctgttttgagctggccaggcagcacaaggccctccatcatcttcatcgatgaggtggattccctctgcgggtcccgaaatgaaaatgagagttcaggccgcccggaggattcaaaacgggagttccttggtccagattgcaggggggttgggaataaacaatgatggggattctgggttttttggagccacaaacatccccatgggtgttggatttcggccatcaggaaggaaggtttgaaaaacgaaattttatatccccttgccggagaaagcctgcccgcgcccagatgtttcccgtttgcatctcgggagcactccccacaaccctccgggttgcaaccttccacaagctggcccggaagacggaaggctactcgggcgcggacatcagcatcatcgtgcgggactctctcatgcagcccgtgaggaaggtgcagtcggccacacacttcaaaaaggtctgtggcccctctcgcaccaaccccagcatgatgattgatgacctcctgactccatgctcaccaggggacccaagagccatggagatgacttggatggatgtccctggggacaaactcttagagcctgtggtttgcatgtcggacatgctgcggtctctggccaccacccggcccacggtgaatgcagacgacctcctggaaagtgaagaaattctcagaggactttgggcaagagagttaaaagctgcttcacttgggcaatggtgaaggttgggaagtttgattggggcaaatccaggcactccccatgtcaacagccagacagggcttccagggcttgtcccagtcaatacagagttccctctgctgttctggccgtctgccaggggagccagaaggaaggggccttgcagccacagagacactccactgccctgggggcaccacagtgggacactgctcttcctacttcctcctctcctgggatgctcatcagctccttctgcctccccccctttttttttccatcttttggtccccctaaatataatgctgcttggattttcatcttatttataaagataaaatcacctgggaagtgttcaagggagtggggcgggggttggcgggggagaagcagccgtgctgccaaggtcacccagacctccagacagcccccagacctccagacagccggctagccccactgcccgttcctttttacgccacaagttttgcgtccgttgagagcagagttggctgatgcccctgcaaccccagcccaagctctgcctcaaagaccgagtgacataagcccattcccaccctcctaggttcacatccagggtctgtgtcttccttcgggggaggagatggtgtcgtttagatcagggtaaggcagtcaggcgggtgttcaccactgccttttcttcctctgagcgtgagaacactgaacccagccactgcccctgggggtccctggtcctggaaatggtctaataaatccttttcccttcttgagctacccaagtgatttcatctttccttgactcttaactgagactctgaagggccacccttgcttccaattaaaagaccctctggttttcaaaaaaaaaaaaaaaaaa

SEQ ID NO: 136792 - DNA, 978 bp, Homo sapiens; identical to SEQ ID NO: 132074

SEQ ID NO: 136793 - DNA, 1293 bp, Homo sapiens
atggtcgctggcaacaacgatcagaaagccattactgaaacgaccgaacagttaatcaacgaccgctcgaccatcgcggtgaagtggtgctggttggtgcaggtccgggcgtgccgggctgctgacactgaaaggactgcaacaaattcagcaggcagattggtggtctacgaccgtctggtttctgacgatattatgaatctgagcgtacgcttaagtaccggacacttaaaaccggtggcgagctggactgggaaaacctggcggcagaaaaacagagctggtgttctatatgggtttgaatcaggccgcgactattcagcaaaagtgattgaacacggaatgccaggcgaaatgccggtggcaattgtcgaaaacggtacggcagtcacgcagcgcgtgattgacgagagctacgtatcagtaaagagagtcactggcgcgaggcgatcaacgccaaagcgatggagcaatgaccttaaactggcaggaaaaacgctggcagcgattttttacagcgaagaaccgggaaatatcgaacccgtctacatgctggaaaaagtaaaaatcaaaaccatgccaaatgggaggtccataattttaccatgggctacaacggcaagtaaccgaagatacttacgaatatttgctgctaaatgtgagctaccccccggttcgctacgccacgtctgtctggagttaactgtatacatggcgcggttatatcccgtgacgtatcgaccaccgggactagtgtcctcggataatgccgttagacccctggagaaccctcgctctagagacggtggaatgtttgcaatcgcgtcgctattgtctcggaatgggggaatatggcgcggctggatatgttaccgtgcagaggcgcgcatagaagttaagcggcccatacactcgctacagcgcagcattgcgtcctcgcgcctctggcccccggcgttttgggccagcgcacgtacctctgcggagtttgtaaaatttactttgccagcagaacggcccggtgcccgatcttgcgtatcaggtcgattttccacggctggaattgtgctggaaggtgagtttgtagataccggcgctggagcaacgttattcccggcgatgtgctgtacgttcctgctggtggctggaattttccacattggcaagcccccgctactacctttagacgtgctgttttggcaaacagcactcggcttcagcgtcgtgcaatgggatggcaaacaatatcaaaatctgcgaagcaacacgtcgcccgacgcggaccacgcatag

SEQ ID NO: 136794 - DNA, 3051 bp, Homo sapiens
atgcaaacgattatccgtgtcgagaagctcgccaaaaccttcaatcagcatcaggcgctgcatgcggttgatctgaacattcatcacggtgaaatggtggctctgcttgggccgtcgggttccggaaaatccacccttttacgtcacttaagcggtttgattaccggcgataaatctgtcggtagccatatcgagctgctgggccgcacagtccagcgcgaaggccgcctggcccgcgatatccgcaaaagccgcgcccataccggctacatattccaacaattcaacctggtgaaccgcctgagcgtactggagaacgggaataaccatggacaccaatgtgatactctatttctttcggtggcgtcattcgctactggcaatgaactggcagcgcagttaattcggcagttgcgccggcagtgtacgccggggcaagtgatggtcgcgtcaactgtcgccaaactggcaacgattattgatgctgaagaagacagcacccggcgtatgggattcgaaaccattctgccgttgcgtgaaggtaatggcccgacgctgttttgtttccatcctgcgtccggttttgcctggcagttcagcgtgctctcgcgttatctcgatccacaatggtcgattatcggcattcagtcaccgcgccccaatggccccatgcagacggcggcaaacctggatgaagtctgcgaagcgcatctggcaacgttacttgaacaacaaccgcatggcccttattacctgctggggtattcccttggcggtacgctggcgcagggtattgcggcgcgactgcgtgcccgtggcgaacaggtggcatttcttggcttgctggatacctggccgccagaaacgcaaaactggcaggaaaaagaagctaatggtctggacccggaagtgctggcggagattaaccgcgaacgcgaggccttcctggcagcacagcagggaagtacttcaacggagttgtttaccaccattgaaggcaactacgctgatgctgtgcgcctgctgacgactgctcatagcgtaccgtttgacggtaaagcgacgctgtttgttgctgaacgcacacttcaggaagatgtgttcgatgctgtgtacctgtgctcacagaggtctactttttcgcgaaaacgtagatctctaccgcccaacgaaaagcatgaaagcgatcacgaatcccattgggtcgtcatgttctgccgatcgcatcttcctatcctcgctccaggcctgccgcataaccaatcaggcttcctacttacagaattgagaaaagaggatgtggaaatgctcagtcaaattcaacgctttggcggcgcgatgttcacgccagtgctgctgtttcccttcgccgggattgtggtgggtcttgccatcttgctgcaaaacccgatgtttgtcggggaatcactgaccgatccgaacagtttattcgcgcaaatcgtacacattattgaagagggcggttggacggtattccgtaatatgccgctgatttttgctgtcggtttacccattggccttgctaagcaagcgcaggggcgtgcttgtctggcggtgatggtgagtttcctgacctggaactatttcatcaacgcgatgggaatgccggccccgtgttccgtgcccttgccctatgtggttagccggcacctgccgacgtccgcctgcagtttccaatccggaggcgtcttctccctcagtcgttccctcgatgtacggataaccttcagaggtttaccttcctggaccgccctggatcgtagatactcatacatcgcccccatcagtaaacaacaggaacacacagatccaaaccacatccaggaagtgccagaacaggctcaggcacatgatgcggatttccatcccgataaatccggcaccaaacaaccaggtcaacgccagccaggagataacctggcttttgttgtttttgtacatggcgatagccgccatgccgtaggtgatggagctgaacaacagcaagaaagtttcaaccagaacgaacggcagttcgaaaatgtccttacctgtcgggccgcctgcggtgccgttcaccagaacggcataggtagcaaacaagatagagaacagaatgcagtcgctcatcaggtagatccaaaatccgaagattttggttccgcctgcatcgtggtgcccgtgttcgtgcgcgtgggcagtcgcgtacgatacctcgaaagatgccgtcctgcgtcgcgaaatgcgtcagatggaaggtgcatggctggggagcgatctggtcgatcaggtaaggagcgtctgaatcgtctgggcttctttgaaactgtcgataccgatacccaacgtgttccgggtagcccggaccaggttgatgtcgtctacaaggtaaaagagcgcaacaccggtagcttcaactttggtattggttacggtactgaaagtggcgtgagcttccaggctggtgtgcagcaggataactggttaggtacaggttatgctgttggtatcaacgggaccaaaaacgattaccagacctatgctgaactgtcggtaaccaacccgtacttcaccgtagatggcgtaagcctcggtggtcgtctcttctataatgacttccaggcagatgacgccgacctgtccgactataccaacaagagttatggtacagacgtgacgttgggcttcccgattaacgaatataactcgctgcgtgcaggtctgggttatgtacataactccctgtccaacatgcagcctcaggttgcgatgtggcgttatctgtactctatgggtgaacatccgagcacctctgatcaggataacagcttcaaaacggacgacttcacgttcaactatggttggacctataacaagcttgaccgtggttacttcccgacagatggttcacgtgtcaacctgaccggtaaagtgaccattcctggatcggataacgaatactacaaagtgacgttagacacggcgacttatgtgccgatcgatgacgatcacaaatggttgtttggggcgtacccgctggggttatggtga

SEQ ID NO: 136795 - DNA, 2430 bp, Homo sapiens
ttatccttcaacctgcgtccggagcgatgattttgtacgtttatgaatgagtccggcgctttcaaaaagccagtacaacagttttgcgatcatcagacatgcgccgaagaccacgataaaaaagaccacgcgtgagacaaacgaatccagcccttcacgcgccagcacgatcatattgaagatcgccccaaagcagaaactgtgcaatatcgcagctttatagcgattaggctcgcggttgcccagctcatacagccagtcgaaccatttgatgatcagaccaaccacgatcgccccgagcgggatgaacaacgcgccgcccatcaccaccagtgagcctataagcgtaggcgagatcgccagtccggagtggttattcagcacttcccaggtaaagtagttggctgagttcagcaccatactcgggcgacccggccacagccaggaagggataaagacatagaaatcgcggacaattggagccaggccctggaagtcgatgttgtcgtagttctgcaacagcaacgccagattctcccacggcgagaaggtgtcgcgagtgagatagagaaacgtatagaacgcttcatcgccgctcacattcattccatagcgttttagtgccagccagaacatgccaacaatccccagcacgcccgccgccgccagcatccacaacgaaatccagccgcgaataatgccaataaacaggaagatagcgaatgcgatgatgatattggcgcgagtgccgccgacaatcatataagtcagcaagccaaaggcgaccgtgctgacgaggaaaaacagccacgctttgctgtcctggcgcagaaagtagaccaccagcatcgccgggatgaaaaagtaaaagaagcgttttaacgccacgccggagacttcactggaaaagatctgactgtaggagttaagccggaacagcaaaaagccgttgtgcatgaagaagatgccgacgcttaccagcgcgatacccatcaggatcacccacgtaagattggtctccacgcggttcatggtaaacagcggacggcgcggtacatcagcaacgcgtttgcgtaggcgggttttgtaggtgacatagtaaaccgcgtagaagcagcccgcagaaagcaacgcctgcaacaagatttctggcggcgtaggctgggactggggctgggaaggaggagagccggagccgttatcaccgaacatcggttttggcataaaggtcgcggttttaccgaagcggtgcgctacgttgtgcacaacatatttgtagatctgaatttcgtcagcttttttggtcatggtattgaagcgggtagccacttcgttctgaccagcagtcgctacttcgtggtgatgggcttcaaccaccagacccatctgttccatcaccagacacatttcagaacgaatatcctgagccgagtctaccggtggaaccgggaagtaaccgcctttcactgccggacggtgacctttgttaccaccttcgtattgggtggaggagttccatgcgccttcgatatcgtcgatagcaacgtgggaaccggagatagatgatccgaaacggatgtcatcgaacaggaagaattcaggttctggcccgaacagtacggtgtcggcaatgccagtggaacgcaggtaatcttcggcgcgcttcgcaatggagcgcgggtcacggtcatagccttgcagggtgccaggttcaaggatgtcgcaacggataatcagggtggagtcggcgaagaacgggtcaatcactgcggtggatgcgtctggcatcagcaccatgtcggactcgttaatgcctttccagccgccaatcgaggagccgtcaaacattttgccttgcctgtagcgtgtttcaatcagcgtggcaaccgtcatcgggccaacgccgccgggaacaggcgtaatgtatgaggcgcgtttagccgcgtcttcaaacacgacgtcgcccacaactttgccattttccagacggttgatgccgacatcaatcacaattgcgccttctttgatccagtcaccgggaataaagcctggcttgccaacggcaacgatcaatagatcggcattttctacgtgatgacgcagatttttagtgaagcggtgagtcactgtagtggtgcaacctgccagcagcagttccatgctcatcgggcggccaacgatattcgatgcgccaatcaccacggcgttgaggccgaaggtatcaatgttgtaacgctcaagcagcgtgacgataccgcgcggggtgcagggacgcagacgcggcgcgcgctggcacagacgaccgacgttgtaaggatggaaaccgtccacgtctttgtccggatgaatacgttccagcactttgacgttatcaatacccgccggtatacggcagttgaaccagaatgccatcgatggtgttgtcggcat

SEQ ID NO: 136796 - DNA, 1146 bp, Homo sapiens
gctgtgcggctccgtggttaccgtggcaacagacggcaacaactcgggcggcgcatggaaagtgcgggcggcttcaaactgggtatggagcccctcaacggcggcgggaggatccccgatttgcttggcggccaaatccagaccgcctcacgcagccaggcactatttgaagctattcgcgattatatcgacgaacgctatgcctccgggcttacccgcgaatctgttgcacaggcgttttatatttcgccaaattacctctcgcacctgtttcaaaaaacgggggccattggttttaacgaatacctgaatcacacgcgactggagcacgctaagacgttattgaaaggctatgacctgaaggtaaaagaagtggcgcacgcctgcggctttgtcgacagcaactacttctgccgtctgtttcgtaaaaacaccgaacgctcgccgtcggaatatcgccggcagtaccacagccaactgacagaaaaaccgactactccagaataagatgggtttgctgcggcgcagaaagactttgcgcaccgcgctcattacccgctgcggctcacgcaggaatgcgtgatgcgacacgcgcaggttggcgcaactcttacggatggtgagaaaaggggtaaagattgcgatcctaccaattctcttgccgctaacgatgttgctgtcgtccatgccggatacggcgctggcgcaaaaaattgctccggtgacacagtacatcttgtatgccgatgcggtgtggctaggtgttgtgttgcgtttcgtggtatctggttttgtgttggtggtggtctcatttgtaggtggcgctgagcggagacgagagccgctggggtccttttttttttgctgtccttctggggtggtggtccgtcggatggcgcgtggtgtccgcggacgctctgagtctgtgtggttgtcggtttccaggtggagtggtcgggagttggttgtcgggtctgctcccggacagtcgggcagtgacacgggggcgtgcggtttcttatgctggtcctggtgactagagggcttccgtacccgggcatgcaggcagcttgtgcagtttcgacgggtattcaccgcggcggtgcatgccatgtcggcggctttcatcgaatcttgccaattcat

SEQ ID NO: 136797 - DNA, 3947 bp, Homo sapiens
  misc_feature (1)...(3947): n = a,t,c or g
tcatccagcagtggaaggggggaagcgcagcacacggcagtttggtgattgttcactttccacacccgcaggcagggcgttatccagtagtgccaggagggcttcgccgttgccggaaagtgcctggattgtgacagtgtcacctaaagctgtaatgcgcagcgcactgtctaccagcagcaggctttttaaatcatctttgctgtcgatatctgcggattccagcagcagcgttgccggacgatccccacacaagcgcaagcgaaagtcccagcgatatccgggcgacgacggtgccaggaagccaccgctggcagcgtcgatgtgcatgtcgatgtcgataccggtatcggcctggaatttatccagcgcatcgtgcagcggttgtgggaactcatagttaccagtgtaggtcacgccgaaagtcggcaccacgccgatggtgttttcgtcacaggcttcaatcatgcgtttcgggtccataaacaactgaccggggcgcatagggatctcacgcagctccacatcccagtagcgggcgaatttatgccagcagatttgtaccggaccgcacaccaggtttggtttatccgttggtttgcctgcagcttccatacgcttgcgccaacgccatttcatcgccatcccgccgagcatacaggcctcggaagaaccaatggtgttggtgccaacggcctgaccatttttcggcgcaggcgcatgccacagatcggcaaccatatttacgcaacgcaggtcgatggctgcggattgcggatattcttctttgtcgatccagtttttgttaatggataaatccatcaatttgtggacattttcgtcgtcccaggtcagttcaggatcgagcgccgaggtaggttcatcaaacagtaaaacttccggttccatcgccagcgcccgcgcgatagaaacacgctgttgctgaccgccggaaagatgcaccggatatttcccctgcgcacgttcgtctatcccgacttttgccagatacttcaccgcccgctcgcgcgcttcctgcttgctcaggcccaacacctgaatcggcgcttccatgacgttttccagcaccgtcatatggctccagagattgaagtgctggaataccatcgtcaggcgtgtgcgcagtaagcgcagttgatttttatcggcgactttgagttgaccgtctttgtcgcgcaccagattgatcgtctggccattgaccacgatcgacccttcactcggtttttcgaggaagtctttagagcacagggcgatatactcactgcgaagcgtctcatgcctggtcgcatctacagattgccgtgcattgtgctcctgttggtgttcctcgtccataaagatcacccgattcgccactttacgggcaaagcccatttcgtgggtcaccaccatcatggtcattccttcgttcgccagttccaccatcacgtccagtacttcgttgatcatctccggatccagcgccgatgtcggttcgtcaaacagcatcgcaataggatccatacacaacgcgcgagcgattgccacacgctgctgctgaccgccggaaagctgcgccggaaacttattggcgtgagcagaaagcccgacacgctccagcagtttcagggctttttcacgagccggcgctttatcgcgtttaagcactttcacctgcgccagggtcaggttttcgataatcgacagatgagggaacagctcgaaatgcgggcccgcttcagagttgagcgcaccgtcaagcattgcggtcacggcatagcgccctttagatgtcagtttcatgtcttccttcacctcaaactcgcccttgactgatttagtcgggtatttaaccttcagtgccatttttttatcgtggcgtttgtccctgttgtcggatgcggcgtgaacgccatatccgccctggggttctgtacactgtaggcggttctgttcactgtaggcctgataagacgcattacgcgtcgcatcaggcaacggctgtcggatgcggcgtgaacgccttatccgacctacggttctgttcactgtaggcccggcaccctgcggcacattgccgctgatcaccatgtccacgccgccgaagctgttgttacgcagttgcagatgtttcaccacgccacgaacgtagttagcccattgatagttttcatgtgcgacaatgggcgcatcgagggaaaactcgtcgagctgattttcataatcggctgccatcacgcgaactttacggtcatcgcgtggtgcacaactggatttgccccttatgcggaacatatgcttgaagtgatgtcttctattggcgattatacaaaccgcgtccggcatcacgtccggtgacgaaatttgatcaacgtggtcatcgtcttggtcacggagtatggaacttaatgttcgagagggtgaaataatggcaaagaaccgtagccgtcgtcgaacaaactggcctttgacggcagcggttatctggcctgggaaggtctgatctgcatgcaggaaatcggcaaatgcaccgaagaacatcaggcgattgtgcgtaagtggctggaagagcgcaaactggatgaggtacgcaccagcgaacttttcgacgtttggtgggagttgcaacaacatcgacttgatatggccgatggcgcgcgtcgggttcagccccttcggacatacactgacgcagttcatgatgctgtgacagcggaatacgctgaatgcatcactcaaaccgtcgaggcggctgtcagtctcggtatcacggctatcaatcaggaaacgatatgccgctaacaagctggtgttgggtgccgctcgcgtctggttattcccccatgccgatggtgctgtcgataacagcatgatgtgggtggtgtcgatggcggtagcaggatgcttgtttgtcattcccacggcagcagaaattccgattgtacaaacgatgatgctggcaggtatgggaaccgctccggcgctggcattgttgatgacgctcccggcagtgagtttgccgtcactgattatgctgcgcaaagcgttcccggcgaaagctttatggctgacaggggcgatggtggcagtgtctggtgtgattgtcggcgggctggcgctgttgttctgatttgagggaaaacatgtcggatgcggcgtaaacgccttatctgacctacggtttgtatcgttgtaggcccgcaacgacatctctgaagttgttgattcccctggtgctagcgcaatgagatcacccccttccgggcgatgatgatcatccggcgcatggctcatcggttccagacagaagaaatcaaacgcatatcctttatcaaacgcagggtcggaaacaaagatgaaattaaccccggtgccaggtggcgtcgtttccatgatgatggcataaccttcctgcggctgctcgatgcgggcctgaccattccatccggcaaaaccattgttcacccactggcgcggcaacggcgcgggctggttaaaatccagttcctgcggtagctgctcgcaaaactcacccgccagccactgctcccgctccagccagtaaccgctcgcctgtgcctgaatccgcgtttgcggcgacaacggaaaataaggatgccagccggtaccaaatggcagcgtctctgccccttgattggtgacagatagcgtcaccgtcagcgttccgccgtttatgntctttctgtacggcacaaccctgtacaccatatattgagaaaaaacggcgacatgtactcttttccgataacgattggcaataacgtctggatcgaaagtcatgtggttattaatccaggcgtcaccatcggggataattctgttattggcgcgggtagtatcgtcacaaaagacattccaccaaacgtcgtggcggctggcgttccttgtcgggttattctcgaaataaacgaccgggataagca

SEQ ID NO: 136798 - DNA, 1797 bp, Homo sapiens
tcagcacacgcagccggtccggctatggcggcggcgagtgcagggaggcgaggagttggtgagcgcgaggagtggcagcgcagtagtggcagggtgtgagtatgaccggcacgagatggcgtagaggagggagatgcgcgcgatcaggcgccgagtgcgccagtgcagcgctgcggcgagctcgttgtgaccaccaatattataggtttcaccgactttcccggtggtcgccacgcaatacagcgcgcgggcgtgatcttccacatacagccagtcacggatttgctgcccgttgccatataccggcagcgatttacccgccagcgcgttgaggatcatcagcgggatcagtttttccggaaagtggtaagggccgtagttattcgagcagttggtgataagcgtcggcagaccataggtccgcagccaggcgcgcaccagatggtcgctgctggcttttgacgcggaataagggctgctcggcgcatacggcgtggtttcggtgaagaaatcatccgtcgagtgcaggtcaccatatacttcgtcagtggagatatgatgaaaacggaacgctgattttttatcttccgtcagcgcattccagtaagcccgcgccgcttcaagcaatgtataagtcccgacaatgttggtttcaataaacgctgccgggccgtcaatagaacggtcaacatggctttcggctgccagatgcatgacacagtctggctgatgctcacgtgaatacgcgtgccagttctgcccgatcgcagatatcaactttctcaaaggcaaagcgctcgcggcgctggagcaacggtagttcccggcgatgtgctgtacgttcctgctggtggctggaattttccacaatggcaagcccccgctactacctttagcgtgctgtttggcaaacagcaactcggcttcagcgtcgtgcaatgggatggcaaacaatatcaaaatctggcgaagcaacacgtcgcccgacgcggcccacgcataggttcttttctgaaggtaaaagaagtggcgcacgcctgcggctttgtcgacagcaactacttctgccgtctgtttcgtaaaaacaccgaacgctcgccgtcggaatatcgccggcagtaccacagccaactgacagaaaaaccgactactccagaataagatggttgcggagcggaagtaaggcacaaaatctttgttttcacgtacgtagccgcggtagacatcgcaggagatgactgacagttcatccataatgcgacgccagctctctttcggctccggcggtggcagcaggttggcttccagaatcgccccggtataaagcgacaggctgctgacggtgatttctggcagaccatatttaaagcggatcatctcgccctgttcggttacgcgcaggccgcctttcaggcttcctggcggttgtgacagcagcgccgcatgagcaggtgcgccgccgcgaccaatggaaccgccgcgaccgtggaacaacgtcagctcaatacccgctttttcgcaggttttgattaatgcatcctgtgcctgatattgcgcccaggaagctgccatcactcccgcatcttttgctgagtcggaatagccaatcatcaccatctgtttgccctgaatcaggccacgataccagtcaatattgagcagctgggtcatgacatcgttggcgttgttcagatcatcgagggtttcaaacagcggagcaaccggcatcgcaaacccgatacccgcttctttcagcagcaggtggacagccagtacgtcggacggcgttttcgccat

SEQ ID NO: 136799 - DNA, 3038 bp, Homo sapiens
gggtgcctcattcgggtcagccggtggtctgtttccccgcgcaggccgcgccaaaaggaatcaaggggaagtccacgccggggtgtaaattgtgggttactgttccaaattcatgcccgcaaaaaaaaacttgcgcatctgcgcaggctggtgtaattcatgggcccaaccgaaagttgacttcacctatcaatacctctgggatcaccactttagcaacctgaagccaaacgccaccagcggtcaatcgcaacagcgtttcgcaaagtgtaaccaaaggtttgcaatctctttttttgtcttacttatttgcgtttggctcacattcccacgatgaaaacacgccaccccttgaaccaacgggcgttttccgtaacactgaaagaatgtaagcgtttacccactaaggtattttcatggcgcccataaaggatgtagcccgactggcaggcgtttcagtcgccaccgtttcccgcgtcattaataattcacccaaagccagcgaagcttcccggctggctgtgcatagtgcaatggagtctcttagctatcacccgaacgccaacgcccgtgcgctgggcgcagcagaccactgaaacggtcggtctggtcgttggtgatgtttccgatccgtttttcggtgcaatggtgaaagcggtcgaacaggtggcttatcacaccggtaattttttattgattggcaacggttaccacaacgaacaaaaagagcgtcaggccattgagcaactgatccgtcatcgctgtgctgcgttggtcgtccatgccaaaatgatcccggatgctgatttagcctcattaatgaaacaaatgcccgccgacaaacagtgcgagagtattccagaccaaaacaaccagacaggcacccagtacccaagaggcaaggaacccaaattacttcggcggttgatgcacatgaaccgaaaagtgggcccaaggggacccaggcggatgctgcttcgctacctggacgtggagtttctgagcgtcgctctggcggttgtgcacctgggtccccaggggacatgcagcaggctcttcctggtggcccgggcccttgtggtggctgtctcagaaatggacaagtcgctgtcagcacaagctcagatttactttgccagcagtaacggcccggtgcccgatcttgcgtatcaggtcgattttccacggctggaaattgggctgtaatttgtaatacgttgataccggcgctgaaacaacgctagttcccggcgatgtgctgtacgttcctgctggaggctggaattttccacaatggcaagcccccgctactacctttagcgtgctgtttggcaaacagcaactcggcttcaggcagtcgtgcaatgggatggcaaacaatatcaaaatctggcgaagcaacacgtcgcccgacgcggcccacgcataggttcttttctgctacaaacgctcaatgaaatgcaaatgcagccgcaggagcagcaaacggcaaggcttatcgtcgccagcctgcttaaccactgccgcgatttgcttggcagccaaatccagaccgcctcacgcagccaggcactatttgaagctattcgcgattatatcgacgaacgctatgcctccgcgcttacccgcgaatctgttgcacaggcgttttatatttcgccaaattacctctcgcacctgtttcaaaaaacgggggccattgggtttaacgaaaacctgagtcacacgcgactgggacacgcttagacgttattgaaaggctatgacctgaaggtaaaagaagtggcgcacgcctgcggctttgtcgacagcaactacttctgccgtctgtttcgtaaaaacaccgaacgctcgccgtcggaatatcgccggcacaggcggttacatgacaacaggatatgccaatttaaaactcccacggataaccctgaaaatccggaccgatatctgacatttcgccgcatcgataaagagacatccagtctccctaaaaaagtggctccatcatgcaaacgattatccgtgtcgagaagctcgccaaaaccttcaatcagcatcaggcgctgcatgcggttgatgctgattgaagggcgacgttcatctttcattcatccggacaaagacgtggacggtttccatccttacaacgtcggtcgtctgtgccagcgcgcgccgcgtctgcgtccctgcaccccgcgcggtatcgtcacgctgcttgagcgttacaacattgataccttcggcctcaacgccgtggtgattggcgcatcgaatatcgttggccgcccgatgagcatggaactgctgctggcaggttgcaccactacagtgactcaccgcttcactaaaaatctgcgtcatcacgtagaaaatgccgatctattgatcgttgccgttggcaagccaggctttattcccggtgactggatcaaagaaggcgcaattgtgatgatgtcaggcatcaaccgcggtgtggcaaccgatgcctcatgttttccgctggtgccatttgcaaaccgggtgagcggcaatcgttttgtctggcaggggcgtgagtatcaactgcaaccgaatgttgagtgggatgcgcactatctacacggcgatggctggctgggcgagtggcaatgtgtctcgcacagcgatgatagtttgtgtctggtgtatgaacatcgcagcggtgtctatcactatcgggtaagtcagggcgtttcatttaacggcggatacgctgacggtgacgctctctgtcaccaatcaaggggcagagacgctgccatttggtaccggctggcatccttattttccgttgtcgccgcaaacgcggattcaggcacaggcgagcggttactggctggagcgggagcagtggctggcgggtgagttttgcgagcagctaccgcaggaactggattttaaccagcccgcgccgttgccgcgccagtgggtgaacaatggttttgccggatggaatggtcaggcccgcatcgagcagccgcaggaaggttatgccatcacactggactagggatctcgat

SEQ ID NO: 136800 - DNA, 509 bp, Homo sapiens
gaaagccaagcccaagaaatgtgcccggcgtttcaccgactactgtgacctgaacaaagacaaggtcatttcactgcctgagctgaagggctgcctgggtgttagcaaagaaggacgcctcgtctaaggagcagaaaacccaagggcaggtggagagtccagggaggcaggatggatcaccagacacctaaccttcagcgttgcccatggccctgccacatcccgtgtaacataagtggtgcccaccatgtttgcacttttaataactcttacttgcgtgttttgtttttggtttcattttaaaacaccaatatctaataccacagtgggaaaaggaaagggaagaaagactttattctctctcttattgtaagtttttggatctgctactgacaacttttagagggttttgggggggtgggggagggtgttgttggggctgagaagaaagagatttatatgctgtatataaatatatatgtaaattgtatagttcttttgtacaggca

SEQ ID NO: 136801 - DNA, 465 bp, Homo sapiens
ggaggcaggaggccacgaattcggcacgagcgagacccgaccctgggcgtggtgcatcgaggtagatgcaaagatgctggccagagcaagtgtcgcctggagcgggctcaagccctggagcaagccaagaagcctcaggaagctgtgtttgtcccagagtgtggcgaggatggctcctttacccaggtgcagtgccatacttacactgggtactgctggtgtgtcaccccggatgggaagcccatcagtggctcttctgtgcagaataaaactcctgtatgttcaggttcagtcaccgacaagcccttgagccagggtaactcaggaaggaaagatgacgggtctaagccgacacccacgatggagacccagccggtgttcgatggagatgaaatcacagccccaactctatggattaaacacttggtgatcaaggactccaaactgaacaacaccaacataaga

SEQ ID NO: 136802 - DNA, 577 bp, Homo sapiens
gaagggtgataaaacatagaagatttaataagagaaccaggggctccattcacctctcatggtccctcaggtcacatatgaaagcatttttacaagataggacctggaattcctcatttctcccatgttcctgcatgatcttaaacttcatgaagctatttttccagccctatggggtagttcttgctccaagtaagaggaatcttagttgtcataatcccttggagcctgggtttttggagaaagagatctccgtgcccttacagccctttttcttcaacggaatgtgggaagggacctggctttaaaacacggcacacaaacacacaaataaacaggacataagatgtcatcacgaaactgcccacggatctttaggcctttcttgcattggacataaatacattttctaagggggggggggaagaaattaaaaaacacctgttaattttaaacacattttttaagaaaaaaataattaaaaaagaaacagtgctcatgtcataagctatgttgacagttgccagtggaaatgttgggttggatcaaaaataaaataaaagttgacccggtcgca

SEQ ID NO: 136803 - DNA, 2926 bp, Homo sapiens
atggagcatccgcctgttctggcagtccaaagagtggctttgccatcccgttcctcagaacccgagctgttcctcaaccctccaacagatgaggaaactgaggctcatagaggtatgtatcttgatcaaggtccaaggaccaaggactggatcccagtggcacctggtgtaagagagccttctcccctgggccctggcccatcatccctgtggctgctggtggtggggggcacagtggaggagggaagtcggaaacaccggcccacctgcaaaaaggacttcacaaagtcaaaaactgttgaccaagcacctactctgtgtgccagacaccagatgctgaacatccagtttctaataagtgaccgtgacccacagtgcaacctccactgctccaggactcaacccaaacccatctgtgcctctgatggcaggtcctacgagtccatgtgtgagtaccagcgagccaagtgccgagacccgaccctgggcgtggtgcatcgaggtagatgcaaagatgctggccagagcaagtgtcgcctggagcgggctcaagccctggagcaagccaagaagcctcaggaagctgtgtttgtcccagagtgtggcgaggatggctcctttacccagaacacaagctgcattcattcatcagtgtatcaaattggagagaacagcagcctcacatttctggagaaaagagaagaaagtgggcacctgcagagagactggtttcctctctggtttcctaggaaagcaagggtgattggtaggagagtgaaagaagaagcaacaaagaagcgagtctgggaggtgcagtgccatacttacactgggtactgctggtgtgtcaccccggatgggaagcccatcagtggctcttctgtgcagaataaaactcctcacatccagattctcttcactaaggcgaggctggctttgtgggcatgcgacctgtgcagttgctatcctgaaattctgaataattctgtctttgagtctgatgggacagtgaagatgcgattgcagggagaccaaggtaaagccctgggccctgcctccagtgcttatgccatgggatgggaagaagaggcgaagtcacccactctgaatgcaggagataaggatctggagaacctgctgcccccaaatgcaggtgctccaaagaagatgtggaagtggaacaggtgataccaccacccaccagaaaacagggaccaatgggccagatgggctactgctctttccctgggcaaaaatgagaaagtggttggaaagggaactcaaggatgtgagaactgcctgcaaaaaggcagctttcagcttgttttcacttcttttgggagggaacatgcagcctggcatttatctctcctcgccagcgaatgtcaatcaggaatcaaaaagccaaacagaggaggctttgaacggtgtcatcgggggtcgaagtgacttccagctgtctgtgcatgacgggtctaagccgacacccacgatggagacccagccggtgttcgatggagatgaaatcacagccccaactctatggattaaacacttggtgatcaaggactccaaactgaacaacaccaacataagaaattcagttaacttcttccatgatctgatcaagggcctcaaggaggccctagaccctggccctctcatggtgactctgctccctggagatacagccatcagcacagacataaggtggaaatgcatttcttttaagttttaccatgaaagtgacaccctggcctcctcgtgcatgactgtgactgtgttttctcatgtcaccttacctgtcacaggaactcagtctctgcgtgggaaggaagcggtcaccacttcagaccatgagaaagtctattcgtgtgaccaggagaggcagagtgccctggaagaggcccagcagaatccccgtgagggtattgtcatccctgaatgtgcccctgggggactctataagccagtgcaatgccaccagtccactggctactgctggtgtgtgctggtggacacagggcgcccgctgcctgggacctccacacgctacgtgatgcccagttgtgagagcgacgccagggccaagactacagaggcggatgaccccttcaaggacagggagctaccaggctgtccagaagggaagaaaatggagtttatcaccagcctactggatgctctcaccactgacatggttcaggccattaactcagcagcgcccactggaggtgggaggttctcagagccagaccccagccacaccctggaggagcgggtagtgcactggtatttcagccagctggacagcaatagcagcaacgacattaacaagcgggagatgaagcccttcaagcgctacgtgaagaagaaagccaagcccaagaaatgtgcccggcgtttcaccgactactgtgacctgaacaaagacaaggtcatttcactgcctgagctgaagggctgcctgggtgttagcaaagaagggcggcagaaaaaagcccctgtggtcaatggtgtgcaggggctccgggagcagagcctatgcgtcggtcatccatcccgtgtcgtgcggtgccccctggtggtagccttggcagtttcccccaggcaaaatgagcaggcacaaacccattcactggagtctgtcacggccaatgcctttctgatacagaaacctccttcctccataattaccacagcttttactactacttacatcttccaacttcgcaaagtccaggttttgacaagtggcattttcctgaagtatttttgcttagaatatactgggtctgacacattggcacctgagtgtgagaggagaaaatgtatttatgtcaatgcagaaagcctaaagatccgtgggcagtttcgtgatgacatcttatgtctgtttatttgtgtgtttgtgtgcgtgttttaa

SEQ ID NO: 136804 - DNA, 5298 bp, Homo sapiens; identical to SEQ ID NO: 134169

SEQ ID NO: 136805 - DNA, 1819 bp, Homo sapiens
gggtcaccgttcgaggtaatgccccgagatgacgtgttctttatcgtggatgtgaagatttaggacattggggtatacagctgcacagctcagaacagtgcaggaagtatttcagcaaatgcaactctgactgtcctagaaacaccatcatttttgcggccactgttggaccgaactgtaaccaagggagaaacagccgtcctacagtgcattgctggaggaagccctccccctaaactgaactggaccaaagatgatagcccattggtggtaaccgagaggcacttttttgcagcaggcaatcagcttctgattattggggactcagatgtcagtgatgctgggaaatacacatgtgagatgtctaacacccttggcactgagagaggaaacgtgcgcctcagtgtgatccccactccaacctgcgactcccctcagatgacagttctccattgttagacgatgacggatggggccactgtgggctgtacgtgatcatagccgtggtttgctgtgtggtgggcacgtcactcgtgtgggtggtcatcatataccacacaaggcggaggaatgaagattgcagcattaccaacacagatgagaccaacttgccagcagatattcctagttatttgtcatctcagggaacgttagctgacaggcaggatgggtacgtgtcttcagaaagtggaagccaccaccagtttgtcacatcttcaggtgctggatttttcttaccacaacatgacagtagtgggacctgccatattgacaatagcagtgaagctgatgtggaagctgccacagatctgttcctttgtccgtttttgggatccacaggcccctatgtatttgaagggaaatgtgtatgggctcagaatcctttttgaaccatatcattacaggggtgcagtctggacccaaaaacaggtttaaagggaccacctatgagcccagttaccttaaagaaaaaaggatggctacccagtgttctcatcctttcagaaggaatcctggcggaacgggagctttcagtaatatattggggccccttttggggcccatgggaggaagctactttaacactagtttactctcaacatggaaggaccctggaaatggaaaaatctgtgtctaaacaagtcctctttagattttagtgcaaatccagagccagcgtcggttgcctcgagtaattctttcatgggtacctttggaaaagctctcaggagacctcacctagatgcctattcaagctttggacagccgtcagattgtcagccaagagccttttatttgaaagctcattcttccccagacttgggactctgggtcagagggaagatggggaaaggaaagggacagatttttcagggaaggaaaattcacattttggacctttaaaacagactttaaaaaactacaggactccaaattttcagtcttatgacttggacacatagactgwaatgagaccaaaggaaaagcttaacatactacctcaagtgaacttttatttaaaagagagagaatcttatgttttttaaatggggttatgaatttttaaagggataaaaaagctttatttatacagatgaaccaaaattacaaaaagttatgaaaatttttatactgggaatgatgctcatataagaatacctttttaaactattttttaactttgttttatgcaaaaaagtatcttacgtaaattaatgatataaatcatgattattttatgtatttttataatgccagatttctttttatggaaaatgagttactaaagcattttaaataataaaaaaaaaaaaaaaaa

SEQ ID NO: 136806 - DNA, 2948 bp, Homo sapiens
atgagcgcgccgagcctccgtgcgcgcgccgcggggttggggctgctgctgtgcgcggtgctggggcgcgctggccggtcagacagcggcggtcgcggggaactcgggcagccctctggggtagccgccgagcgcccatgccccactacctgccgctgcctcggggacctgctggactgcagtcgtaagcggctagcgcgtcttcccgagccactcccgtcctgggtcgctcggctggacttaagtcacaacagattatctttcatcaaggcaagttccatgagccaccttcaaagccttcgagaagtggctggaaacaggattgttgaaatactccctgaacatctgaaagagtttcagtcccttgaaactttggaccttagcagcaacaatatttcagagctccaaactgcatttccagccctacagctcaaatatctcgaattgaaccgaaacaagattaaaaatgtagatggactgacattccaaggccttggtgctctgaagtctctgaaaatgcaaagaaatggagtaacgaaacttatggatggagctttttgggggctgagcaacatggaaattttgcagctggaccataacaacctaacagagattaccaaaggctggctttacggcttgctgatgctgcaggaacttcatctcagccaaaatgccatcaacaggatcagccctgatgcctgggagttctgccagaagctcagtgagctggacctaactttcaatcacttatcaaggttagatgattcaagcttccttggcctaagcttactaaatacactgcacattgggaacaacagagtcagctacattgctgattgtgccttccgggggctttccagtttaaagactttgatactccaaggaaatcggatccgttctattactaaaaaagccttcactggtttggatgcattggagcatctgcatttaaatacatcaagccttttgtgcgattgccagctaaaatggctcccacagtgggtggcggaaaacaactttcagagctttgtaaatgccagttgtgcccatcctcagctgctaaaaggaagaagcatttttgctgttagcccagatggctttgtgtgtgatgattttcccaaaccccagatcacggttcagccagaaacacagtagagaaataaaaggttccaatttgagtttcatctgctcagctgccagcagcagtgattccccaatgacttttgcttggaaaaaagacaatgaactactgcatgatgctgaaatggaaaattatgcacacctccgggcccaaggtggcgaggtgatggagtataccaccatccttcggctgcgcgaggtggaatttgccagtgaggggaaatatcagtgtgtcatctccaatcactttggttcatcctactctgtcaaagccaagcttacagtaaatatgcttccctcattcaccaagacccccatggatctcaccatccgagctggggccatggcacgcttggagtgtgctgctgtggggcacccagccccccagatagcctggcagaaggatgggggcacagacttcccagctgcacgggagagacgcatgcatgtgatgcccgaggatgacgtgttctttatcgtggatgtgaagatagaggacattggggtatacagctgcacagctcagaacagtgcaggaagtatttcagcaaatgcaactctgactgtcctagaaacaccatcatttttgcggccactgttggaccgaactgtaaccaagggagaaacagccgtcctacagtgcattgctggaggaagccctccccctaaactgaactggaccaaagatgatagcccattggtggtaaccgagaggcacttttttgcagcaggcaatcagcttctgattattgtggactcagatgtcagtgatgctgggaaatacacatgtgagatgtctaacacccttggcactgagagaggaaacgtgcgcctcagtgtgatccccactccaacctgcgactcccctcagatgacagccccatcgttagacgatgacggatgggccactgtgggtgtcgtgatcatagccgtggtttgctgtgtggtgggcacgtcactcatgtgggtggtcatcatataccacacaaggcggaggaatgaagattgcagcattaccaacacagatgagaccaactttgccagcagatattcctagttatttgtcatctcagggaacgttagctgacaggcaggatgggtacgtgtcttcagaaagtggaagccaccaccagtttgtcacatcttcaggtgctggatttttcttaccacaacatgacagtagtgggacctgccatattgacaatagcagtgaagctgatgtggaagctgccacagatctgttcctttgtccgtttttgggatccacaggccctatgtatttgaagggaaatgtgtatggctcagatccttttgaaacatatcatacaggtacctttggaaaagctctcaggagacctcacctagatgcctattcaagctttggacagccatcagattgtcagccaagagccttttatttgaaagctcattcttccccagacttggactctggtggttttatgattgccttgtggtaccacgggactcttagtccagaaccagcttttgtattaaaagctagggatgatgtaggtacctgtcatagtcatagagctggccagcattggctcaagtactacctccttcaagcactctcttttcatgaagaatgtgaagaaataaacccggaaattgaaacacaaatacaggaaattccaggctccaggataaggaacacagaaccattcaaagaacctattttaccttctagtgtcaacctggagtctgctacccctgggccatggacaggtagcagtccgaggcctgttggcagctgggccacacagcaggaggtgagcggtggctga

SEQ ID NO: 136807 - DNA, 417 bp, Homo sapiens
ccacttcctgttgcattcgctggaaaatgtggaggacgtgctgtatttctggaagcattccacggtcctggacattggcgagtgcctgacagtgccggacgagttctcaaagcaagagaagctgacgggcatgtggtggaaacagctggtggccggcgcagtggcaggtgccgtgtcacggacaggcacggcccctctggaccgcctcaaggtcttcatgcaggtccatgcctcaaagaccaaccggctgaacatccttggggggcttcgaagcatggtccttgagggaggcatccgctccctgtggcgcggcaatggtattaatgtactcaagattgcccccgagtcacctatcaagttcatggcctatgaacaggtgctgaagacgcggctgaccttgcgccggacgggccagta

SEQ ID NO: 136808 - DNA, 262 bp, Homo sapiens
gtcctggacattggcagtgcctgacagtgccggacgagttctcaaagcaagagaagctgacgggatgtggtggaaacagctggtggccggcgcagtggcaggtgccgtgtcacgacaggcacggcccctctggaccgcctcaaggtcttcatgcagatcaagagggccatcctggggcagcaggagacactgatgtgcaggagcgcttcgtggctggctccctggctggtgccacagcccaaccatcatttaccctatggag

SEQ ID NO: 136809 - DNA, 960 bp, Homo sapiens
atgcgctatcgggcaggtaggtggcgaaatcttgcacgcgtgtggacggcggaaggtaaaaaccctgacggggctgccctagaggggattgagaaagcgggcgggactctgaagaactggtggcttcagcagtacagccacgactcggcagacccaggcatcctcgtgctcctggcctgcggtaccatatccagcacctgcggccagatagccagttacccgctggccctggtccggacccgcatgcaggcacaaggtgagggacccggagcccgtccccccaatccgtcacggcgcacacctcagccactggagactgatgatccaaccacaggatccctactctttggccacgagatcccagtacccagatcctggatcctagactcctatgccccaaccattgggtcatgggatcccagcacccagatcctggatcctagactgctatgccccaaccactggactctgaagaactggtggcttcagcagtacagccacgactcggcagacccaggcatcctcgtgctcctggcctgcggtaccatatccagcacctgcggccagatagccagttacccgctggccctggtccggacccgcatgcaggcacaaggaagccggtggtcatgccatgagcagccttatggagaggaccatgtggtaaggaactcagccaatagccatgtaactgagcttggaagaggatcttgctgtcctggccaacatctcactgcaattctatcagttgaattccctggatagtccaagctttgtggatccctccaccagaacaactggatcccagtacctgaatcctgaatcttagactcttatacttcaaacactgatcacgggaacagccggctcagcagctcctgagttcctaatgctcagaacatggatgagatgataaatgtttgttgtgttaagctgccaacctttggcgggggggtaatt

SEQ ID NO: 136810 - DNA, 1616 bp, Homo sapiens
aggcttgcggccgcgggagctgaccctgcggggtcccggggggggagggggagccgcgaagcccccactgaggccgcgcggtgccgggcctcccctcccccccgggcgggcgccatgcgggggagcccgggcgacgcggagcggcggcagcgctggggtcgcctgttcgaggagctggacagtaacaaggatggccgcgtggacgtgcacgagttgcgccaggggctggccaggctgggcgggggcaacccagaccccggcgcccaacagggtatctcctctgagggtgatgctgacccaaatggcgggctcgacctggaggaattttcccgctatctgcaggagcgggaacagcgtctgctgctcatgtttcacagtcttgaccggaaccaggatggtcacattgatgtctctgagatccaacagagtttccgagctctgggcatttccatcttgttggagcaggctgagaaaaattttgcacaggccgggaccgagacggcacaatgaccattgactggcaagaatggcgcgaccactttctgttgcattcgctggaaaatgtggaggacgtgctgtatttctggaagcattccacggtcctggacattggcgagtgcctgacagtgccggacgagttctcaaagcaagagaagctgacgggcatgtggtggaaacagctggcggccggcgcagtggcaggtgccgtgtcacggacaggcacggtccctctggaccgcctcaaggtcttcatgcaggtccatgcctcaaagaccaaccggctgaacatccttggggggctttgaagcatggtccttgagggaggcatccgctccctgtggcgcggcaatggtattaatgtactcaagattgcccccgagtcagctatcaagttcatggcctatgaacagatcaagagggccatccctggggcagtaggagacactgcctgtgctggagcgcttcgtggctggctccctggctggtgccacagcccaaaccattatttaaccctatggaagtgctgaagacgcggctgaccttgcgccggacgggccaatataaggggcttgctggactgcgccgaggcggtatcctggagagggaggggccccgtgccttctaccgcggctacctccccaacgtgctgggcatcatcccctatgcgggcatcgacctggccgtctacgagactctgaagaactggtggcttcagcagtacagccacgactcggcagacccaggcatcctcgtgctcctggcctgcggtaccatatccagcacctgcggccagatagccagttacccgctggccctggtccggacccgcatgcaggcacaagcctccatcgagggtggccccaagctgtccatgctgggtctgctacgtcacatcctgtcccaggagggcatgcggggcctctaccgggggatcgcccccaacttcatgaaggttattccagctgtgagcatctcctatgtggtctacgagaacatgaagcaggccttgggggtcacgtccaggtgagggacccggagcccgtccccccaatccctcaccccccacacctcagccactggagactgatgatccaaccacaagatccctactcttt

SEQ ID NO: 136811 - DNA, 2130 bp, Homo sapiens
atggaccagagcggcctgctggcacttagagcagctgtgggagcagtggtaggtagcacccttgccgtggacattggcattcttgtgaaggactggcatccacggccgctgggaggcaagcattgccaactcctgggggccttcagatgcaggcaacataggagggggaaagaagagaggagaggggaaaccaaggaaaagaaaggggaaagagagaatgagagagggaaaagaaggagaatagagggggagagagacaaatatgtgaaagaaaatgagaaacaaacatgtgtgcagaaagagagacatagttgtactgggaattcccctaaccatatggccacagtgcaagctgagagaggggcactggacagccatggaggatggcatccctgggattattgtgcagttcaacaagggaggtatcatcagcttcttttgacaaaagaggaaattgaagttcagagaagtaaaaaaatgtgcctgcttcaggctttcctcatctgctgtcaaaaaagtcattttcttggcccaggctgtacaagaagcatggtgccagcatctgcatctggtgagagcctcaagctgcttccccttatggtggaagatgaaggggagcctgtcacagagcgagagcaggaagagggagggggagagagagagagggagagagagagaaagaaggagaaggagaaagagaaagagaaggagaaagaggagaaggaaaaggagaaggagaaggaggaggagaggataagagttcctctccctagggtagaattgaggttgacaaacatagctgctaaacaagtgggcaacaccatcttggatgttgcagctccagctgatcacccctctgaaagcagctgcgtatatgtacgatttgtgataaaaattccagtggctgcatcatttcgtttcaaaaagtcctatgttacaaacaatgtagaaagctgtgaagatggaatacactatttctggaagtctcacatgcactcagaaaacagctgcagctgcaaactgccctgtcctccacatctgcctgctgctgagcgtcttggagatgccttagagccattgctacctacgatgagaagacaacggcaatgccaaaacactggggactgtgacgggcggcgacaaattggcacaagagagactgaaatgcacagggacaccagcctagtggccgtgaaaactcaagttgacacttccagggagggaatgggggaggtggagcccaattcctgcttctggagagacacccacatggcctctggagtgggcgcggccttcgaggaactgcctcacgacggcacgtgtgacgagtgcgagcccgacgaggctccgggggccgaggaagtgtgccgagaatgcggcttctgctactgccgccgccatgccgaggcgcacaggcagaagttcctcagtcaccatctggccgaatacgtccacggctcccaggcctggaccccgccagctgacggagagggggcggggaaggaagaagcggaggtcaaggtggagcaggagagggagatagaaagcgaggcaggggaagagagtgagtcggaggaagagagcgagtcagaggaagagagcgagacagaggaagagagtgaggatgagagcgatgaggagagtgaagaagacagcgaggaagaaatggaggatgagcaagaaagcgaggccgaagaagacaaccaagaagaaggggaatccgaggcggagggagaaactgaggcagaaagtgaatttgacccagaaatagaaatggaagcagagagagtggccaagaggaagtgtccggaccatgggcttgatttgagtacctattgccaggaagataggcagctcatctgtgtcctgtgtccagtcattggggctcaccagggccaccaactctccaccctagacgaagcctttgaagaattaagaagcaaagactcaggtggactgaaggccgctatgatcgaattggtggaaaggttgaagttcaagagctcagaccctaaacactcccacggcccttctaccacttgggatcagcgatcttgtgtgatgcgggctggtgtgcgcaggggcaaaatatcagcgcttaggcttgcatggtccatgactcacggatag

SEQ ID NO: 136812 - DNA, 1058 bp, Homo sapiens
gggactagaagggagtgagtgtagacatgtagggtcgtctgggacgaccccgaagcctcaacaagaatttttgagagagcgttctgccaagtaatgggcgcggagagcgggggccgcattgaaaagaccacgctctgtaaaaggagcctgggtccgttaatggaaccgagggtatgaggaccagcgtggttgtctccctcaaaaaggggcatggaaacccgtcaaaattttggacagccctgggagtggaaaaggacgtgaagtgaggatccttatgttgtgaataggagctgcccgctcgttgccacagacacgcttgatgatgtggccatcgcggttgtctccatcacaaccctcaacatagtcatactggcacatgtagtcaaactccaggctcaacatgacaaatcttagttggatgacaaacccaggtttagcatgaatggtccattcacagtgagcatttaggggatagctttccaacaaaatctgaccctttggggctcgcagaacctggccacatcgcatgcagtctcctccgtaccagcctgctcggcactctgcacagtagaaccccttcacatagaagtcatccaaggtacccccccatgagccatttcggcagctcttgcagttttcaaagatggtacaacctgggtggatcaggcaggagtcacactcattctcctcattcctgcagcaagggatggtataacccacgacttccctctttccggggcagacgcactcaatctgatcatattcacagcactcccgacacatgatattccactctgctccagggcaggcttcattaatgactgtgtactctcttggcaaggacgagatgagaaggagctgaagaaaagtgagccccaactgcgtccagcaacccagctccatccttgccgcggctggtgcccgagcgtcttctggggagggagaggagggacccagggaggccgggggcaggcgggttttacagggacctccccgagccccagctgagcgggagctcggatttcagctcgccaggctctcccatcctcatcacgaaa

SEQ ID NO: 136813 - DNA, 699 bp, Homo sapiens
atggtgccagcatctgcatctggtgagagcctcaagctgcttccccttatggtggaagatgaaagggagcctgtcacagagcgagagcagaaaaagggagggggagagagagagagggagagagagagaaagaaagagaaggagaaagagaaagagaaagagaaagaggagaaagaaaaggagaaagagaaaggaggagaggttgacagcctcctttccacaatcggttctcagaggggcagggcaggagcttcctttgcagccgccgtccgcgggtctccaggcgtggccacacctcccggggccccgcaagggttaaggcagcagagaggagaggtttgggctgacgtcgctctggctgaaggtggttcccctcagatgaggatgggagagcctggcgagctgaaacccgagctcccgctcagctggggctcggggagtagacgctcgggcaccagccgcggcaaggatggagctgggttgctggacgcagttggggctcacttttcttcagctccttctcatctcgtccttgccaagaggtactttgtctatgagacagactcagggcccacgtgggttgagagtggagtttacagacaggatctggggccaagagaagcacttcagtaccgagtgagcagccccagggaggatggagagaattcctctgctctggaaattttgtctttaatttaa

SEQ ID NO: 136814 - DNA, 399 bp, Homo sapiens
cgagcaagctccaatcttagatatttgggaacatgaacaagaaacaactgatatgctaattataaagcattcttctccatgccttttaccatagtcccaaagaacttccatttgaccatactagctccttaataggggaagtaacctgagaatggcctcattggtctttcttaaaaaatagtgttgagtttaaacatcccagtgaatgaaaacgacatgaaggtagatgaagtcctttacgaagactcgtcaacagcttaaatctggattactacagccaaataatcagtgttttatatgagagtaaagcaaagtatgtgtatttttcccttgtcaaaaattagttgaaattgttcattaatgtgaatacagactgcattttaaaattgtaattatgaa

SEQ ID NO: 136815 - DNA, 1724 bp, Homo sapiens
atggccctcaaagaaattttctgtccagtgagggagacagagacgtgtaccatcaactgtggtacaagaatatccccgagtatcctgcatgtcgggttgccatatccatcaaccccaaatgtcaagccagagagagaaggctgcggaggaggcgtcagtggaaactctaagcagccaggggcactggaaactgcagaaagcataggaaagaaggaaggaaggagggaagagggaagccgacctgagtctgcttctagcctgagtctgcttctcagtctagcctatgatgttgacaaatctgctcaaatctgtactcgaattcacagctcggtacccttagaagctgtatacccaggctacatccaccaatccattattaatcaagctgatctttcggcgctagccccatatgacccctgtgtctgtcagatacacaagtatcacggtgcttacaattgcctacagtattcggtacaaaatacgctgtacagtcccactactgaacagtacaagagatgccaggcaccgtgggtactgccggccatctttaccatccccgccagtggcgctgccgcctccgcggtcccggtgagggcccaggctcagggaggtcaggcggcagggcagcgacggcgcctcgccaccgctcccctaaccggggagggcgagccggaccacggggaccgcacgagggctgggtcccaagggccagaggcgaggccgcggatccacctgggagcggccaggggcggagaccgaacccgagggcgcccagggcgccgagggcgggactggactcggcttgggcgtgagatggcggcggcagcggtgagcagcgccaagcggagcctgcggggagagctgaagcagcgtctgcgggcgatgagtgccgaggagcggctacgccagtcccgcgtactgagccagaaaggtgattgcccacagtgagtatcaaaagtccaaaagaatttccatctttctgagcatgcaagatgaaattgagacagaagagatcatcaaggacaatctgccaacgaggcaaaaatctgcttcatccctccggtacggttttcaagagcaatcaccatggatatggtgagaataggatcacccagagggaaatttttttaatttcccaaaaacatcctgggaatattccctcaggcttggtgagggttgatgttcgtgaagaaggccttgtcccaccagggggacttggatcctcatccttccatgcccccaggccctggggttggaccaaaaccatgggcaaccccgactgggggagggggcaaggggcctacctatgatgcctatcctgaaagcgcctgttttgcagccattcagggaagttgaagccccctacaccccctggcggttggcttttcaaagaacagatttgccctcccaggtccccagtgaatgaaaacgacatgaaaggtagatgaagtcctttaccgaagactcgtcaacagcttaaatctggattactacagccgaaataatcagtgttttatatgagagtaaagcaaagtatgtgtatttttcccttgtcaaaaatttagttgaaattgttcattaatgtgaatacagactgcattttaaaattgtaattatgaaataccttatataaaaccatctttaaaaaccaatagaagtgtgaatagtagaatattaattaaaatggaggctatcagcctgtgattttcagcttaacttcctgg

SEQ ID NO: 136816 - DNA, 816 bp, Homo sapiens
atgggtcagagaaattattcaaaatgcagagcagagacagcaaaagatggagaatatagaggagagataaaggaggatgttcaaacgcaccgcaaaaaagctaaaaaccttgaaaaaggagtagacgaatggctaactagaataaacagtgtagagaggtccttaaatgacctgatggagctgaaaaccatggcacaagaactacatgatgcatgcacaagcttcagtagccaatttgatcaaatggaagaaagggtatcagtgattgaagatcgaatgaatgaaatgaagtttatggctacaaatgatttgatgacggaactgcagaaagattccatcaagttggatgatgatagtgaaaggaaagtagtgaaaatgattttgaagttattggaagataaaaatggagaggtacagaatttagctgtcaaatgggtctcaccttgtctcccaggtgatttcctaaaaactttggaagacccagatttgaatgtgagaagagtagccttggtcacatttaattcagcagcacataacaagccatcattaataagggatctattggatactgttcttccacatctttacaatgaaacaaaagttagaaaggagcttataagagaggtagaaatgggtccatttaaacatacggttgatgatggtctggatattagaaaggcagcatttgagtgtatgtacacacttctagacagttgtcttgatagacttgatatctttgaatttctaaatcatgttgaagatggtttgaaggaccattatgatattaagcatactcctcttcaagtttctttgtaa

SEQ ID NO: 136817 - DNA, 368 bp, Homo sapiens
ataaaggaggatgttcaaacgcaccgcaaaaaagctaaaaaccttgaaaaaggagtagacgaatggctaactagaataaacagtgtagagaggtccttaaatgacctgatggagctgaaaaccatggcacaagaactacatgatgcatgcacaagcttcagtagccaatttgatcaaatggaagaaagggtatcagtgattgaagatcgaatgaatgaaatgaagtttatggctacaaatgatttgatgacggaactgcagaaagattccatcaagttggatgatgatagtgaaaggaaagtagtgaaaatgattttgaagttattggaagataaaaatggagaggtacagaatttagctgtcaaatg

SEQ ID NO: 136818 - DNA, 6140 bp, Homo sapiens
  misc_feature (1)...(6140): n = a,t,c or g
atgctcatattgatgagggcctttgtgctgcaccatcccatggcaaaacgcaggaagcgcccgcgtctgccgcccccgcccccggagcgaaggaggcgggctttggccttttgccctagggagcgagtgcggagcgagtgggagcgagacggccctgagtggaagtgtctggctccccgtagaggcccttctgtacgccccgccgcccatgagctcgttctcacgcgaacagcgccgtcgttaggctggctctgtagcctcggcttaccccgggacaggcccacgcctcgccagggagggggcagcccgtcgaggcgcctccctagtcagcgtcggcgtcgcgctgcgaccctggaagcgggagccgccgcgagcgagaggaggagctccagtggcggcggcggcggcggcggcggcggcggcggcggcggcggcggcggcagcggcagcgggcagcagctccagcagcgccagcaggcgggatcgaggccgtcaacatggcgagcgcctcgtaccacatttccaatttgctggaaaaaatgacatccagcgacaaggactttaggtttatggctacaaatgatttgatgacggaactgcagaaagattccatcaagttggatgatgatagtgaaaggaaagtagtgaaaatgattttgaagttattggaagataaaaatggagaggtacagaatttagctgtcaaatgtcttggtcctttagtgagtaaagtgaaagaataccaagtagagacaattgtagataccctctgcactaacatgctttctgataaagaacaacttcgagacatttcaagtattggtcttaaaacagtaattggagaacttcctccagcttccagtggctctgcattagctgctaatgtatgtaaaaagattactggacgtcttacaagtgcaatagcaaaacaggaagatgtctctgttcagctagaagccttggatattatggctgatatgttgagcaggcaaggaggacttcttgttaatttccatccttcaattctgacctgtctacttccccagttgaccagccctagacttgcagtgaggaaaagaaccattatcgctcttggccatctggttatgagctgtggaaatatagtttttgtagatcttattgaacatctgttgtcagagttgtccaaaaatgattctatgtcaacaacaagaacctacatacaatgtattgctgctattagtaggcaagctggtcatagaataggtgaataccttgagaagataattcctttggtggtaaaattttgcaatgtagatgatgatgaattaagagagtactgtattcaagcctttgaatcatttgtaagaagatgtcctaaggaagtatatcctcatgtttctaccattataaatatttgtcttaaatatcttacctatgatccaaattataattacgatgatgaagatgaagatgaaaatgcaatggatgctgatggtggtgatgatgatgatcaagggagtgatgatgaatacagtgatgataatgacatgagctggaaagtgacacgtgcagctgcgaagtgcttggatgctgtagttagcacaaggcatgaaatgcttccagaattctacaagaccgtctctccctgcactaatatccagatttaaagagcgtgaggagaatgtaagggcagatgtttttcacgcatacctttctcttttgaagcaaactcgtcctgtacaaagttggctatgtgaccctgatgcaatggagcagggagaaacacctttaacaatgcttcagagtcaggttcccaacattgttaaagctcttcacaaacagatgaaagaaaaaagtgtgaagacccgacagtgttgttttaacatgttaactgagctggtaaatgtattacctggggccctaactcaacacattcctgtacttgtaccaggaatcattttctcactgaatgataaatcaagctcatcgaatttgaagatcgatgctttgtcatgtctatacgtaatcctctgtaaccattctcctcaagtcttccatcctcacgttcaggctttggttcctccagtggtggcttgtgttggagacccattttacaaaattacatctgaagcacttcttgttactcaacagcttgtcaaagtaattcgtcctttagatcagccttcctcgtttgatgcaactccttatatcaaagatctatttacctgtaccattaagagattaaaagcagctgacattgatcaggaagtcaaggaaagggctatttcctgtatgggacaaattatttgcaaccttggagacaatttgggttctgacttgcctaatacacttcagattttcttggagagactaaagaatgaaattaccaggttaactacagtaaaggcattgacactgattgctgggtcacctttgaagatagatttgaggcctgttctgggagaaggggtccctatccttgcttcgtttcttagaaaaaaccagagagctttgaaactgggtactctttctgcccttgatattctaataaaaaactatagtgacagcttgacagctgccatgattgatgcagttctagatgagctcccacctcttatcagcgaatgtgatatgcatgtttcacaaatggccatcagttttcttaccactttggcaaaagaatatccctcctccctttcaaagataagtggatccattctcaatgaacttattggacttgtgagatcacccttattgcaggggggagctcttagtgccatgctagactttttccaagctctggttgtcactggaacaaataatttaggatacatggatttgttgcgcatgctgactggtccagtttactctcagagcacagctcttactcataagcagtcttattattccattgccaaatgtgtagctgcccttactcgagcatgccctaaagagggaccagctgtagtaggtcagtttattcaagatgtcaagaactcaaggtctacagattccattcgtctcttagctctactttctcttggagaagttgggcatcatattgacttaagtggacagttggaactaaaatctgtaatactagaagctttctcatctcctagtgaagaagtcaaatcagctgcatcctatgcattaggcagcattagtgtgggcaaccttcctgaatatctgccgtttgtcctgcaagaaataactagtcaacccaaaaggcagtatcttttacttcattccttgaaggaaattattagctctgcatcagtgggtgggccttaaaccatatgttggaaaacatctgggccttattacttaaagcactgttgagtgtgcaggagggaggggaccaggaaatgttgttgctggaatgtctagggaaaactcactcttaattggatccaggaaacttttccttccacggcttaaggggtacttgatatcaggctcatcatatgcccgaagctcagtggttacggctgtgaaatttacaatttctgaccatccacaacctattgatccactgttaaagaactgcataggtgatttcctaaaaactttggaagacccagatttgaatgtgagaagagtagccttggtcacatttaattcagcagcgcataacaagccatcattaataagggatctattggatactgaccttccacatctttacaatgaaacaaaagttataaaggagcttataagagagggacaaatgggtccatttaaacatactgttgaggatggcctggatattagaaaggcagcatttgagcgtatatacacacttctagacagccgtcttgatagacttgataaatttgaatttctaaatcatgttgaagatggcttgaaggaccattatgatattaagatgctgacatttttaatgttggtgagactgtctaccctttgtccaagtgcagtactgcagaggttgggaccgactgtttgagcccattacgtgccaacatgtacaactaaggtaaaggcaaactcagtaaagcaggagtttgaaaaacaagatgaattaaagcgatctgccatgagagcagtagcagcactgctaaccattccagaagcagagaagagtccactgatgagtgaattcccagtcacagatcagttctaacccctgagctggcgggctatctttgaaaggtatcccagaaagattcatccatctactaacttggaatccaatggacaactagtccagatgtttgttcaccatcggggacccattacatatggaccatacaatgcactgaaattgacaggttaaccataagacagggaaagaggaagtgtcttaaaagctttcaaaatgttccactttttttttccttcatgggagactgtttgttttggctttctttccattgttgtttttgtagggcntttatttcagaaatgtgtatttccataatccagaggttgtaaaaccactagtgttttagtggttacagcaacatttgaaatggaaactaaaagttaggattttatggagtatggagataggggtccccgtacccattacccccgtaaggtttagggattaaaaggttaaaaattttggtgaccatgaatttccttcctttaataaattttcctcatttaaaaatccaaaaatccttgccaaaacaaaaacccatgtttcctttttccttgtataactttttgttttccagcaacataaattgatttttagtctggcagacaagaatatcccatataagatttgttaaccatttcagagagtttggcaatttttaaaagataataaggtatcatttttaagtatgaaaattaacaatatccctgttgcgcacactaattttgcatgagtaagtttacaaatatgtatcgtctgtaaagcagcatgtgcagattattcataatatagaagttaaaataagtattagtgcaattttcagatatttatttttgcacagaaaacacattatctggagagaaagaaaggagaatttttgagacttgggttttcttaatgccagtgtgaatttgcagatgttttcagaaaatcaagtcacagtaacaatttgccacttttttctgttataaatcttcttacttaaattttgaatatttagtttttctcagttacccatttgtgtgtgtgtgattccacttagaaattcttaaaaccagatttttcctttcaatcccgtttggatgtcctacattcccttatcaaaggatataaaatactgtgtatgccttttgaattttatttttaggaaaattctgaagcccagcctatcacaggtttgttagcctaataatagtattttcttttagttgagttaggtttttccccatctcctgtagagcgaatttacaaattgtattgggtaagtgttccactacttttcctgattaagggatctgtgctggggaacaaagcttttgcagtcccttatatggtggttaaaattttattttaacaaatccttcagtgagctcatttcacacggaagccttttccttaaaatttgtggggctcctgtaaccagtaggaactaattctgaaataaaagacatctcctaatgctgtgcaaacatagtttacaatgtattgaaggaggcagttgttaaattgagtgaccaatttaagcaatcagatatttgaaaactgcaccctttagttttgaaactgtgaattagaaacacttttcctgctgtattactacctgcttttaacatccaaatatacagtgattttaaatgataacatactgtgggttattaggattaacagcttgattttgaatgttcaggatggataatgcaggaaggacatcacttctagtaagggattttggactagtgcattgatgttgaagttgggtgccctttcaaaatgtggcaggtgataatccttttaccataatttgcataaaactgtaatagaagtttattttgagatgttagtatattatgtactatgcatttctgtggtatagatgttgtggatatatttaagtatttggttacatggttttacaataaattacaatactgcaggctctaggactgaacaggagactgacatgcatatgttgtgtgaatgtcttagttgggtaaagttaaatccaaatacttcaactggcaaaaaaaaa

SEQ ID NO: 136819 - DNA, 411 bp, Homo sapiens
  misc_feature (1)...(411): n = a,t,c or g
aaaggagtctcagcgtagtgggaatgtagctgaactggctctgaaagctactctggtggagagttctacttcaggtttcactcctggtggaggaggctcttcagtctccatgattgccagtagaaagccaacagacggtgcttcctcatcaaattgtgtgactgatatttcccaccttgtcagaaagaaggctgagaatcaggctgaaagccgggcagcagtggaggggacagtggaggctggagctacagttgaaagcactgcatgttaagagggggcacagccctcctcccaagggaaagtgtttttgtatataatgtattttttcacttttggaggattctttttgtataacttcaataaagattgtaagcnnnnnnnnnnnnnnngggggcgcccgttcaagagaaa

SEQ ID NO: 136820 - DNA, 451 bp, Homo sapiens; identical to SEQ ID NO: 117321

SEQ ID NO: 136821 - DNA, 1122 bp, Homo sapiens; identical to SEQ ID NO: 117322

SEQ ID NO: 136822 - DNA, 444 bp, Homo sapiens
ggtccctcgatgaatatatgagaaggcacttgatgggcaaaaccattaggtcacttccttccacgtgatgattattggctctgtcagccccattatcacagagtattcaagaaatactttgtggtcactgccctcttaatatagggagcaaagcagagtttgggtgacttgtatatgcttcctatgactgaggcctcagttatataagacagaatggcttaaactaggctcactgatgcccaggttctgtttgtcttccaggctgagaatcaggctgaaagccgggcagcagtggaggggacagtggaggctggagctacagttgaaagcactgcatgttaagagggggcacagccctcctcccaagggaaagtgtttttgtatataatgtattttttcacttttggaggattctttttgtataacttcaataaaaattgtaag

SEQ ID NO: 136823 - DNA, 757 bp, Homo sapiens
tcaggagttgtagtgtcaagattccagttcttcttatgcgacttgctggagaagcaggaagttgctgtttattggagaagtcgggctagggagggaaacaatcccgcgcacccatatggagagggcaggaggtgtctagatagtggtaggccggcgggggacggagggtatgggtggtgagtcctggccctttaaacccgagggggaggatccggaagtggatgggcggggcgaagggtcctcgtatataaaagggccccggccgcgcggggtctctaatctgccattttctgtccctgagtgagtctctggcgtcccaaattgcctgcgtttctcgcaggctctattccgttcgctggttcgccacctcaggggaacgatggccatggagtccacagccactgccgccgtcgccgcggagctggtttctgccgacaaagttgaagatgttcctgctccttctacatctgcagataaagtggagagcaaccattaatctgctttctgtcactgaagatgggttgcattttgtagaatattatctaaatagaatcatacatctggatgtggatagtgaagctaagaaactattgggtttaggacagaaacatctggtgatgggggatattccagcagctgtcaatgcattccaagaagcagctagtcttttaggtaagaaagtatggggagacagctaatgaagtgtggagaagccttctttttctatgggaaatcacttctggagtggcaagaatgg

SEQ ID NO: 136824 - DNA, 1099 bp, Homo sapiens
tccctgagtgagtctctggcgtcccaaattgcctgtttttctcgcaggctctattccgttcgctggttcgccacctcaggggaacgatggccatggagtccacagccactgccgccgtcgccgcggagctggtttctgccgacaaaattgaagatgttcctgctcctttctacatcctgcagataaagtggagagtctggatgtggatagtgaagctaagaaactattgggtttaggacagaaactatctggtgatgggggatattccagcagctgtcaatgcattccaggaagcagctagtcttttaggtaagaagtatggagagacagctaatgagtgtggagaagccttctttttctatggggaaatcacttctggagttggcaagaatggagaatggtgtgttgggaaacgcctttggaaggtgtgcatgtggaagaggaagaaggagaaaaaacagaagatgaatctctggtagaaaataatgataacatagatgaaactgaaggctcggaagaggatgataaagaaaatgataagactgaagaaatgccaaatgattcagtccttgaaaacaagtctcttcaagaaaatgaggaggaggagattgggaacctagagcttgcctgggatatgctggatttagcaaagatcatttttaaaaggcaagaaacaaaagaagcacagctttatgctgcccaggcacatcttaaactcggagaagttagtgttgaatctgaaaaactatgtgcaagctgtgggaggagttccagtcctgccttaacctacaggaccagtacctgggagcccacgaccgtctccttgcagagacccactaccagctgggcttggcttatgggtacaactctcagtatgatgaggcagtggcacagttcagcaaatctattgaagtcattgagaacagaatggctgtactaaacgagcaggtgaaggaggctgaaggatcgtctgctgaatacaagaaagaaattgaggaactaaaggaactgctacccgaaattagagagaagatagaagatgcaaaggagtctcagcgtagtgggaatgtagctgaactggctctgaaagctactctgg

SEQ ID NO: 136825 - DNA, 3258 bp, Homo sapiens
gcctgagtgagtctctggcgtcccaaattgcctgtttttctcgcaggctctattccgttcgctggttcgccacctcaggggaacgatggccatggagtccacagccactgccgccgtcgccgcggacgtggtttctgccgacaaaattgaagatgttcctgctccttctacatctgcagataaagtggagagtctggatgtggatagtgaagctaagaaactattgggtttaggacagaaacatctggtgatggggggtattccagcagctgtcaaatgcattccagggagcagctaagtcttttaaggtaagaagtatggagagacagctaatgaagtgtggagaagccttctttttctatggggaaatcacttctggagttggcaagaatggagaatggtgtgttgggaaacgccttggaaggtgtgcatgtggaagaggaagaagggagaaaaaacagaagatgaatctctggtagaaaataatgataaccatagatgaggaagcaagggaagagttgagagaacaggtttatgacgccatgggagaaaaagaagaagccaaaaaaacagaagacaagtctttggcaaagcctgaaactgataaagaacaggacagtgaaatggagaagggtggaagagaagatatggatataagtaaatctgcagaggagccacaggaaaaagttgacttgactctagattggttaactgaaacctctgaagaggcaaaaggaggagcagcaccagaaggaccgaatgaagctgaggtcacttctgggaagccaggacagggaggtaccagatgctgaggaagaaaaatcagtttctggaactgatgtccaagaagagtgcagagaaaaaggaggtcaggagaagcagggagaggtaattgtgagcatagaggagaagccaaaagaagtttcagaagagcagcctgtggtgactctagaaaagcagggcactgcagtggaggtagaagcagagtctttagacccgacagtcaagccagtggatgtgggtggggacgagccagaggagaaggtagttacctctgaaaacgaggcaggaaaggcggttcttgaacaactggtaggtcaagaagtaccacctgctgaagagtcaccagaggtgcaaacagaggctgcagaggcctcagctgtagaggctggatcagaagtctctgaaaagcctgggcaggaggctccagttctccctaaggatggtgcagtcaatggaccgtcagttgtaggagatcagactcctattgaaccacagacttctatagaaagactgacagaaacaaaagatggctcaggactagaggagaaggtcagggcaaagctggttcctagtcaggaggagactaagctgtctgtagaagagtctgaggcagctggagatggggttgataccaaggtagcccagggagctactgagaaatcacctgaagacaaagttcagatagctgctaatgaagagacacaagagagagaagaacagatgaaagagggtgaagaaactgaaggctcggaagaggatgataaagaaaatgataagactgaagaaatgccaaatgattcagtccttgaaaacaagtctcttcaagaaaatgaggaggaggagattgggaacctagagcttgcctgggatatgctggatttagcaaagatcatttttaaaaggcaagaaacaaaagaagcacagctttatgctgcccaggcacatcttaaactcggagaagttagtgttgaatctgaaaactatgtgcaagctgtggaggagttccagtcctgccttaacctgcaggaacagtacctggaagcccacgaccgtctgcttgcagagacccactaccagctgggcttggcttatgggtacaactctcagtatgatgaggcagtggcacagttcagcaaatctattgaagtcattgagaacagaatggctgtactaaacgagcaggtgaaggaggctgaaggatcgtctgctgaatacaagaaagaaattgaggaacttaaggaactgctaccccgaaattagagagaagatagaaaatgcaaaagagttctcagcgtaagtggaaatgtagctgaacttgttttctgaaagctactctggtggagagttctaccttccaggtttcacctcctggtggaggaggctcttccagtctcccatgattgcccagtagaaaacccaacagacggtgcttcctcatcaaatttgtgtgacttgatatttccccacctttgtcagaaagaagagggaaccccagaggaagagagtccccgggaaaagatgatgcaaagaaagccacaacaagagccggaggtgaaacaggaggcagtggggatgctgctccccagtggaaatgaagttgcggaaaacatggaggaggaggctgagaatcaggctgaaacgcggagcagcagtggaggggacagtggaggctggagctacagttgaaagcactgcatgttaagagggggcacagccctctctcccaagggaaagtgtttttgtatataatgtatttttttcacttttggaggattctttttgtataacttcaataaagattgtaagcaaaggttgaggctttgatggtttttttcttacttattggctgaatctgccttggagcactgctggttttatatattagccaaaggttttgttctggccttctgtactgatctgtgttcctgatcctaattcctatctgtctaacgtggaggtgatcaagtgtggctgtaggcctttgttttccaatggtgctatattctgttttcaaacacttcactgaacccagctgtcttgcaaactttcagtggtgctgtccctggatgggggctacaaaaacaagaattggtgaagatcttgctcttcagtgctgaaaatggatgatggactttggctgtgagccaggcctaggatggttcttgtcctatatccacctagtcttcacctggggctataattctgtcctggaaaaagaactctgaaaacctgggtcaggggaaatgattccttaaggaaaacggtctgcatttgatctctggtttgaaagtagccaaggggactgatggtggacactccagatgtggttggaagcatatgtggggaggctggctggttgagttttgttattttctgtatagaaaggttgagatatatcaacacttggaattgttacccatctgcagaattgacttctcaaataaagatgctaaaaatcaaaaaaaaaaaaaaaaa

SEQ ID NO: 136826 - DNA, 416 bp, Homo sapiens
  misc_feature (1)...(416): n = a,t,c or g
agggcgggtatataaaaaacccctnnnnnnnnnnnnnnnnnnnnnnnnnttttccagaatccaactggactttatttgacacagaatacaatatggctacagaaacagcaaactgaaaaaacaaagcagaaaaaaacacagttccatccaatttgtaattaggtaacagcagggaaagtcattaaatgaataacaaaacaattaagcttgatggaagaagtcttttcctagtgcccatacttttggaattcccactctctgttgtccaatggacacacctgtcgtgttttgagccagcgagagatgcagtggaagtgaaaagcatgaaagatccataatgtggttcctgcagatggcacagttatcaaccacaatatcccaggcccagagggctactgcattccactttttcactt

SEQ ID NO: 136827 - DNA, 398 bp, Homo sapiens
tttttttccagaatccaactggactttatttgacacagaatacaatatggctacagaaacagcaaactgaaaaaacaaagcagaaaaaaacacagttccatccaatttgtaattaggtaacagcagggaaagtcattaaatgaataacaaaacaattaagcttgatggaagaagtcttttcctagtgcccatacttttggaattcccactctctgttgtccaatggacacacctgtcgtgttttgagccagcgagagatgcagtggaagtgaaaagcatggttacagactccccatgcgacagtacactcttctgaagtagcggacgctggttagcttgacattctatgcctttttcacttcaaagcgcttcttgcccgcgccgctgttggtgccgct

SEQ ID NO: 136828 - DNA, 358 bp, Homo sapiens
  misc_feature (1)...(358): n = a,t,c or g
ctcannnnnnnnnnnnnnnnnnnnnnnnnnnnnnnnnnnnnnnnnnnnnnnnnnnnnnnnnnnnnnnnnnnnnnnnnnnnnnnnnnnnnnnnnnnnnnnnnnnnnnnnnnnncannnnnnnnnnnnnnnnnnnnnnnnnnnnnnnnnnnnnnnnnnnnnnnnnnnnnnnnnnnnnnnnnnnnnnnnnnnnnnnnnnnnnnnnnnnnnnnnnnnnnnnnnnnnnnnnnaagatccataatgtggttcctgcagatggcacagttatcaaccacaatatcccaggcccagagggctactgcattccactttttcacttcaaagcgcttcttgcccgcgccgctgttggtgccgctcgggg

SEQ ID NO: 136829 - DNA, 386 bp, Homo sapiens
  misc_feature (1)...(386): n = a,t,c or g
tttttaaaatatctcannnnnnnnnnacatcannnnnnnnnnnnnnnnnnnnnnnnnnnnnnnnnnnnnnnnnnnnnnnnnnnnnnnnnnnnnnnnnnnnnnnnnnnnnnnnnnnnnnnnnnnnnnnnnnnnnnnnnnnncannnnnnnnnnnnnnnnnnnnnnnnnnnnnnnnnnnnnnnnnnnnnnnnnnnnnnnnnnnnnnnnnnnnnnnnnnnnnnnnnnnnnnnnnnnnnnnnnnnnnnnnnnnnnnnnnaagatccataatgtggttcctgcagatggcacagttatcaaccacaatatcccaggcccagagggctactgcattccactttttcacttcaaagcgcttcttgcccgcgccgctgttggtgccgctcgggg

SEQ ID NO: 136830 - DNA, 666 bp, Homo sapiens
gcgatggatgtggataccccgagcggcaccaacagcggcgcgggcaagaagcgctttgaagtgaaaaagtggaatgcagtagccctctgggcctgggatattgtggttgataactgtgccatctgcaggaaccacattatggatctttgtaagtaattggaggaggatgggaggaagttgagaaggttgcagagattgtggctatcttgatgtgactgattttcttcttcacacgaggagatagcaagcctactctgagcactcggtcttctgtatctagtctgttggtgtgtttgaaatagagtagtttttttatgatgtcctggaggcatacccagctctcagaataaatctactcaatctaaagatggcagggacacatttagaattaattgtggacgacaggcactgttgatttttcctgcatatcttccatcttgtacctagactcaaaggtagaaatagtgaaaggagaattgcttgaacctgggaggcagaggtggcagtgagccgagatcacaccactgcactacaacctgggcgacacagcaagactcaaagtctcaaaaaaaaaaaaaagtctatctgatctaatttttgctggtcattgtttacaaaggaaagaagcgttaaggagtgaggattttgtatgttaagcccaaacat

SEQ ID NO: 136831 - DNA, 509 bp, Homo sapiens
tttcgttccgcccctttttgaagcttggggtcctctcacttggaggggtcctctcacttggagggatcctcgctgaaccgaggcctcacactgcctggttagagtctggagtgtaatgcttggctcttctgagacgtctgttggcttttcacacaaccaccccactcttgggttctctgtcacgtccagaatctcccccttccaaaataataataaaaagcatggtggaacttgttaagaaaatccgagcccaaatcctgtggcagttagggagggttgagtactagtcgcgaacgacttgtggaatgcagtagccctctgggcctgggatattgtggttgataactgtgccatctgcaggaaccacattatggatctttgcatagaatgtcaagctaaccaggcgtccgctacttcagaagagtgtactgtcgcatggggagtctgtaaccatgcttttcacttccactgcatctctcgctggctcaaaacacgacaggtgtgtccat

SEQ ID NO: 136832 - DNA, 3386 bp, Homo sapiens
atggccatactgcccaacgtaatttacagattcaatgccatccccatcaagctaccaatgactttcttcacagaattggaaaaaactactttaaagttcatatggaaccaaaaaagagcccgcatcgccaagtcaatcctaagccaaaagaacaaagctggaggcatcacactacctgacttcaaactatactacaaggctacagtaaccaaaacagcatggtactggtaccaaaacagagatatagatcaatggaacagaacagagccctcagaaataatgccgcatatctacaactatctgatctttgacaaacctgagaaaaacaagcaatggggaaaggattccctatttaataaatggtgctgggaaaactggctagccatatgtagaaagctgaaactggatcccttccttacaccttatacaaaaatcaattcaagatggattaaagatttaaacgttagacctaaaaccataaaaaccctagaagaaaacctaggcattaccattcaggacataggcgtgggcaaggacttcatgtccaaaacaccaaaagcaatggcaacgaaagccaaaattgacaaatgggatctaattaaactaaagagcttctgcacagcaaaagaaactaccatcagagtgaacaggcaacctacaacatgggagaaaattttcgcaacctactcatctgacaaagggctaatatccagaatctacaatgaactcaaacaaatttacaagaaaaaaacaaacaaccccatcaaaaagtgggcgaaggacatgaacagacacttctcaaaagaagacatttatgcagccaaaaaacacatgaaaaaatgctcatcatcactggccatcagagaaatgcaaatcaaaaccactatgagatatcatctcacaccagttagaatggcaatcattaaaaagtcaggaaacaacaggtgctggagaggatgtggagaaataggaacacttttacactgttggtgggactgtaaactagttcaaccattgtggaagtcagtgtggcgattcctcagggatctagaactagaaataccatttgacccagccatcccattactgggtatatacctaaaagattataaatcatgctgctataaagacacatgcacacgatctcatccaggataccacattgcatttagtcatcaggtcttcttaggctttgctaacattttcctcattttggatgaccttgaaagttctgagtactggtcaggcctatgcatgctttgtgatgaatttgtagccacagtgcagtgcttgggcgaaaagacatatgcccagtgtggattggcagcagatggtgctcatcagaatgcattgaacagtaatccaagccctcatgaagccatcattagcaaagcctttcctactgatggtgtgggccctgcccatgggggcgtgggacctgttgcatggatgatctggtttgtaggagagccagagaggtggcaggagtctcagactggaagccccaccctgagggatggtctggcagacaggccatccttgaagggcagcagccagcagccccaggcagagggagagaaaaaagaagcagcacagacacctgtagaaatagcactaatttggcctgatttaaattcaggtgctaacttgtggcagtcctgtgaatgtcaggctcagggcctgaggagttgcttgtggcctcactcacagggaaggcatgcatctgatggaagaactcagccacagccaaccccagcagtagaacccactctggaggtcaagggctccttgagggcagggacttactgcatggtagaccctgagcagcctgtcctccagggcaggagagaatgcagcacatggctattggagtccaagtcattcacctgctggttatttgacagggacttcctgagtgcctactcgagagaaacagaaccaatagagggtgtgtgtgtggacagaaaaagggagagggagagggagagggaaattgtattgaaggaattggctgatgcagttatagcagctggaaagtccaacatctgcagggttccacttcttggaccacctgcagggccatctcacagcattgtgaacattccttcaggctcctatttggggaaggagaaccttgtgggaaaatgtgccctgaatgtgagtgtgaatgtgaatgtgcaatttattgctgatgtggtagatgggactgaggcaaaaggacctggtggagaatggaaaagaaccagtgacaaaaaccacgatttctcaatagacgccaaaaaggccttcggcaaaattcaacaacgcttcatgctaaaagcactcaataaactaggtattgatggaacatatctcaaaataataagagactctggcacccctggagatgctgctggacctttgttgcaagaaagagtcaatgctaccacccttccatcagcccatatccccatggcaccatccactctaaaccagggcaatgatgaaaaagcaggggatcagagaagagcaagggcttgcgtgaagagcaacaacttgtacactgagggttgtgagagctggaagtctgagggagtgtgggtcccaaccttgcactcaagtgcatggtctgtatcttgtggaggagcctgcacagacaaggagttgcggaaccttgcctcccggctgaaggattggtttggagctctccacgaggatgcgaacagagtcatcaagcccaccagctccaacacagcccaaggcaggtttgacactagcatcctgcccatctgcaaggactccctgggctggatgttcaacaagttggacatgaactatgacctcctgcttgacccttcagagatcaatgccatctacctggataagtacgagccctgtatcaagcctcttttcaactcgtgtgactccttcaaggatggcaagctttctaacaatgagtggtgctactgcttccagaagcctggagagctcatcgcgtttgggcctctaaaggttaagggccctgtaattttgactaatagccaaccatccccatcctctgctgctgaccctgcagcagatattctgacatgggccttcatacctcggtgtaatgaggagggctattacaaagccacacagtgccacggcagcacggggcagtgctggtgtgtggacaaatatgggaatgagttggctggctccaggaaacagggtgctgtgagctgtgaagaggagcaggaaacctcaggggattttggcagtggtgggtccgtggtcctgctggatgacctagaatatgaacgggagctgggaccaaaggacaaagaggggaagctgagggtgcacacccgagccgtgacagaggatgatgaggatgaggatgatgacaaagaggatgaggtcgg

SEQ ID NO: 136833 - DNA, 4099 bp, Homo sapiens
cactttgttcacatacaccaagagagagcatccgttccagaatccaaacttggactttatttgacacagaatacaataaggctaacagaaacagccaaactgaaaaaaacaaagccagaaaaaaacaccagttcccatcccaatttggtaattaggttaacagccagggaaaagtccattaaatgaataacaaaacaattaagcttgatggaagaagtctttttcctagtgccccatacctgaaagacaaagtaaattactttttggaattccccactctctgttgtccaaatggacacacctgtccgtgttttgagccagcgacgagatgcagtggaagtgaaaaggcatgggttacagacttccccatgcgacagtacactcttctgaagtaggcggaccgctggggttaggcttgacattctatgcaaagatcccataatgtgggtttctgcagatgggcacagttatcaaccacaatatcccaaggccaagagggctactgaattccacttttttaacttcaaagcgcttcttgcccgcgccgctgttggtgccgctcggggtatccacatccatcgctgcgggctcacaaagcggccagacgctcggcggcggcgtgtggcaggagcgcaggggcgcgagccggcgatcagccttcccggcgaccgtgccgcgggagctcgagcaactcggactaggggacccgggccggcccccaagatgccggcgatcgcggtgttggcggcggccgccgcggcgtgtgtgcttcctccaagtcgagagccggcacctggacgcgctcgccggaggcgcgggccccaaccacgggcaatttccttagacaatgaccaggtggctgagcaccgtctcccagtacgaccgggacaagtacatggaaccgctttcgagacgaagttgaggatgattatttcagaaactgggaatcccaacaagccctttgaccaagccctgggacccatccaaggacccctgcctgaaggtaaaatgcagccctcacaaagttgtgtgtgacccagggactaccagaccgccctggtgtgtcagccgcaagcacctgctccccaggcaaaaagaatggggaacgtgggcccagaaacactggggtttggacctttgaattttggtcaagttgcaagccctgttcccgtgggcgcagttcagccatgggtcttgcgggttcagatgggccactcctaacagcattccaagttgcaaatttggagttccatgcttgttctactgggcaaaagccttcgccaccctctgtgatggggccctgtccctgttcttcccagagcctggagccaccaaagcacaagggcagaaagggagtgccttgcacagacaaggagttgcggaaccttgcctcccggctgaaggattggtttggagctctccacgaggatgcgaacagagtcatcaagcccaccagctccaacacagcccaaggcaggtttgacactagcatcctgcccatctgcaaggactccctgggctggatgttcaacaagttggacatgaactatgacctcctgcttgacccttcagagatcaatgccatctacctggataagtacgagccctgtatcaagcctcttttcaactcgtgtgactccttcaaggatggcaaacctttcctaaacaatgaatggtgcctactgccttcccagaaccctggaggtctccccttgcccagaatgaaatgaacagaattcaagaagctgagtaaggggaaaagcctgttgggggccttcatacctcggtgtaatgaggagggctattacaaagccacacagtgccacggcagcacggggcagtgctggtgtgtggacaaatatgggaatgagttggctggctccaggaaacagggtgctgtgagctgtgaagaggagcaggaaacctcaggggattttggcagtggtgggtccgtggtcctgctggatgacctagaatatgaacgggagctgggaccaaaggacaaagaggggaagctgagggtgcacacccgagccgtgacagaggatgatgaggatgaggatgatgacaaagaggatgaggtcgggtacatatggtagtgcccacaagaaagaggacacaagttttgcacaaaattgcaagtcacttcctattcctgcatttgtatctaagactccaaggcaccaaggtctcttctccattgttgctctctataccccgaccctaaggtttggaagacaactgcctgttccccagaggattctgattttgcatatgtttgtatgggagaaagggtgttgtgttttttttttttgttgttgtttattttttggatagggaagtcattggcttaattagagcctccttcctttctgtgagatttttccaacaagcatgtgatttacgtggaattctgacagtgcagggagcccccaccctcttaaatgtcaaagaccctttttgattacccacactggtggttattacagcatggttcccagccttacagtgtcctaagtgcttctcttgtgtcctgtagatgttgtgaaaaagaaaaaaacaaaaaatacaccacactgtactttttccccctgccccccgttactgtccggtgattattattaaaaattagatttttttcacatcattatatctggcttcctataaacaacagaccttaattcagtcaagactccctttggggaaattcattttattaaaaattggtgtctggatacttccctgtacatgcataaatatgcatgcatgtacagaaagactgtatgtgtgtgccttgcacacacacccatacctctcagaaaaagtgtttgggtatcttaaaaactcgaaaaacaatgataaatttctcagcttgtccagacctggaacaaaatttctggaataagaaatttgtattaaagtccttttttgcactaacagttggctcttgtagcctgcaggctgaggaagtctcttctctgtgcatcagcagagttactgaaagcctctgattgagaaaaaacctccgtctgcctaaatcacttttctcgcagaagccatgcgactcccacacgacacgggcagcttcacaagccatctctttcatttctgcttgaagcccccttggctggcagcaatcctgtctggccataggtttcttccttccttacctacttcaaggggctttttctaagggcatggcacacatatcttcctgtttctctggaggagtaccatggggttccttaaaagaagaaaatttctaattctgaactcaatgttttgcttttactccctttctactgacaaatcatgataagggcacaaaagctgtacagatttttttttttaaccactcaatcccaaatggaggcctacaaagaacatcgtaataacacatggaagcaaaccctgggtttttaagagccaaattctgtcccccccctccactccccccaagtgacaagatactaatgaagaaagttcttcaccatagtgtttgttttaactaaactcattggagtctagttccaaatttgggtaggggtcatcatctctacattccttaggatttctctccctatcaagctggcccagatacaaagtcccaaacaagtagtcatctgaagttccccccatttccttcagtaccagtctataagctactgtccgccacttgattttcatctatcagggtgtcctaatcagaatcagccacccaagcaagcctctctggcccacatatctatctcttgccttcccccatgaacttcagcctgtccacacaaaagccacataaactcaagcaagaaatatgttcagccaaaacatgattatagtggcagctgaccaatcccccatcccaaattgaccatttagatgtaccaactcaccttaaattagcatgttccaatccagtcgggcattgcctggaatacagtaggcatcatacctatagttgggtcttaggataaggaaatggaacttacttggatataggcaaagtcctttggcttcgtaaataaccctgaggatttgcacttactttccccataggaagacagaccataggcaaactctgttttggggatcctcaact

SEQ ID NO: 136834 - DNA, 694 bp, Homo sapiens
tcatggcgtccaaggcgctggctgcggagaagtggccgcggtctccatagagctgggggcgggcggcccggtatggagagcagccccgagagcctgcagccgcctgcagctcctccgcgggtttggacttgaaggacagtggtttggagagtcctgctgccgccgaggcgcctcctgagagggcagtacaaggtgaccgcctccccggagacagccgtggccggagtgggtcatgagttgggtaccgccggagacgcgggagcccgcccggatctcgccggcacctgccaagcagaactgaccgccgccggctccgaagagcccagcagcgccggcggcctcaagcagcagttgcagcgaccccgagccctcctggggaaatctccgaagcctgggactctctggagtcgttctctaaacctgcattcttttcccagtaagctgcgagttcaatagtgaggagggagcggagaacagggtccctgaggaggaggagggcgcggcggtgttgcccggggctgttcctttgttgttcgttttgtcctgcgtaggtaatatatctaatagtgatgaaagaacctggactgggagagtctagcaagtagtaaggatcaggatggggttttttatagtgcctcggggtgcttgcttcggcgtcttggaacttgtttatgatgaaggtaattcgactcat

SEQ ID NO: 136835 - DNA, 470 bp, Homo sapiens; identical to SEQ ID NO: 109762

SEQ ID NO: 136836 - DNA, 2210 bp, Homo sapiens
tttcgtgaacaatatggcggatggcgaggagccggagaagaaaagaaggagaatagaggagctgctggctgagaaaatggctgttgatggtgggtgtggggacactgagacttggaaggatcgtctggaaccatgtaaagaagattcctcgagcgatctggacccttcacacaccctgatttcgaacccgagcactgaatctctccagttcttgttagatacatgtaaaagttctagtcattggagctggcggcattaggatgtgagctcctgaaaaatctggccttgtcttggttttagacagattcatgttatagatattggacactattagatgtttccaattcttaaattaggcagtttttatttaggcctaaagatattggaagacctaaggctgaagttgctgcagaatttctaaatgacagagtttcctaattgccaatgtagttccacatttccaacaaggatccaggattttaacggacactttctatccgacaatttcatattgattgtgtgtgggactgggactctatcatgcgccagaagatggataaatggcatgctgatatctcttcctaaattatgaaagaatggtgtcttaagatccaagctccattgtccctttgatagattggggggacagaagggttttaaagaaaatgcccgggtgattcttgcctggaatgactgcttgtatcgaatgcacgctggaactttatccaccacaggttaattttcccatgtgcaccattgcatctatgcccaggctaccagaacactgtattggagtatgtagggatgttgcagtggcctaaggagcagccttttggagaagggggttccattagatggagatgatcctggaacatatacaatggattttccaaaaatccctagagagagcatcacaatataatattaggggtgttacgtataggctcactcaaggggtagtaaaaagaatcattcctgcagtagcttccacaaatgcagtcattgcagctgtgtgtgccacctgaaggtttttaaaatagccacaagtgcatacattcccctttgaataattacttgggtgtttaatgatgtaggatgggctgtatacatacacatttgaaggcaggaaaggaaagggaaaactgcccagcttgtaggccagcttcctcaaaatatttcagtttttctccatcaggctaaactacagggaggttttggggattattctaaccaatagtgcttctctgcaaaatgaaatcctcccagccatcacagccaccctaggaggggaaaaaataggaacactttacttacagtcggtaacctctattggaggaacggaacagggccaattttttccaaacaattgaaaggaattggggcttgttggatggaccaaaaactggccggttgctggatgtcaccacccccacagactgtactattccaaacttccattttacttcttaagggaaaatctcccacataataggaaaactcatggaaataatatactttgtggatgcttaagaagttgaatccgatgtcatttttagcaataagtgttgccacggatttggtctttttttatataatggacccactctttttttaccttgtaaccttcccttgaagacagaattttgggtgttggtgcttgcaagcaagcattttcattaataatatgagaaatgatacctggagagagagattatgagcaaatgtattgcttcttttagaggaggaagcatacaacctctttttgtgtgaattttgttattatggtcaaagaatgcattcctaagttttcattttatgtattcaaatacacaaaaggtgtcccctttaagggaaataaagaattaaagttttaaataccattaccattttaccaatcctgaccatcctggagtatattgaaccatagggcctatttccttgatataacacctcatttaattgtggcccatcccaaatgaatattattgcaagaatttatcttgttcataatgatttgttaatgggtgttatagctgaataccctgtgcatgaaaatgggcaatattttcatctgtttacttgtagtgccatagaggccaatatgcacaatattaactaatgccaagacatggctgtttaaaaaatttaatgttcaaacagttatcactgatgcttttgcactatttattaataaaatcaatatattgtgt

SEQ ID NO: 136837 - DNA, 1722 bp, Homo sapiens
atgggtccagcttggctttggctactgggaacagggatcctggcctctgtccactgtcagccccttcttgcccatggagataaaagtctgcaggggcctcaaccccccaggcatcagctctcagagccagcccccgcctaccacagaatcacacccaccattaccaattttgctttgcgtttgtataaagagctggcagcagacgcccccggaaacatcttcttctcgccagtgagcatctccaccaccctggccctgctctctcttggggcccaagctaacacctcagctctgatcctggagggcctgggattcaacctcacagaaacccctgaagccgacatccaccagggcttccggagcctcctccacacccttgccctgcccagccccaaactcgaactaaaagtaggaaactccctgttcctagacaagcgactaaagcctcggcagcactatttggacagcatcaaggagctttatggagcttttgctttttctgccaacttcacagattctgttacaactgggaggcagattaatgactatttgagaaggcaaacatacgggcaagtcgtggactgcctcccggagttcagccaggacacgttcatggttcttgccaattacatcttcttcaaagccaagtggaagcaccctttcagtcgctaccagacccagaagcaggaaagtttctttgtggatgagaggacttctctccaggtccccatgatgcaccaaaaggaaatgcacagattcctctatgaccaggatttggcttgcaccgtcctccagatagaatacagaggaaatgccttggcgctgctggtcctccctgacccggggaaaatgaagcaggtgtcacacaaggcgatggtggacatgagtgagaaggggaccgaggccggggctgcttcaggcctcctctcccagcccccatctctgaacaccatgtcagacccacatgcccacttcaacaggcctttcctcttgctcctttgggaggtcaccacccagagcttactcttcctgggaaaagttgtcaacccagttgcaggcctttttaacagacttccactcctgctctggagctctcctcactctctttttctgcttcatgccccctggcaaattctttctgaggaggtaagaattgaagttcctgcagacaagtacggattcactgctggtaaaagaacagaagctcggagcctttcagtagcttgtagttcaggttcctggaaaacgcagatttgcatgcaagaagtttatcagggaacactctcaggaacaacctctgtgaaggagcaagaaaaacaggtttgcaccaaaggaaaacttcaacgcaattgcaacagcaatgtcagattgcacaggatgctctgtaatggagatatgccaaatgaaattgaagaggagcgagcctttgtacccccacatcaacccatcactgtcacatttttcggcccagtgaatctcatcttggattctcagactccctcctcttgcttccagtacctgagcctaagtcgcttcacagagtcttccctatctgcttcccacgtagccccgctggagaacagagggaagataccccagtgccatgtcttggggcaagagaaaatgaagacagacctggaacatgaacatggtggccttgccagaaagcaagtgtgtgttgctgaaacatcagcagagattgtcaaagggataaagagataa

SEQ ID NO: 136838 - DNA, 1055 bp, Homo sapiens
  misc_feature (1)...(1055): n = a,t,c or g
ggttatacatatgcggcgttctcatcatcatcatcatcatggnnnnnnnnnnnnnnnnnnnnnnnnnnnnnnnnnnnnnnnnntgtacgacgatgacgataaggatccgcagccccttcttgcccatggagataaaagtctgcaggggcctcaaccccccaggcatcagctctcagagccagcccccgcctaccacagaatcacacccaccattaccaattttgctttgcgtttgtataaagagctggcagcagacgcccccggaaacatcttcttctcgccagtgagcatctccaccaccctggccctgctctctcttggggcccaagctaacacctcagctctgatcctggagggcctgggattcaacctcacagaaacccctgaagccgacatccaccagggcttccggagcctcctccacacccttgccctgcccagccccaaactcgaactaaaagtaggaaactccctgttcctagacaagcgactaaagcctcggcagcactatttggacagcatcaaggagctntacggagcttttgctttttctgccaacttcacagattctgttacaactgggaggcagattaatgactatttgagaggcaaacatacgggncagtcgtggactggccttccggagntcagccacggacacgttcatggggtcttgccanntacatcntctttcannagccagtgggaagcacnctttcagtcgctaccagacccagaagccaggaaagntctttgnggatgagagggactctctcacggtcccatgaagcacccaagggaatgacagattccttatagacaggattggcctgcacgtcctcacatagaatcaaggaatgccttgcgctgctgtctccctgaaccggaaaaatgagcagtggagctgctttancccaacccgnaaaagggcatgtccggcagcgtgatgccctgcagttatttgaataaccgagaaaatcccaagggccccaaccattaataattaggtaggcggcaaaaatcatttcacaaaaagggattaaagacagcctgcg

SEQ ID NO: 136839 - DNA, 1689 bp, Homo sapiens
ggcttaagtcacaatccaccatttgtttgtgggacaggcagtcagggcagatactttgaaaaaaaagagcccttcctgtttgctgtgcattgtcttcataccagttcccagaattgacctgacaaatattgaccaggttgctgtgatcttcaaacaccattttcctgtgggtagaggtgatgcagtgctgaggacctgggcccctgctcagtgcctttgctctagaatgggtccggcttggctttggctactgggaacagggatcctggcctctgtccactgtcagccccttcttgcccatggagataaaagtctgcaggggcctcaacccaacaggcatacagctctcagagccagcccccgcctaccacagaatcacacccacccattaccaattttgctttgcgtttgtataaagagctggcagcagacgcccccggaaacatcttcttctcgccagtgagcatctcacaccaccctgtgcctgctctgtcttgggggcccaagctaacaactcagctctgatcctggagggcctgggattcaacctcacagaaacccctgaagccgacattcaccagggcttccggagcctcctccacacccttgtcctgcccagccccaaactcgaactaaaagtaggaaactccctgttcctagacaagcgactaaagcctcggcagcactattttgacagcatcaaggagctttaccgagcttttgctttttctgcccacttcacagattctgttacaactgggaggcagattaatgactatttgtaaaggcgaacatactggccaggcgtggacttgcctttccggagtcagccagagacacgttcatggttcttgcccaatttcattcttttttcaaaagccaaagtgaaagccaccctttccagtcgggtaccagaccccaaaagcaggccagttttcttggtggatgagaggacttctttcccaggtccccatgatgcaccaaaaggaaatgcacagattcctctatgaccaggatttggcttgcactgtcctccagatagagtagcagaggaaatgccttggcgctgctggtcctccctgacccggggaaaatgaagcaggtggaggctgctctgcagccacagaccctgagaaaatggggccaattgctcctgcccagtctgttggatttgcacttgccaaggttttcaatttctggaacatataacctggaagacatactttccccaaattggttctcaccaacatacacactcaacaagataacttctctgcagtcagtgggtggctagctaaacaaatccatatccaaggtgtcacacaagtcgatggtggacatgaatgagaagggggaccaaaggccggggctgcttcaggcctcctctcccagcccccatctctgaacaccatgtcagacccacatgcccacttcaacaggcctttcctcttgctcctttgggaggtcaccacccagagcttactcttcctgggaaaagttgtcaacccagttgtatgggtaaccatggtgggaggccaggagttatcttatctcatcctggaccaaacagataggccagaaccagcctgcatcctggggctgctatgtggttcagttaattagtggtgccaagattttaataaaagttggacctttgggttctgtgaaaaaaaaaaaaaaaaaaaaaaa

SEQ ID NO: 136840 - DNA, 681 bp, Homo sapiens; identical to SEQ ID NO: 132541

SEQ ID NO: 136841 - DNA, 1923 bp, Homo sapiens
atggccacccatgtcgaaaccgacagccctttcgccattcctgtagagggaagcggcgagggctatttcttattacatatattttatttcagatcagttttcagtgcttcaccgatatccgccaggctgcgaacggttttcacgcctgccggcttccagaccagcgaatttctcatccgcagtccctttcccaccggcaatgatggcacccgcgtggcccatacgtttgcctttcggcgcagtcacaccagcgatgtaacccacaactggcttggtaacgtgctctttgatgtacgcagctgcttcttcttcagcgctaccgccgatctcaccgatcatcacgatcgcttcggtctgcggatctttttcgaacatttcgagaatgtcgataaagttagagcccgggatcgggtcaccgccgataccgacacaggtcgactgaccgaaaccgtaatccgtggtctgtttaaccgcttcataggtcagtgtaccggaacgggaaacgatacccactttacccggtttgtgaatgtgaccaggctggataccgattttgcattcacccggagtgataacgcctgggcagttcgggccgatcatacgaacgcctgcttcatccagcttcactttcacggtcagcatatccagcgtcgggatgccttcagtgatggtgataatcagtttgatgcctgcgtcgatggcttccagaatggagtctttgcagaacggtgctggtacgtagataacagaagcggtagcgccagtggcagcaacggcttcacgcacggtgttgaacaccggcaggccgagacttctttagaggagacgaacgcagagcttaatcgcctgcgtgcgaatccgaaaattccattgattgttgccggttccgcggcagtggcggtcatggtcgcactgatcctgtgggcgaaagcccccgactaccgcacattattcagcaatctttccgatcaggatggtggcgcaattgtcagccaactgacgcaaatgaatattccttaccgcttcagcgaagccagcggcgctattgaagttccggcagataaagttcacgaactgcgtctgcgcctggcacaacaaggtttgccaaaaggcggcgcggtcggtttcgaactgcttgatcaggaaaagtttggtatcagccagttcagcgaacaggtgaattatcagcgggcgctggaaggcgagctttctcgtaccatcgaaactatcggcccggtaaaaggggcgcgcgtacatctggcaatgccgaaaccgtctttattcgtccgtgaacaaaaatccccttctgcatcggtgacggtaaatctgttacccggccgcgcactcgatgaagggcaaattagcgccattgtgcatctggtttccagcgccgttgctggtctgccgccgggaaacgtcacgctggtggatcagggcggacatctgttaacccagtccaataccagcgggcgcgatcttaatgacgctcagttgaaatatgccagcgatgtcgaaggccgtattcagcggcgtattgaagcgatcctgtcgcctattgttggtaacggtaatattcacgcccaggttacggcgcagctggacttcgccagtaaagaacaaacggaagaacagtatcgccctaacggtgatgaatctcatgcggcgcttcgttcacgccagcttaatgagagcgagcaaagcggttccggttatccgggcggcgtaccgggggcgttgtcgaatcaaccggcacctgcgaataacgcgccaatcagcacgcctccggcaaatcaaaataaccgccagcagcaggcgagcaccaccagcaatagtgggccgcgtagcacacagcggaatgaaaccagtaactacgaagtcgatcgcaccattcttagagcacagggcgtgatacccgccttgcga

SEQ ID NO: 136842 - DNA, 2289 bp, Homo sapiens
acctgaatttgaccaaccctgcgactaccgtccgttggcacaggataagttaccgcagaggcggtactgcaaaagccgacaacagcgaaggccgctgcgaataatgttttcaatttcatattcatgttaagcgagattttgtgcctggcaggccattgggttgagaatattagagtattggaagcgcattataagttcattccagctcacagtgaaattatgatgtgtacgaaatcacattttttgcctttggcttgagtgtagaccttaagcgaggagcaggatcttctttcagacttatggcataatgcgcggtttgtcatatctcttttcaggatacgcctgtgttagtttccagtaacgtcaccatgcagttcggcagtaagccgttgtttgaaaacatttccgtcaaatttggcggcggcaaccgttacggccttgattggcgcgaacggtagtgggaaatccacctttatgaagatcctcggcggcgaccttgagccgacgctgggtaacggttccctcgatcccaacgagcgccattggtaaactgcgtcaaggaccagtttgcctttgaagagttcactgtgctggatacggtgatcatggggcataaagagcttgtggaaagtgaagcaggagcgcgaccgcatctatgctttgccggaaatgagtgaagaagacggctataaagtggccgatctggaagttaaatacggcgaaatggccggttactctgcggaagctcgcgccggtgaactgttgcttgggcgtgggaattccagtggaacagcactacggcccgatgagtgaagttgctcctggctggaagctgcgtgtgcttctggcgcaggcgctgtttgctgatccggatattctcctgctcgacgaaccgaccaacaacctcgacatcgacaccattcgctggctggaacaggtgctgaacgagaataacagcacacatgatcatcatctcgcacgaccgtcacttccttaacatggtctgtacccacatggcggatctggattacggcgagctgcgcgtttatccgggtaactacgatgagtacatgacggcggcgacccaggcgcgtgaacgtctgctggccgataacgccaagaagaaagcgcagattgctgagttgcaatctttcattgataaaatcaaactggaagaggtgaaagcctccagccgtcagaacccgttcatccgttttgaacaggataagaaactgttccgtaacgcgctggaagtggaaggtctgaccaaagggtttgataacggtccgctgtttaaaaatctcaacctgctgctggaagtgggtgaaaaactggcggtactgggtaccaacggcgtcggtaaatcaacgctggctgaaaacgctggtgggcaatctgcaaccggacagcggcaccgtaaaatggtctgagaacgcgcgcattggttactatgctcaggaccacgaatatgagtttgaaaatgatctgcccgtgttcgaatggatgagccagtgcaagcagtaaggcgatgacgagcaggcggtacgcagtattttcggtcgtttgctgttcagccaggacgtcatcaaaaagccagctaaagtgctttccgcaccgttctgcaaagactccattctggaagccatcgacgcaggcatcaaactgattatcaccatcactgaaggcatcccgacgctggatatgctgaccgtgaaagtgaagctggatgaagcaggcgttcgtatgatcggcccgaactgcccaggcgttatcactccgggtgaatgcaaaatcggtatccagcctggtcacattcacaaaccgggcacgggtgaactgaatattaccaccggaggtatagttaaagcgcgtgatacacagatagctctcaatgacaaaagtaagggcgacgtgagggtggatgggcagaactctcttcttgaaacattcaatatgtacgtagggacatctggtacgggtacgttaaccctgacgaataacggtacgctgaatgtcgaaggtggagaagtttacttaggtgtttttgagcctgctgtaggaacgctaaacattggtgctgctcacggtgaggcggcggcagatgccggatttatcaccaatgcgacgaaagtggagtttggtcttggcgaaggcgtttttgtctttaatcataccaataacagtgatgccggctaccaggtcgatatgctgattacaggtgacgataaagacggaaaagtgatccatgatgcacgccatacggtgttcaatgcaggggaatacttatag

SEQ ID NO: 136843 - DNA, 580 bp, Homo sapiens
gcccagcagagtgcagttcggctcaccgagatcggcccgcggatgacactgcagctcatcaaggtccaggagggcgtcggggagggcaaagtgatgttccacagttttgtgagcaagacggaggaggatctgcaggccatcctggaagccaaggagaagaagctgcggctgaaggcgcagaggcaggcccagcaggcccagaatgtgcagcgcaagcacgagcagcgggaggcccacagaaagaagagcctggagggcatgaagaaggcacgggtcgggggtagtgatgaaaaggcctctgggatcccttcaaggacggcgagcctggagttgggtgaggacgatgatgaacaggaagatgatgccatcgagtatttttgccaggcggtgggcgaggcgcccagtgaggacctgttccccgaggccaagcagaaacggcttgccaagccgcactggagcagcggctggattgaacgccccagattggggcccgagatgtggccctcggtttcctttcataaaggagttgtgtccccagcccttccactccagtaaaaaactgcattggcaaaaaaaaaaa

SEQ ID NO: 136844 - DNA, 2732 bp, Homo sapiens
ttttgccttcctgatctttactggagtggaagggctggggacacaactcctttatgaaaggaaaccgagggccacatctcgggccccaatctggggcgttcaatccagccgctgctccggtgcggcttgggctcaggccactcttttccctgggcggccccggccccggcctcgcccaccatcccgggaagcccctctgggcccccgcctggcctgggctccctgggacttgtccttggtcttgggaaacttttggtcacaaagggcaacccttgcctagatccatttcccaccgcttccgcttccgccctggagacttggcaagccgtttctgcttggcctcggggaacaggtcctcactgggcgcctcgcccaccgcctggcagaaatactcgatgtcatcatcttcctgttcatcatcgtcctcacccaactccaggctcgccgtccttgaagggatcccagaggcctcttcatcactacccccgacccgtgccttcttcatgccctccaggctcttctttctgtgggcctcccgctgctcctgcttgcgctgcacattctgggcctgctgggcctgcctctgcgccttcagccgcagcttcttctccttggcttccaggatggcctgcagctcctcctccgtcttgctcacaaaactgtggaacatcactttgccctccccgacgccctcctggaccttgatgagctgcagtgtcatccgcgggccgatcggatgcacgaacagctcttttttgataccgcagccgttatcacgaatgcggataagtttcgccccaccgcgttcgatatcaatatcgatacgcgtcgcacctgcatcgaggctgttttccactagttctttgactaccgacgcaggtcgctcgaccacctcacctgcggcaatctggttcgccagttgtggcggtaagactggcagtttgtgccgttgcaccctgcggcgcagattgcatcggatgcgcaaggaagtaattgcgcaggcctttgtaaatggcttctgccagctgttgttggtaatcgtcgctcgcccagcaaacgttcttcgctgttgttgctgataaaaccggtttcgaccagtactgatgggatatccggcgagcggggtaaccgtgtatcagctgaccagccgtggggaccatgagctgctggttctcctggaggactgggggggccgtggagcacgtgcccactatgatggcttctccctggaacccgagagcgaccactaccgcctgcggcttggccagtaccatggtgatgctggagactctctttcctggcacaatgacaagcccttcagcaccgtggatagggaccgagactcctattctggtaaggagaactcctattctggtgagaggataggggaggcgggactcctgttctggtgagggaatgaaaggaggtagggtaggtaagacgcccctctggtaagtataaggataagcaagcttttattccgtcaagagaacaaaggtcaggacttttatcctggtggggggatggggagtccagattccttctctgatgaggcaaaaaaagaatcaagactcctgttcaagtaaagggcagagggtgagagctagtactcttattctagaaaggaagtagatccttttctttgataaaggaatgcccgcgcagactcctagtttgcagaaaaggtgggaaaagatgtgacttgtactttggtaaggagatagggaaggaattaaggctattactctgaagaaagttggggggccagggctcctatttttttgctgaggagatggaagatcagggcttgtattcaataagaatgggaggggccaggggattgcctggcaaaagccttgcactgtgaggtgcaggtagaggcttttattctggtgagaggacatggactctctctctcccctcaggtaactgtgctcctgtaccagcggggaggctggtggtaccatgcctgtgccccactccaacctcaacggtgtgtggcaccacggcggccactaccgaagccgctaccaggatggtgtctactgggctgagtttcgtggtggggcatattctctcaggaaggccgccatgcctcatttggcccctgaagctgtgactctgtgttcctttggtcccctaggccctagaggacattggtcagcaggagccccaagttgttctggccacaccttctttgtggcttaatgccaatgtgtcccacagaacttcccactgtggttcttgggaccctggggcgctgaaaatggggaccccagaatccccccccgccatatcttgggcctcaaaagggcttccccaaggtcattcatatctcggtttgagctcatatcttactaataacacaaagtagccacagaccgtgtctggtttgtatctgcacctggcaggggtcactccctgggcccgccctccttcgtcctccacctcctcctcttcctcctcctcctccttcaggtcctccaggatgaggttgtccaggtcttccaggaggccaccctggctcaagcaggaagccacagtggagccactgctaatgtgaggtgttgctggggtggagcactttgggcaggtggttctgcttccggctcttggggtgagcacaggatgtcccaggcacgtggggctctcgccggttgtagcagtcggcagctgagcaggagtgagtgtgggtgctgcggcgatccgggtctcggtctccggacgcgtgt

SEQ ID NO: 136845 - DNA, 210 bp, Homo sapiens
  misc_feature (1)...(210): n = a,t,c or g
ttctcgggtcgacaatttcgtcggatcctgtaggccgcggcggaccccttgcgccacctgcgccgcggggcatttatcaaggcgggtcggcatgcgggtcgnnnnttncggtatgcctgcaggcgaccgcactactgaatggatctcgcccgcctcgcactggtactggtggtcaggacctcggccagcacgaaatcgtcgacccgggaa

SEQ ID NO: 136846 - DNA, 1192 bp, Homo sapiens
ctagcgatttcccgggtcgacgatttcgtggcgtgagaagccatgaggtgagttggtcctgaaagccctatccgcgttcatccgcgccttcagggtgccccgccgagggttcggatcctgtaggccgcgccgcggacccttgcgccacctgcgccgcaggggcatttctcaaggcgggtcaggcctgcgggtcgcccttcctaccaggtccgaccactgagagcctccctcttccaccggggcttgggtctgggtctgagctcccgtagctctacttggtgtccgaaatctacgggggagtccgccgtgggccgcccgcccgtctcgaagcctagacctcggaggcttccaggcagtccgagcgtgtggactcccgcggccttgagcgccctgtagcttctctcccgcatcagcaaagtctcatcgaaactccctgtacgaggcggtgcgggaagtctctgcacgggagaccagcgcaagtcgccgcaagttccttggagacggtggagttgcagatcagcttgaagaactatgatccccaggaaggacaaagcgctttctcggggcacccgtccaggctttaagtccacttccccgcccttaagttctctggtgtgtgtccttgggggacccagcaagcacttgtgacgaaggctaaggcccgtgggatatccccccacaatggacatcgaaggcgcctgaaaaaaactcaaccaagaattaaaaaacttggtcaagaaagctggcccaagaaagtatgattgcgttttttggcctcaagagtctcttgattcaagcaagattccaccgaatccctccggcccagggtttaaataaagggcaggaaaagttccctttccctgcttaacacacaacggaaaacatgggttggcccaaagtgggattgaggttgaagttcccacatttcaagtttccaaatgaagaaaggtgtttatgtctgggctgtagctgtttggtcacgtgaaagatgacagactaatgagctagtgtataacattcacctggcttgtcaactttcttgggtgtcattgctcaaagaaaaaaactggcagaaatgttccggggccttatattatcaagagcaccatggggcaaagccccagcagccatatattaaggcacattagaataaattctattaccagttaaaaaaaaaaaaaaaaagggcgcc

SEQ ID NO: 136847 - DNA, 496 bp, Homo sapiens
tccgtttccagggttccgaccaggtcgttgaggacttccacatggagattggcacaggaccagactcaagacacacaactcataacagttgatgaaaaattggatatcactactttaactggcgttccagaagagcatataaaaactagaaaagtcaggatctttgttcctgctcgcaataacatgcagtctggagtaaacaacacaaagaaatggaagatggagtttgataccagggagcgatgggaaaatcctttgatgggttgggcatcaacgatggagctatgacattgaagagaggaaggttccaaaacccaagtccaagtcttatggtgcaaacttttcttggaacaaaagaacaagagtatccacaaaataggttggcactgactatatctctgcttgactgtgaataaagtcagctatgcagtatttatagtccatgtataataaatacatctcttaatctcctaataaattgggcctttaaactaca

SEQ ID NO: 136848 - DNA, 483 bp, Homo sapiens
gcacgagaggtgaaattgaatcatagtttacatctttaacaatttgagatatggtaaataatctgcaggcaatcttttggacccttttctcacagaggattataagggaacaaatagtaagtatatctcagatgtgttgacatatactcttgatgataaatgaacattaagttaagttataaaagctagcctctgcttgctgtgcttttcaggtatcctctttaattctgtttctgtggatttgtctttgttttttcctcctaggatggagctatgacattgaagagaggaaggttccaaaacccaagtccaagtcttatggtgcaaacttttcttggaacaaaagaacaagagtatccacaaaataggttggcactgactatatctctgcttgactgtgaataaagtcagctatgcagtatttatagtccatgtataataaatacatctcttaatctcctaataaattggacctttaaacta

SEQ ID NO: 136849 - DNA, 736 bp, Homo sapiens
  misc_feature (1)...(736): n = a,t,c or g
tcatcctggcgtttgcctgcagcaagatggcggcggtgtcaatgtcagtggatactgaggcagacgttgtggcggagaagggcagtggctgtagctgcccttttccgtttccagggttccgacccnaggtcgttgaggacttccacatggagatttggcacatgagccagactcaagacacacaactcattaccagttgatgaaaaattgggatatcacttacctttaactggccgttcccagaggagcatattaaaaacttggaaaagtcagggatctttgttccctgctcgccaataacatgccagtctggagtaaacaacacaaaagaaatggaaggatggagtttgatacccagggagcggatgggaaaatctctttgatgggtttgggcatcaaccggcttgatccccttatcccaacatggttcttaaccttccagtacttaaagaagatgcagtttccctttgcagaaaaaaaatggatgggagctatggacattggaagagaggaagggttccaaaacccaagtcccaagtctttatgggtgccaacttttccttggaacaaaagaacaagagtatccaccaaaataggtttggcactgactatatctcctgcttgactgtgaataaaagtcacgctgtgcagtatttatagtccatgtataataaataacatcccttaatctccctaataaattggacctttaaactacaaaaaaaaaaaaaaaaaa

SEQ ID NO: 136850 - DNA, 1945 bp, Homo sapiens
atgaacaaagtgaacccgacacagcaggataaagaggaccaccctgaacttataattacctctataggggataaacgccagctcacgttggaggcggcatctggtgtgtgccaccgcgggacacagactagggtcaaagaggaaagtaagaaatttcttatctccatgtcattcagaggcggaaaaccagttcacaaggtggtagagcgtgcctgtgtgtgtacctgcctgcaccacacgtctgtgcccgcaacacacaacacacaacgacgacacaccaccccgaccacaaggaaaaacggaaggaagagaagagggaaaaaagagcgagaaaagcggaaggaccgagagcacaacacagggagaaggacgaaaagaaaaaagacaaggaacataggcggacagcgaacgcagcaaaagcaaaaacaaagcgaagacaaagcacgacgagaaccaggcggtgggaggaagcagggaagggggagagaggacggaacgagacagaggcggggagggcggacccggaatagggaagagggcgcgcagaggggtcgaaacggaagggaggggaagggaggagaacggaggaagaaacacatatggcctaggcgccagacatcaccgctacccagcagacggaacaacaagggcacggcacgagacaacgcgacaccacgctccgaaggcacacagcggaagacgcacaaccctcggagcacgcgagcgccgaccaagcccacaccaagaaaacagaatagagtgtctcgagaacgaacgggcagtatttgcttacatgacaaagaccgaaagattctcttcagtggagacgtcgtgtatgatggatcactgattgactggctcccatacagcaggataagtgactatgttggaacttgtgaacgtctaatagaattagtggacagaggtctggtagagaagcgaagattacgtctcagagtcttctgtcacagcatgacacttgaacgatgtgacaagatgccgtcagcgaatatttcacgccaacataaagttgtgggagaaatgctgtgtttgggtgggaaattagctgcccagcagggagcactctgcgagaagatggccaaaaggtccgccgccgccgctgtcccggccccgcccttgactccgctccttccgtgccgcttcactccccgaggaaaagatttggtggccaagtcagcggatccaacccgcgaccaccagcgacctactggctgcgtctttgtccagcgtccacactgcgctggcagagactgtcgggtagcagatatcaagagagttaacaatctcatcagtgatcaagacttttttgcccttaggtctatcaaaattccagtaaaaaagttcagttccttgaccgaaacactttgtcctccaaaaggaagacagacttcacgtcattcatctgttcaatactcttccgaacaacaggaaattttgccagctaatgattctcttgcttacagtgactcagctggtagctttttaaaagaagtagaccgagacatagaacaaatagtaaagtgtacagacaataagagagagaacctcaatgaggtagtatcggccttaacagcacaacaaatgcgttttgaacctgataacaaaaacactcaacgtaaagacccctattatggagcagactggggaatataggaggcggacagctgtagtgataaaggtgatagcaagtataataacaccagtgttctatttgttgtattatgaaattttagctaaggtggatgttagtcatcattcaacagtggactcttcacatttacattcaaaaatcacacccccatcacagcagagagaaatggaaaatggaattgtgccaactaaaggaatacatttcagccaacaagatgatcataaactgtatagtccagattctcagtcacctgctgctcaacaggaaacatag

SEQ ID NO: 136851 - DNA, 642 bp, Homo sapiens
  misc_feature (1)...(642): n = a,t,c or g
ggcacgaggcctggacttcccggaccccccggaccccccggacctcccggaccccctggcctcggaggaaactttgctccccagctgtcttatggctatgatgagaaatcaaccggaggaatttccgtgcctggccccatgggtccctctggtcctcgtggtctccctggcccccctggtgcacctggtccccaaggcttccaaggtccccctggtgagcctggcgagcctggagcttcaggtcccatgggtccccgaggtcccccaggtccccctggaaagaatggagatgatggggaagctggaaaacctggtcgtcctggtgagcgtgggcctcctgggcctcagggtgctcgaggattgcccggaacagctggcctcccntggaatgaaggggacncagaagtttnaagtgggttttgggaatggtgccaaggggaagatgctgggtcctgctgggtcctaaagggtgaagcctggcagccctgggtgaaaatgggagctcctggtcaagatgggccccccgtggcctgcctggtngagagaggtcgcccttggagccccngggccctgctggtgctcgtgggaaatgatggtgctactggtgctgcccgggccccctgggnccccaccggccccgct

SEQ ID NO: 136852 - DNA, 4821 bp, Homo sapiens
ggggcagcagacgggagtttctcctcggggtcggagcaggaggcacgcggagtgtgaggccacgcatgagcggacgctaaccccctccccagccacaaagagtctacatgtctagggtctagacatgttcagctttgtggacctccggctcctgctcctcttaagcggccaccgccctcctgacgcacggccaagaggaaggccaagtcgagggccaagacgaagacatcccaccaatcacctgcgtacagaacggcctcaggtaccatgaccgagacgtgtggaaacccgagccctgccggatctgcgtctgcgacaacggcaaggtgttgtgcgatgacgtgatctgtgacgagaccaagaactgccccggcgccgaagtccccgagggcgagtgctgtcccgtctgccccgacggctcaagagtcacccaccgaccaaagaaaccaccgggcgtcgagggacccaagggagacactgggcccccgaggcccaaggggacccgcaggcccccctggccgagatggcatccctggacagcctggacttcccggaccccccggaccccccggacctcccggaccccctggcctcggagggaaacttttgctccccaagctgtcttatggctatgatgagaaatcaaccggaggaatttccgtgcctggccccatgggtccctctggtcctcgtggtctccctggcccccctggtgcacctgtgagtatccaggacgtcttcatatgcctccttgggctttggtcttttggagggaagactgggatgagggcaggagagatgctcagagatctcttgggtccccaaggcttccaaggtccccctggtgagcctggcgagcctggagcttcaggtcccatgggtccccgaggtcccccaggtccccctggaaagaatggagatgatggggaagctggaaaacctggtcgtcctggtgagcgtgggcctcctgggcctcagggtgctcgaggattgcccggaacagctggcctccctggaatgaagggacacagaggtttcagtggtttggatggtgccaagggagatgctggtcctgctggtcctaagagtcccaccatgaatgaatttctcactcattattctctgatctacagggtgagcctggcagcccttggtgaaaatggagctcctggtcagatgggcccccgtggcctgcctggtgagagaggtcgccctggagcccctggccctgctggtgctcgtggaaatgatggtgctactggtgctgccgggccccctggtcccaccggcaccgctggtcctcctggcttccctggtgctgttggtgctaagggtgaagctggtccccaagggccccgaggctctgaaggtccccagggtgtgcgtggtgagcctggcccccctggccctgctggtgctgctggccctgctggaaaccctggtgctgatggacagcctggtgctaaaggtgccaatggtgctcctggtattgctggtggctcctggcttccctggtgcccgaggcccctctggaccccagggccccggcggccctcctggtcccaagggtaacagcggtgaacctggtgctcctggcagcaaaggagacactggtgctaagggagagcctggccctgttggtgttcaaggaccccctggccctgctggagaggaaggaaagcgaggagctcgaggtgaacccggacccactggcctgcccggaccccctggcgagcgtggtggacctggtagccgtggtttccctggcgcagatggtgttgctggtcccaagggtcccgctggtgaacgtggttctcctggccctgctggccccaaaggatctcctggtgaagctggtcgtcccggtgaagctggtctgcctggtgccaagggtctgactggaagccctggcagccctggtcctgatggcaaaactggcccccctggtcccgccggtcaagatggtcgccccggacccccaggcccacctggtgcccgtggtcaggctggtgtgatgggattccctggacctaaaggtgctgctgtgagtattaaggagagcccggcaaggctggagagcgaggttgttcccggaccccctgggcgctgtcggtcctgctggcaaagatggagaggctggagctcagggaccccctggccctgctggtcccgctggcgagagaggtgaacaaggccctgctggctcccccggattccagggtctccctggtcctgctggtcctccaggtgaagcaggcaaacctggtgaacagggtgttcctggagaccttggcgcccctggcccctctggagcaagaggcgagagaggtttccctggcgagcgtggtgtgcaaggtccccctggtcctgctggtccccgaggggccaacggtgctcccggcaacgatggtgctaagggtgatgctggtgcccctggagctcccggtagccagggcgcccctggccttcagggaatgcctggtgaacgtggtgcagctggtcttccagggcctaagggtgacagaggtgaaagtggtcccagcggccctgctggtcccactggagctcgtggtgcccccggagaccgtggtgagcctggtccccccggccctgctggctttgctggcccccctggtgctgacggccaacctggtgctaaaggcgaacctggtgatgctggtgctaaaggcgatgctggtccccctggccctgccggacccgctggaccccctggccccattggtaatgttggtgctcctggagccaaaggtgctcgcggcagcgctggtccccctggtgctactggtttccctggtgctgctggccgagtcggtcctcctggcccctctggaaatgctggaccccctggccctcctggtcctgctggcaaagaaggcggcaaaggtccccgtggtgagactggccctgctggacgtcctggtgaagttggtccccctggtccccctggccctgctggcgagaaaggatcccctggtgctgatggtcctgctggtgctcctggtactcccgggcctcaaggtattgctggacagcgtggtgtggtcggcctgcctggtcagagaggagagagaggcttccctggtcttcctggcccctctggtgaacctggcaaacaaggtccctctggagcaagtggtgaacgtggtccccctggtcccatgggcccccctggattggctggaccccctggtgaatctggacgtgagggggctcctggtgccgaaggttcccctggacgagacggttctcctggcgccaagggtgaccgtggtgagaccggccccgctggaccccctggtgctcctggtgctcctggtgcccctggccccgttggccctgctggcaagagtggtgatcgtggtgagactggtcctgctggtcccaccggtcctgtcggccctgttggcgcccgtggccccgccggaccccaaggcccccgtggtgacaaggggctctcctggtgaacaaggtccctctggagcctctggtcctgctggtccccgaggtccccctggctctgctggtgctcctggcaaagatggactcaacggtctccctggccccattgggccccctggtcctcgcggtcgcactggtgatgctggtcctgttggtccccccggccctcctggacctccttggtccccctggtcctcccagcgctggtttcgacttcagcttcctgccccagccacctcaagagaaggctcacgatggtggccgctactaccgggctgatgatgccaatgtggttcgtgaccgtgacctcgaggtggacaccaccctcaagagcctgagccagcagatcgagaacatccggagcccagagcggagccgcacagaaccccgcccgcacctgccgtgacctcaagaatgtgccactctgactggaagagtggagagtactggattgaccccaaccaaggctgcaacctggatggccatcaaagtcttctgcaacatggagactggtgagacctgcagtgtaccccacatcagccgcagtgtggccctagaagaatctggtacatcagcagagaaccccaagggacaagaaggcatgtctggttcggcaaaaggcatgaccgattgaattcaagttcgagtatggcggcaaggggctccgaccccttgccggatgtggacattcaagctgacctttcctgcggcttgatgtcccacccgaggccttcccagaaacatcaccttaccactgcaagaaacagggtgggcctaacttggacccagcagacttggcaacctcaaagaagcgccctgctcctccaggggctccaacgaagatcgagatcccgcgccgaggggcaaacagccgcttcaccttacagcgtcacctgtcgattggctgcacgagtcacaaccgggagccctggggcaagacagtggattgaatacaaaaccaccaagacctcccgcctgcccatcatcgatgtggcccccttggaggttggtgcccagaaccaggaattcggcttcgacggttgcccctgttctgcttcctggaaaactccctccatcccaacctgggctccctcccaccccaaccaactttcccccccaacccggaaacagacaagcaacccaaactgaaccccctcaaaagccaaaaaaatgggagacaattttcacatgggactttggaaaatattctcttcctctgcactcatctctcacacctacgttttcatctttgacccaccgacacatgcccaaaaacccaacgtccattcaaccttaccaaaaaaaaaaaaaaaaaaaaaagaataaataaataacttttta

SEQ ID NO: 136853 - DNA, 392 bp, Homo sapiens
  misc_feature (1)...(392): n = a,t,c or g
ggtcatacatcatcgtgtttgtaagagaagatggtcattttattctctgtataaaacttagctctaaagcagaaactaaagcagcaaatgcaggaaggctgtctcgccatcctcaagactcagcagctctcattctccagtggtgagcacaccatttgtgctgctgctgttgtcgtgaaaaataataacagtggaagtcacaaaaatgtcccctgcccagccccctcgccgcccttgacctcctgcaggccatgtgtgtattacttgtctagtgatgtcctctctgctcgctgcattgtggtgttctcttctcaaggctttgaaatctccccttgcactgagattagtcgtcagatctctccccgtctccctncccaacttataangaccng

SEQ ID NO: 136854 - DNA, 470 bp, Homo sapiens
atttcccgcgtcgacgatttcgtcgcgcccacctgaggaggcggcggggtccgcaggcgtcgcgggacgaggagatcggagccgggagactcgcgcagcgccatggcccccattggcctcaaagctgttgtcggagagaagattatgcatgatgtgataaagaaggtcaagaagaagggggaatggaaggtgctggtggtggatcagttaagcatgaggatgctgtcctcctgctgcaagatgacagacatcatgaccgagggcataacgagtgagcatgcgctctgcacttgagcagtgctggagccttctctctgtggcgggcttagctctttcctattcattattatctcctttgattttagattcttccagcaacctgtgtgctaagaccagaagctcctgagaggcgcaaggctatcttgttcatcactgaatccctagcaccaaatccagaccctgcggagagc

SEQ ID NO: 136855 - DNA, 3827 bp, Homo sapiens
ctgacgcgcggctgcggggcggagagctgcggctggcccagcgcgcccacctgaggaggcggcggggtccgcaggcgtcgcgggacgaggagatcggagccgggagactcgcgcagcgccatggcccccattggcctcaaagctgttgtcggagagaagattatgcatgatgtgataaagaaggtcaagaagaagggggaatggaaggtgctggtggtggatcagttaagcatgaggatgctgtcctcctgctgcaagatgacagacatcatgaccgagggcataacgattgtggaagatatcaataagcgcagagagccgctccccagcctggaggctgtgtatctcatcactccatccgagaagtccgtccactctctcatcagtgactttaaggacccgccgactgctaaataccgggctgcacacgtcttcttcactgactcttgtccagatgccctgtttaatgaactggtaaaatcccgagcagccaaagtcatcaaaactctgacggaaatcaatattgcatttctcccgtatgaatcccaggtctattccttggactctgctgactctttccaaagcttctacagtccccacaaggctcagatgaagaatcctatactggagcgcctggcagagcagatcgcgaccctttgtgccacccctgaaggagtacccggcctgtgcggtatcggggggaatacaaggacaatgccctgctggctcagctaatccaggacaagctcgatgcctataaagctgatgatccaacaatgggggagggcccagacaaggcacgctcccagctcctgatcctggatcgaggctttgaccccagctcccctgtgcttccatgaatttgactttttcagggtatgagttattgatcttgcttgcctattcgaaaatgatgtattacaagtatgagaccagcggcattgggggagggcacggggttaagggaggtgcttctgggacggaggacgacgacctgtgggatagcactgcgcccacaagcacatcgcagaggtgttcccagggaagtcacccggtctctgaaagatttttcttctagcaagagaatgaatactggagagaagaccaccatgcgggacctgtcccagatgctgaagaagatgcctcagtaccagaaagagctcagcaagtactccacccacctgcaccttgctgaggactgtatgaagcattaccaaggcaccgtagacaaactctgccgagtggagcaggacctggccatgggcacagatgctgagggagagaagatcaaggaccctatgcgagccatcgtccccattctgctggatgccaatgtcagcacttatgacaaaatccgcatcatccttctctacatctttttgaagaatggcatcacggaggaaaacctgaacaaactgatccagcacgcccagatacccccggaggatagtgagatcatcaccaacatggctcacctcggcgtgcccatcgtcaccgattccacgctgcgtcgccggagcaagccggagcggaaggaacgcatcagcgagcagacctaccagctctcacggtggactccgattatcaaggacatcatggaggacactattgaggacaaacttgacaacaaaccactacccttaatatctctacccgttcctctgcctccttcagcaccacggccgttcagcgcccgctatgggcactggccataaggaacaaggcccccaggcgagtaccgcagtgggcccccgtcttcatcatttttcatcccttggggggtgtgagcctgaatgagatgcgctgcgccttacggaggtgacccagggccaacggaaagtggggaggtgcttgatagggttccacacacatccttcaaccccacagaaacctgcctggacacactgaagaaacctgaataaaacagatgaagaaataagcagttaaaaaaataagtcgcccctccaaaacacgcccccatcccacagcgctccgcagcttcccaccaccgcccgcctcagttcctttgcgtctgttgcctccccagccctgcacgccctggctggcactgttgccgctgcattctcgtgttcaagtgatgccctcatcttgtttgaaacagaaagaaaagtatatgcaattgtgttttttaaaaagagtatcttatacatgtatcctaaaaaagagaagctcatgtggcaattgggtgcacagcagggaggaaatttctggactgttaggatgaatggacgccttctccccgttatttaagatttgtgaccttgtacataaccctgtgtgacgtgcacattgcttgggtatggaacggtagaaatttgggtgtttttaaaaccttgtttggggttgttcctgtccttgttgagaatcatagagatgtctgtgttcttggagtatttcacactgaggactaatctgctatcttcattccagtccctacccctcagtgcctgctctcattcaaataacctgggaggtgacaatcaagatatctcaggaggtccaaggtggaacagacctctttggctttcccagcgtcttatacccccggtagtgcagctgtgggtggaggctggggtgtctgcacgaaatcaggccagcgtcctcctccacagcctgtcactgccccctccccagcctgtgtccacagtgctgtgatcccgagggaagtcctccagtctaagtcacagtgccctgacaggtgagaagcaaactcccactggaagcctccatctctttggaaaaacagttagtctggagcctgtggcccaggcccttctgtccccaggcatcatcccaacagctcattttccctagtccgccttcgttcaagggtcaggaatggaccagaacagatgggttctggaggcccctgaacagagggctatggctgtggagaaggttcttggacccgttggactcacacagaccctgtaccctctcggcaagcatcttcagtcagattatcctcagtttcagatacttcataataccttgtgttgtgtggggtcatacatcatcgtgtttgtaagagaagatggtcattttattctctgtataaaacttagctctaaagcagaaactaaagcagcaaatgcaggaaggctgtctcgccatcctcaagactcagcagctctcattctccagtggtgagcacaccatttgtgctgctgctgttgtcgtgaaatataataacagtggaagtcacaaaaatgtcccctgcccagccccctcgccgcccttgacctcctgcaggccatgtgtgtattacttgtctagtgatgtcctctcaaaagtgctgtacgcgagctcggcgccacctccgcctccctttcagagcctgctccccgccctctccgctcgctgcattgtggtgttctcttctcaaggctttgaaatctccccttgcactgagattagtcgtcagatctctccccgtctccctcccaacttatacgacctgatttccttaggacggaaccgcaggcacctgcgccgggcgtcttactcccgctgcttgttctgtcccctccctcggaccaaacagtgctcatgcttcaggaccttgtttgtcgaagatgttggtttccctttctctgttatttatataaaaataatttatcaaaaggatattttaaaaaagctagtctgtcttgaaacttgtttaccttaaaattatcagaatctcagtgtttgaaagtactgaagcacaaacatatatcatctctgtaccattctgtactaaagcacttgagtctaataaataaagaaatcagcaccccttcccggtgtccagggggaaaaaaaaa

SEQ ID NO: 136856 - DNA, 4008 bp, Homo sapiens
tttcgtgccgcggagagctgcggctggcccagcgcgcccacctgaggaggcggcggcgtccgcatgctgtgcgggacgaggagatcggagccgggagactcgcgcagcgccatggcccccattggcctcatagctgttgtcggagagaagatcatgcatgatgtgatgctgaacgacctgaacatgggggaatggaaggcgctgttggtggatcagttaagcatgaggatgctgtcctactgctgcctgatgacagacatcatgaccgagggcataacgattgtggaagatatcaataagcgcagatagccgctccccagcctggaggctgtgtatctcatcactccatccgagaagtccgtccactctctcatcagtgactttaaggacccgccgactgctaaataccgggctgcacacgtcttcttcactgactcttgtccagatgccctgtttaatgaactggtaaaatcccgagcagccaaagtcatcaaaactctgacggaaatcaatattgcatttctcccgtatgaatccagggtctattccttggactctgctgactctttccaaagcttctacagtccccacaaggctcagatgaagaatcctatactggagcgcctggcagagcagatcgcgaccctttgtgccaccctgaaggagtacccggctgtgcggtatcggggggaatacaaggacaatgccctgctggctcagctaatccaggacaagctcgatgcctataaagctgatgatccaacaatgggggagggcccagacaaggcacgctcccagctcctgatcctggatcgaggctttgaccccagctcccctgtgctccatgaattgacttttcaggctatgagttatgatctgctgcctatcgaaaatgatgtatacaagtatgagaccagcggcatcggggaggcacgggtgaaggaggtgctcctggacgaggacgacgacctgtggatagcactgcgccacaagcacatcgcagaggtgtcccaggaagtcacccggtctctgaaagatttttcttctagcaagagaatgaatactggagagaagaccaccatgcgggacctgtcccagatgctgaagaagatgcctcagtaccagaaagagctcagcaagtactccacccaccttgcaccttgcttgaggacttgtatgaagcattaccaaggcaccgtagacaaactcttgccgagttggagcaggacctggccatgggcaacagatgctgaagggagagaagattcaaggaccctatgcgagccatcgtccccattctgctggatgccaatgttcagacttattgacaaatccgcatcatccttctctacatctttttgaagaatggcatcacggaggaaaacctgaacaaactgatccagcacgcccagatacccccggaggatagtgagatcatcaccaacatggctcacctcggcgtgcccatcgtcaccgattccacgctgcgtcgccggagcaagccggagcggaaggaacgcatcagcgagcagacctaccagctctcacggtggactccgattatcaaggacatcatggaggacactattgaggacaaacttgacaccaaacactacccttatatctctacccgttcctctgcctccttcagcaccaccgccgtcagcgcccgctatgggcactggcataagaacaaggccccaggcgagtaccgcagtggcccccgcctcatcattttcatccttgggggtgtgagcctgaatgagatgcgctgcgcctacgaggtgacccaggccaacggaaagtgggaggtgctgataggttctactcacattcttactcccaccaaatttctcatggacctgagacaccccgacttcagggagtcctctagggtatcttttgaggatcaggctccaacaatggagtgagagccaaagaaacaaagatccacacacatcctcaccccacagaaactgctggacacactgaagaaactgaataaaacagatgaagaaataagcagttaaaaaaataagtcgcccctccaaaacacgcccccatcccacagcgctccgcagcttcccaccaccgcccgcctcagttcctttgcgtctgttgcctccccagccctgcacgccctgggctgggcactgttgccgctgcattctcgtgttcagtgatgccctcttcttgtttgaaacaaaagaaaattaatggcattgtgttttttaaaaagagtatcttatacatgtatcctaaaaagagaagctcatgtgcaattggtgcacagcaggagaaatttttggactgttaggatgaatggacgccttctccccgttatttaagatttgtgaccttgtacataaccctgggtgacgtgcacattgcttggggtatgggaacggtaggaaatttggggtgtttttaaaaaccttgtttgggggttgttcctgtccttggttgagaatcatagagatgtctgagttcttggagtatttcacactgagggactaatctgctatcttcattccagtccctacccctcagtgcctgctctcatccaaataacctggggaggtgacaatcaggatatctcaggaggtccaaggtgggaacagaacctctttgcctttcccagcgtcttcatacccccggtagtggcagctgtggggtgggaggctgggggtgtcttgcacgaagttcagggccagcgtcctacttccacagcctgtcactgccccttcccccagcctgtgttccacagtgttgttgatcccgagggaagtcctccagtcttaagtcacagtgcccttgacagggtgaggaaggcaaacttcccgctgggaagcctccatcttctttgggaaaaacagtttagtctgggagcctgtggcccaggggcctttttgttccccaggggattcattcccaaacaagttcattttttccctaagttcccgcctttgtttcaaaggggttcagggaatggaccagaacagatgggttctggaggcccctgaacaggagggctatggctgtggagaaggttcttggccccgttggactcacacagaccctgtaccctctcggcaagcatcttcagtcagattatcctcagtttcagatactttcataataccttgtgtttgtgtggggtcatacatcatcgtgtttgtaaagagaagatggtcattttattccccgtataaaacttaggtctaaagcagaaactaaagcagcaaatgcaggaaggctgtctcgccatcctcaagactcagcagctctcattctccagtggtgagcacaccatttgtgctgctgctgttgtcgtggaaatataataacagtgggagtccacaaaaatgtccccctgccccagccccctcgccggcccttgacctcctggaaggccatgtgtgtaattacttggtcctaagtggatgtccttcttcaaaagtgctgtaacgcgaagctcgggcgccaacctcggccctcccctttcaagagcctgctcccccgccctctctggctcgctggcattgtggggtgtttcttcttcttcaagggttttgaaaatcttccccttggcaatgaggattaggtcgtcagatctctcccccgtctcccctccccaacttatacggccctggatttcccttagggacgggaacccgcagggcaccctgcgccgggcgccttactccccgctgcttgttctgtcccctccctcggaccaaacagtgctcatgcttcaggaccttgtttgtcgaagatgttggtttccctttgctctgttatttatataaaaataatttatcaaaaggatattttaaaaaagctagtctgtcttgaaacttgtttaccttaaaattatcagaatctcagtgtttgaaagtactgaaagcacaaacatatatcatctctgtaccattctgtactaaagcacttgagtctaataaataaagaaatcagcaccccttcccggtgtccagggggaaaaaaaaa

SEQ ID NO: 136857 - DNA, 410 bp, Homo sapiens
cgtcgacttttttttttttttaagcaatgaaatattttatttgctgaaataggtataacacttaaataaaaattaaacaaatgtttaatatctccttccatgaaacagcagcagcaagagatagcaagtgttcggaagtctcttcaatccatgttattctgatgactctttgaagaaagaacttgaacctaagtaatatgatacaattataacgttaggctaagaagcatattgtaagtctttagaatagtttaattgtaacatctttaatcataaacctgtttcattgtaaggacctccctttctgttaaggtcaaatctaaataggttatggggttggttaggcaactattccctaaaggaatatggtattaaggctttcagctctttaggtaatggtagtggaattt

SEQ ID NO: 136858 - DNA, 529 bp, Homo sapiens
tttttttttttttttttttaagcaatgaaatattttatttgctgaaagtaggtagtaacacttaaataaaaattaaacaaatgtttaatatctccttccatgaaacagcagcagcaagagatagcaagtgttcggaagtctcttcaatccatgttattctgatgactctttgaagaaagaacttgaacctcctgacacagggggatttcccttcactccatagattcccccctaacttcatctccctcttttccttggggctattaggtcaggtcaatatggcttgtggaacctgttcagggtgcttggatggacatgcagtcttggaatatatttaggatggagggtgtcttgaaattttggcaggggcacaaaggcactaaaggtattatccaccatatcaaatgaagaaatcaccattgccatccatagaacaacatattcgtctattaaaattataaagggcctggtctaaaaacaaaagacctggccccaaaaagacagtgtcttgaagatatagttcactttt

SEQ ID NO: 136859 - DNA, 1580 bp, Homo sapiens
tgggggctggggccccggcagccgggcaggccggcctgacctcgacctccgccgtgcgggcccgaccggtgagtccagcccggcagtcgcaggacccggccgccagcctctccctccacctctccctgcccccagcgccaggcgcgggctgcgctcggtggcggcggcggggccctcaggcggccatggcggcaggcgccggggccgggtccgcgccgcgctggctgagggcgctgagcgagccgctgagcgcggcgcagctgcggcgactggaggagcaccgctacagcgcggcgggcgtctcgctgctcgagccgccgctgcagctctactggacctggctgctccagtggatcccgctctggatggcccccaactccatcaccctgctggggctcgccgtcaacgtggtcaccacgctcgtgctcatctcctactgtctcacggccaccgaagaggcaccatactggacataccttttatgtgcactgggactttttatttaccagccactggatgctattgatgggaaacaagccagaagaacaaactcttgttcccctttaggggagctctttgaccatggctgtgactctctttccacagtatttatggcagtgggagcttcaattgccgctcgcttaggaacttatcctgactggtttttttcccgctccttttatttgggatgtttggtgttttattgccgctcattggcagacttatgtttcaaggcatgttgagatttggaaaagtggatgtaactgaaattcagatagctttaagtgattgtctttgtgcttgtctgcatttgggaggagcaacaatgtgggggactatacgattcctattctagaaataaaattgaagatccttccagttcttggatttctaggtggagtaatattttcctgttccaaattattcccatgttatcctccattggtggtgttggcaagaatggaatccactatagcaggcaccagtgtcttgtcacctgggactccacatagggactaattattatactgggcaataatgatctattaaaaagtcaggcaactgatggtgttttgaaaaagcatcccttgtctttaatatccccaatgtttgggatgtgtctttggccaaagtctcacaaaaaattagtggtagctcacatgaccaaaagtgaactatatcttcaagacactgtctttttggggccaggtcttttgtttttagacccagtactttaataactttatagacgaatatgttgttctatggatggcaatggtgatttcttcatttgatatggtgatatactttagtgcctttgtgccctgcaaatttccaagacacccttcatcctaaatatattcaagactgcatgtcatcaagcacctgaacaggttcaagttctttcttcaaagagtcatcagaataacatggattgaagagacttccgaacacttgctatctcttgctgctgctgtttcatggaaggagatattaaacatttgtttaatttttatttaagtgttatacctatttcagcaaataaaatatttcattgcttaaaaaaaaaaaaaaaaaaa

SEQ ID NO: 136860 - DNA, 1093 bp, Homo sapiens
atgcccaggaagaaggcggcggcggcggcctgggaggagccgagctcgggcaacggcactgcccacgccagggcccaggaaacgcggcggcccggcgggcaggaagcgcgagcggcccgagcgctgcagtagcagcagtggtggcagcagcagcagcggcgacgaggacggcctggagctcgacggggcccccggcaggggcaagcgcgcggcgcagcctgtggcagcaggcaaggtgggcggtgcggctgtggtggtcgccgaacccgagcacaccaagaagcacgtcaaacttgagaccctcctcatcaccacagaaggaaagctgtggagctggggtcgaaatgagaaggcgcagctgggacatggtgacaccaagagagtagaagcccccagactcaccgagggtctcagccacgaagtgattgtgtgcagcgtgtgcgcggaaccacaccttggccttgacggaaacgggctccgtgtttgcgtttggggaaaacaagatggggcagctgggccttggcaactagacagacgctgtccccagccctgtgcagataatgtacaacagcctgccaattaccaaaatggccttggctatggctggctgggctacacagagcagaaggatgagatggtcccccgcctggtgaagctatttgacttccctgggcatggggcttcccagatctatgctggttacacctgctcctttgccgtcagtgaagtgggtggtctgtttttctggggggccaccaacacctcccatgaatctaccatgtacccaaaagcagtgcaggacctctgcagctggagaatctggagcctggcttgtgggaagagcagcatcattgtggcagccgatgagagcaccatcagctggggcccatcaccgacctttggggaactgggctacagggatcacaagcccaagtcttccactgcagcccaggaggtgaagactctgcatggcattttctcagagccggtcgccatgggctactcacactccttggtgatagcaagagatgaaagtgaaactgagaaagaaaagatcaagaaactgccagaatacagcccccaaaccctctga

SEQ ID NO: 136861 - DNA, 2155 bp, Homo sapiens
atgagcctgggcttagcaagtgagcggctgtgggcaggtttggggttgcccgcattgccacttgccgatgagggaggggagtgtggggagactctgttcgtgtggaggtcacagaaacttgaagggtcaaagtgcaaagggcagcttttgatttttggggcaaccaactgggacttgattggtcgaaaagaagtgcctaaacagcaagctgcttaccgcaatctcggtcagaatttgtgggggccccacagatatgggtgcctggcgggggtccgggtgcggacagtggtctcgggctcgtgtgctgcacacagcctcctcatcaccacggaagggaagctgtggagctggggtcgaaatgagaaggggcagctgggacatggtgacaccaagagagtagaagcccctagactcatcgagggtcttagccacgaagtgattgtgtctgcagcatgtgggcggaaccacaccttggccttgacggaaacgggctccgtgtttgcgtttggggaaaacaagatggggcagctgggccttggcaaccagacagacgctgttcccagccccgcgcagataatgtacaacggccagccaattaccaaaatggcctgtggggctgaattcagtatgataatgggactgcaaaggaaacctctattcctttggggtgccctgaatatgggtcagctggggacacaactcaggatggggaagtttcattcgcccggggcacagcggatagagtacgactgtgaactagttccccggcgagtggccatcttcattgagaagacgaaagatggacagattctgcctgtaccaaacgtggttgtacgagacgtggcctgtggcgctaaccacacgctggtcctggactcccagaagcgagtcttctcctggggctttggtggctatggccggctgggccacgcagagcagaaggatgagatggtcccccgcctggtgaagctgtttgacttccctgggcgtggggcttcccagatctatgctggttaacacctgctccctttgctgtcaatgaaatgggtggtctgtttttctggggggccaccaacacctcccgtgaatctaccatgtaccccaaaagcagtgcaggacctctgcggctggagaatccggaaccctggcttgtgggaagagcagcatcattgtggccgccgatgagagcaccatcagctggggtccgtcaccgacctttggggaactgggctacggggaccacaagcccaagtcttccactgcagcccaggaggtaaagactctggatggcattttctcagagcaggtcgccatgggctactcacactccttggtgatagcaagagatgaaagtgagactgagaaagagaagatcaagaaactgccagaatacaacccccgaaccctctgatgctcccggagactcctccgactccacacctctcgcggcagctgtcatttccatgtgcactgggacgggaagtcaaacgaggaatttaaaaaagcaaaagttgaccgaaggtgcatttttgtttagactccctgaggttccgttttacacatgatccaacgttaactacctttttttctgtatgctttccaaagtccttttttttcccttaatgttgaattaaaatgcttgctcatagttgatttgccattcctacaaaagaggcagaaactttgagcaatctaggttttttttttttttaagttttttctttcttcctctcctgaatacactccccaaaacacccctttccagttacaattagcatcgtgatccaagcagatgccacatggaagaggaatcgccatttactcagaaaaaatgtcccttacaggaaccggcagcagctaggcagtcaccggcccgcctccatccaaaatcacgctcgcgtgcttcggaagcatccggggtcactccttctccgctttttcttgcagatgggcctaggcgcgtgtcggttctgtttctccccttggctgcctgtacgcccacagccttctggctgcgacattatagaatcggccgtgtcccccctggtgggggattggggatctgtgtttagccatttatatctactttagctgttaaagaggtccaaatgaaaatcaggtgattgtggaaccatggggacttgggggtggggca

SEQ ID NO: 136862 - DNA, 518 bp, Homo sapiens
  misc_feature (1)...(518): n = a,t,c or g
ttcccgggtcgacgatttcgtagtaccagaccctggaagaagaatattggccatggagagtatgagagtctctgatgattcaggaaggtcagagcagctcctcaggcctggctgcagctctgggcacttgccaactccctgctggcctttgaggggcggtgcccctggagggccctggctcttatccctgctgttcccacacagaggctgccccggaggcctggggagccacgagaggtccacattgggcgagccctaggcagggtggctcccagcatgctgttgtgcagcctctctgaggctatctgcttcttcctagatgtcagcctttgtggccctgctctccctggacagcaagaggcaggaggcctcccggttggacgtctgctgctgtgtcaagccccaggagctggccccgcctggccagggagaggggactctgcttggcgtcctccanaaagctnatgcccccttnctgctgcactggataactccnaggngttgngctgctgctgttt

SEQ ID NO: 136863 - DNA, 413 bp, Homo sapiens
tcacaaggcagaggctgagcatatgtcttatcacgaaatcgtcgacccgggtcgacgatttcgtcccatgccagctgtgcggacctttgccctgacctctggccttgcagtgatccttgacttcctcctgcagatgtcagcctttgtggcccgggtcgacgatttcgtgctacctttgcctccttttctatgatagccacttgcttcttggccagcttctccagctcgatggacgagttgttggcatgcgtctccacctccttctgtagcttgaggcggtgctcgtccatctcagccttcagcttgttctccagggcgatcagctgcttctggtgctggcgccgcatccgcttataacctgacatctgttcccgcaactcgttctcctgctcatgctcagcctctgccttgtg

SEQ ID NO: 136864 - DNA, 2949 bp, Homo sapiens
atggcggaggccggcctgaggggctggctgctgtgggccctgctcctgcgcttggcccagagtgagccttacacaaccatccaccagcctggctactgcgccttctatgacgaatgtgggaagaacccagagctgtctggaagcctcatgacactctccaacgtgtcctgcctgtccaacacgccggcccgcaagatcacaggtgatcacctgatcctattacagaagatctgcccccgcctctacaccggccccaacacccaagcctgctgctccgccaagcagctggtatcactggaagcgagtctgtcgatcaccaaggccctcctcacccgctgcccagcctgctctgacaattttgtgaacctgcactgccacaacacgtgcagccccaatcagagcctcttcatcaatgtgacccgcgtggcccagctaggggctggacaactcccagctgtggtggcctatgaggccttctaccagcatagctttgccgagcagagctatgactcctgcagccgtgtgcgcgtccctgcagctgccacgctggctgtgggcaccatgtgtggcgtgtatggctctgccctttgcaatgcccagcgctggctcaacttccagggagacacaggcaatggtctggccccactggacatcaccttccacctcttggagcctggccaggccgtggggagtgggattcagcctctgaatgagggggttgcacgttgcaatgagtcccaaggtgacgacgtggcgacctgctcctgccaagactgtgctgcatcctgtcctgccatagcccgcccccaggccctcgactccaccttctacctgggccagatgccgggcagtctggtcctcatcatcatcctctgctctgtcttcgctgtggtcaccatcctgcttgtgggattccgtgtggcccccgccagggacaaaagcaagatggtggaccccaagaagggcaccagcctctctgacaagctcagcttctccacccacaccctccttggccagttcttccagggctggggcacgtgggtggcttcgtggcctctgaccatcttggtgctatctgtcatcccggtggtggccttggcagcgggcctggtctttacagaactcactacggaccccgtggagctgtggtcggcccccaacagccaagcccggagtgagaaagctttccatgaccagcatttcggccccttcttccgaaccaaccaggtgatcctgacggctcctaaccggtccagctacaggtatgactctctgctgctggggcccaagaacttcagcggaatcctggacctggacttgctgctggagctgctagagctgcaggagaggctgcggcacctccaggtatggtcgcccgaagcacagcgcaacatctccctgcaggacatctgctacgcccccctcaatccggacaataccagtctctacgactgctgcatcaacagcctcctgcagtatttccagaacaaccgcacgctcctgctgctcacagccaaccagacactgatggggcagacctcccaagtcgactggaaggaccattttctgtactgtgccaatgccccgctcaccttcaaggatggcacagccctggccctgagctgcatggctgactacggggcccctgtcttccccttccttgccattggggggtacaaaggaaaggactattctgaggcagaggccctgatcatgacgttctccctcaacaattaccctgccggggacccccgtctggcccaggccaagctgtgggaggaggccttcttagaggaaatgcgagccttccagcgtcggatggctggcatgttccaggtcacgttcatggctgagcgctctctggaagacgagatcaatcgcaccacagctgaagacctgcccatctttgccaccagctacattgtcatattcctgtacatctctctggccctgggcagctattccagctggagccgagtgatggtggactccaaggccacgctgggcctcggcggggtggccgtggtcctgggagcagtcatggctgccatgggcttcttctcctacttgggtatccgctcctccctggtcatcctgcaagtggttcctttcctggtgctgtccgtgggggctgataacatcttcatctttgttctcgagtaccagaggctgccccggaggcctggggagccacgagaggtccacattgggcgagccctaggcagggtggctcccagcatgctgttgtgcagcctctctgaggccatctgcttcttcctaggggccctgacccccatgccagctgtgcggacctttgccctgacctctggccttgcagtgatccttgacttcctcctgcagatgtcagcctttgtggccctgctctccctggacagcaagaggcaggaggcctcccggttggacgtctgctgctgtgtcaagccccaggagctgcccccgcctggccagggagaggggctcctgcttggcttcttccaaaaggcttatgcccccttcctgctgcactggatcactcgaggtgttgtggtcccttctcagctgctgctgtttctcgccctgttcggagtgagcctctactccatgtgccacatcagcgtgggactggaccaggagctggccctgcccaagctgaagaagccttcagtggaaactgtctccagtgggcaggtgttggagaacccgccctcttcaggtgaagagtttgggcatctggctgcactatcctccaagtggcacccaaaacctgcactgggaacatgggccctgacctggtggacatcaccacctggtgacagagtgccaggcgcattccatccagatgaggaagatgaaggagactgcgtcagaaagtgctgccagtcagcaatcaattccaccacttcactatcaagttctttctgccccaccagtcctgccatgccagcatga

SEQ ID NO: 136865 - DNA, 362 bp, Homo sapiens
ttcccgggtcgacgatttcgtcctgagtggctgggctgaagggaggtggggtatggttgctggagactggaggttagggtggagggcttgcaaggagttgcatgagatgaggaccagttttaggtcaggaggctctggctgcagccttgggcctatttcttaggctggtttgtaccccaatataagcctgcctgaccctcagcattctccttctgaagtggggtgtcccacccaccatgagggccccagaggcctgagcctgtgaccatgctctgtgctctggcaggatcaccaatgtgttttatgagcagtacctgaccatcctccctgaggggctcttcatgctcagcctctgccttgtg

SEQ ID NO: 136866 - DNA, 4495 bp, Homo sapiens
atggcggaggccggcctgaggggctggctgctgtgggccctgctcctgcgcttggcccagagtgagccttacacaaccatccaccagcctggctactgcgccttctatgacgaatgtgggaagaacccagagctgtctggaagcctcatgacactctccaacgtgtcctgcctgtccaacacgccggcccgcaagatcacaggtgatcacctgatcctattacagaagatctgcccccgcctctacaccggccccaacacccaagcctgctgctccgccaagcagctggtatcactggaagcgagtctgtcgatcaccaaggccctcctcacccgctgcccagcctgctctgacaattttgtgaacctgcactgccacaacacgtgcagccccaatcagagcctcttcatcaatgtgacccgcgtggcccagctaggggctggacaactcccagctgtggtggcctatgaggccttctaccagcatagctttgccgagcagagctatgactcctgcagccgtgtgcgcgtccctgcagctgccacgctggctgtgggcaccatgtgtggcgtgtatggctctgccctttgcaatgcccagcgctggctcaacttccagggagacacaggcaatggtctggccccactggacatcaccttccacctcttggagcctggccaggccgtggggagtgggattcagcctctgaatgagggggttgcacgttgcaatgagtcccaaggtgacgacgtggcgacctgctcctgccaagactgtgctgcatcctgtcctgccatagcccgcccccaggccctcgactccaccttctacctgggccagatgccgggcagtctggtcctcatcatcatcctctgctctgtcttcgctgtggtcaccatcctgcttgtgggattccgtgtggcccccgccagggacaaaagcaagatggtggaccccaagaagggcaccagcctctctgacaagctcagcttctccacccacaccctccttggccagttcttccagggctggggcacgtgggtggcttcgtggcctctgaccatcttggtgctatctgtcatcccggtggtggccttggcagcgggcctggtctttacagaactcactacggaccccgtggagctgtggtcggcccccaacagccaagcccggagtgagaaagctttccatgaccagcatttcggccccttcttccgaaccaaccaggtgatcctgacggctcctaaccggtccagctacaggtatgactctctgctgctggggcccaagaacttcagcggaatcctggacctggacttgctgctggagctgctagagctgcaggagaggctgcggcacctccaggtatggtcgcccgaagcacagcgcaacatctccctgcaggacatctgctacgcccccctcaatccggacaataccagtctctacgactgctgcatcaacagcctcctgcagtatttccagaacaaccgcacgctcctgctgctcacagccaaccagacactgatggggcagacctcccaagtcgactggaaggaccattttctgtactgtgccaatgccccgctcaccttcaaggatggcacagccctggccctgagctgcatggctgactacggggcccctgtcttccccttccttgccattggggggtacaaaggaaaggactattctgaggcagaggccctgatcatgacgttctccctcaacaattaccctgccggggacccccgtctggcccaggccaagctgtgggaggaggccttcttagaggaaatgcgagccttccagcgtcggatggctggcatgttccaggtcacgttcatggctgagcgctctctggaagacgagatcaatcgcaccacagctgaagacctgcccatctttgccaccagctacattgtcatattcctgtacatctctctggccctgggcagctattccagctggagccgagtgatggtggactccaaggccacgctgggcctcggcggggtggccgtggtcctgggagcagtcatggctgccatgggcttcttctcctacttgggtatccgctcctccctggtcatcctgcaagtggttcctttcctggtgctgtccgtgggggctgataacatcttcatctttgttctcgagtaccagaggctgccccggaggcctggggagccacgagaggtccacattgggcgagccctaggcagggtggctcccagcatgctgttgtgcagcctctctgaggccatctgcttcttcctaggggccctgacccccatgccagctgtgcggacctttgccctgacctctggccttgcagtgatccttgacttcctcctgcagatgtcagcctttgtggccctgctctccctggacagcaagaggcaggaggcctcccggttggacgtctgctgctgtgtcaagccccaggagctgcccccgcctggccagggagaggggctcctgcttggcttcttccaaaaggcttatgcccccttcctgctgcactggatcactcgaggtgttgtggtcccttctcagctgctgctgtttctcgccctgttcggagtgagcctctactccatgtgccacatcagcgtgggactggaccaggagctggccctgcccaaggactcgtacctgcttgactatttcctctttctgaaccgctacttcgaggtgggggccccggtgtactttgttaccaccttgggctacaacttctccagcgaggctgggatgaatgccatctgctccagtgcaggctgcaacaacttctccttcacccagaagatccagtatgccacagagttccctgagcagtcttacctgagccatccctgcctcctcctgggtggatgacttcattgactggctgaccccgtcctcctgctgccgcctttatatatctggccccaataaggacaagttctgcccctcgaccgtcaactctctgaactgcctaaagaactgcatgagcatcacgatgggctctgtgaggccctcggtggagcagttccataagtatcttccctggttcctgaacgaccggcccaacatcaaatgtcccaaaggcggcctggcagcatacagcacctctgtgagacttgacttcagatggccaggttttagcctccaggttcatggcctatcacaagcccctgaaaaactcacaggattacacagaagctctgcgggcagctcgagagctggcagccaacatcactgctgacctgcggaaagtgcctggaacagacccggcttttgaggtcttcccctacacgatcaccaatgtgttttatgagcagtacctgaccatcctccctgaggggctcttcatgctcagcctctgccttgtgcccaccttcgctgtctcctgcctcctgctgggcctggacctgcgctccggcctcctcaacctgctctccattgtcatgatcctcgtggacactgtcggcttcatggccctgtggggcatcagttacaatgctgtgtccctcatcaacctggtctcggcggtgggcatgtctgtggagtttgtgtcccacattacccgctcctttgccatcagcaccaagcccacctggctggagagggccaaagaggccaccatctctatgggaagtgcggtgtttgcaggtgtggccatgaccaacctgcctggcatccttgtcctgggcctcgccaaggcccagctcattcagatcttcttcttccgcctcaacctcctgatcactctgctgggcctgctgcatggcttggtcttcctgcccgtcatcctcagctacgtggggcctgacgttaacccggctctggcactggagcagaagcgggctgaggagggcggtggcagcagtcatggtggccctcttgcccaaatcacccctcccgagtctccacagctgacaacatctatgtcaaccacagctttgaaggttctatcaaaggtgctggtgccatcagcaacttcttgcccaacaatgggcggcagttctgatacagccagaggccctgtctaggctctatggccctgaaccaaagggttatggggatcttccttgtgactgccccttgacacacgccctcctcaaatcctaggggaggccattcccatgagactgcctgtcactggaggatggcctgctcttgaggtatccaggcagcaccactgatggctcctttgctcccatagagggtccccagtttccaagtcacctaggccttgggcagtgcctcctcctgggcctgggtctggaagttggcaggaacagacacaactccatgtttggcccacactcagtcactttcctaggagcccacttctcatccaacttttcccttctcagatcctctctcgaaagccttaagtccgtgtcaacaagtctttaacacgtagcagtggtccctgaggaacacagacaatggaccactaccctggggtggtggataatcacaggaggccaagaagagaggcaaa

SEQ ID NO: 136867 - DNA, 402 bp, Homo sapiens
gaggttactcaagccatcactggcttcccccggaacagaatgttcttcaaaatgttgagatgtcatagaagcaatcaggtcactgcttccacatagcttctctggctcttctggtgcatcccctccaagggaagtattttgaagatcaaagatgcctgttgctggacaaccgtctccgctcagcagcagaggcataggcatcctctgagtctgattccaccccatgcaggtgaatggcttattcctggcccccaaacagtaattcttcacactgtatcaaggagttacccctgttcatgggaaagatacctgccgccagctaggatggtgggccccaaggtttagcaattttcccccccggagtaatcgttggcatttgaaaggaaaaaatccaatccaaaa

SEQ ID NO: 136868 - DNA, 499 bp, Homo sapiens
tttcacataagggatcactttgtgccacagcgatctcggacaaccaggttccggccttccttcaggtgtatggtgaggaggtacgcaaaagggctggggaggatactcaagccatcactggctttccccggtacagattgttcttcaaaatgttgagatgtcatagaagcattcaggtcactgcttccacatagcttctctggctcttctggtgcatcccctccaagggaagttttctgaagatcaaagatgccgttgctggacacccgtctccgcttagcaggagaggcataggcctcctctgagtctgtttccaccacatggaggtgactggcttcttccttgctccaatccaattcttcttcagactgtttcaagggagctactggtggtcttgggaaagatccctgcagtggacagactgctgggcaccgaggtgtaggaagactgtggcccggagtaaggccggccctctgggacgaaatagtcgacccgggaa

SEQ ID NO: 136869 - DNA, 765 bp, Homo sapiens
ttaacgatgataattttcatacacgctccgatgacccgcgcgacgaggccgcgatgaatgttgagtcttggccccattccgcgcgacgcgtccgccgtcgcgccgcacccgctgatccaaagcaacatacccaacgccctccaatgaccagacccgcacaatacgcacatcacgcgaacgagcatcgatgccacgaagcgccgaaccaaaacgacccacgatcccgcgtctgcacccttcaccccgcggtatagtaactgtgtcctccccccacgctctcacgccctccctgtaagccacatacacagctgtcactcccgcacagcgatctcggacaaccaggttccggccttccttcaggtgtatggtgaggaggtacgcaaaagggctggggaggttactcaagccatcactggcttcccccggtacagattgttcttcaaaatgttgagatgtcatagaagcattcaggtcactgcttccacatagcttccaggaaatgagtccacagggcaatgacacctgcatcatgcagtagttagtatggggcacagattcctcagttgtgtcagcttttataggcacaaaggagattttatctgtttctggaactttaacagagtttctgggctgaatgtgaggacagctgctgaatttcccaatatcaatagatttatttgtatgtgttttataccatacactatcatttcccaataatgcaatcaaatgcaatcgttctgcctgatttccagcatcaataaccat

SEQ ID NO: 136870 - DNA, 365 bp, Homo sapiens
cctctagagcggccgcaatacattggtggggtctggtaggaccagctgtagtccgagccctttaggtctttgattacctgctcgctggcgggaggcagtttgtggggttctgctgtcagcaccaccaagtcgtcgatgatgccctgcaggtgggtgatctctcccagcatggtcagctctccattcaccacaggctgcaggaaggtgatgaaggtgcagaagcggccccgctcctcgatcagcgcccggcgcacggcctgcttctccgtctcctccagcagcaggtacatgtcgttgacgtcctgcagggcactgtccagctggggctgcaggtctcctttccctttgcccgcgttgcagcacac

SEQ ID NO: 136871 - DNA, 621 bp, Homo sapiens
atgagccaccatgcccagctggatggttgtgataaacccacatgctcctccctctcgctgagagccactgctcgcaggggacagtgtgctcaggtgttggtgatgcaagagctggcgcagcagagcctcagagacccagctctgctgccaccaccatctctgtcagtcccacggggtggatacaagtctccagaaaaatctggaagggatgttattcccctgaatggagagctgaccatgctgggagagatcacccacctgcagggcatcatcgacgacttggtggtgctgacagcagaaccccacaaactgcctcccgccagcgagcaggtaatcaaagacctaaagggctcggtctacagctggtcctaccagaccccaccttcatcacccagcagctccagctcccggaagtccagcatgtgcaggggaaggacgtctgcaaaggcatccccgaaccctttgtactttaattggaagaagcaacgatttgccgccaagcctcattttagaagaccacagtcctctctgaacccccagcagtggctgctggctgggctcttgcaagaagagtcaagttctttgggcaccgacacggcacccctccattctctgggctga

SEQ ID NO: 136872 - DNA, 1900 bp, Homo sapiens
ctttctgtcttgatgacctgtctagtgctataaatgaacacctttctgcccgtggacgccgccgaagaagcatcgttaaagtctctcttcaccctgccgtcattggtctaaagtcaaagtttcttaaaaagcccgaccagttgaggaagctttttcattggagggttgagctttgaaacgactgatgagagcctgaggagccattttgagcagatggggaacgctcacggactgtgtggtaatgagagatccaaacaccaagcgctccagggggctttgggtttgtcacatatgccactgtggaggaggtggatgcagctatgaatgcaaggccacacaaggtggattggaagagttgttggaaccaaagagagctgtttcaagagaagattctcaaagaccaggtgcccagcttaactgttgaaaaagatatttgttggtggcattaaagaagacactgaagaacatcacctaagagattattttgaagagattattttgaacagtatgggaaaattggaagtggttgaaatccattgactggaccggaggccagtggccaagaaaaaggggctttgcctttgtaacctttgacggccatgactccgtggataagattgtcattcagaaataccatactgtgaatggcccacaactgtgaagttagaaaagccctgtcaaagcaagagatggctagtgcttcatccaagccaaagagggtcgagtgggttctggaaacttttggtgtggtcggacgaagtggtttcggtgggaatgacaacttcggtccgtggaggaaacttcagttggtccgtggtggcctttggtggcaagccgtggtggtgtttggatatgggtggcagtgggggatggctataatggatttgggtaatgatggaagccattttggaaggtggtggaagctaccaatgattttggggatttccaccaatcagtcttccaaattttggaccccatgaagggggggaaatttgggaggccagaagctctggccccctatgggcggtggaggcccaatactttgcaaaacccacgaaacccaaggtggcctatggccggttcccagcagcagccagtagctatggcaagtggccagaagattttaattaggaaaccaaagcttaagcaggagaggagagccagagaagtgacaagggaagctacaggttacaacagattttgtgaaactcgccccagacacagtgggtgccagggcctagctgctaccaaagaagaacatgtatttagaccaaatactcatgtgtaatgggcaaaaaaactccgaggggctgtaatttgtgacgtaattgtataacagggttattttagtttctgttctgtgggaaagttgtaaagcattcccaccaaggggttttaaaggtagattttttttttttttgcacccccatgactgttgattgctaaatgtaaccagtctgattgtgatactgaataaatgtcttttttttttaatgtgcctgtgtaaagttagtctacctcttaagccatcttggtaaattttccccaagagtgtgaagttagaattccttcagggtgatgccaggttctatttggaatttatatacaacctgcttgggtggagaaacccttgtcttcggaaacctctggtgtagtggaacttgataagttactgttgtgacctgaagttcacccattaaaagggattaccccaagcaaaatccatggaattattggttataaaagtgaattgttgggcacatccctatgccatatatctaaaatttgaataatggtaccagattaaaattatagatggggaatgaagccttgtgtatcattcattatcatgtgtaatccaataaccgatttaattctcttgaatgaaaaaaaaaaaaaa

SEQ ID NO: 136873 - DNA, 642 bp, Homo sapiens; identical to SEQ ID NO: 116715

SEQ ID NO: 136874 - DNA, 659 bp, Homo sapiens
  misc_feature (1)...(659): n = a,t,c or g
catagccagtgcattgtgcggccatttaggagacactatatagatacagcgggcgcgagctcggccccccacacgtgtggtctagagctagcctaagctcgagaagcttgtcgacaaattcagatctccgtagcagtggcagcataaactgcaaaagatttagttggtgtcttgattagccatccattccttaagtctccctcatctttgatggaatcaaacgaaacgntcggacccgggaacccgggtcgacgatttcgtgcgtccgcgaccaggaggatcggaccttcgccttcgctgtcgccgccgccgccgcccgcggccgtcggggctattagtgaaagatggtggatcgcttggcaaacagtgaagcaaatactagacgtataagtatagtggaaaactgttttggagcagctggtcaacctttaactatacctggacgagttcttattggagaaggagtattgactaagttgtgcaggaaaaagcccaaagcaaggcagtttttcttgtttaatgatattcttgtatatggcaatattgtcatccagaagaaaaaatataacaaacaacatattattcccctggaaaatgtcactattgattccatcaaagatgagggagacttaaggaatggatggctaatcaagacaccc

SEQ ID NO: 136875 - DNA, 432 bp, Homo sapiens; identical to SEQ ID NO: 116042

SEQ ID NO: 136876 - DNA, 666 bp, Homo sapiens
atggggaaaatgtctccaggccatgtcagagactttcacggcagaccctcccatcacaggcccagaggcccaggaggaaaaagtggttttgtgggcaaggtccagggtccccatgctgtgtgcagcctagggacttggtgccttgtgtcccagccactccacccatggctgaaaggggccaatgtacagctcaggctgtggcttcagaaggtggaagccccaagccttggcagcttccacgtggtgttgagcctatgggtgcacagaagtcaagaactgaagtttgggaacctttgcctagatttcagaagatttatggaaacacctggatgcccagaattcccatgtgttgtgcgagagatccgggaggagctaaaggaggatgttcgaacccatcacaaaggagataaaaaccttgaaaaaagattagatgaatggctaactagaataaacagtgtagagaagtccttaaatgacctgatggagctgaaaaccatggcacaagaactacatgatgcatgcacaagcttcagtagccaatttgatcaagtggaagaaagggtgtcagtgattgaagatcaaatgaatgaaatgaagcaagaagagaagtttagagaaaaaagagtaaaaagaaacaaagccgccaagaaatatgggactatgtga

SEQ ID NO: 136877 - DNA, 1056 bp, Homo sapiens
atgagtttggaaaatcagaacagtcacactggaggtttaaaaacatctttagagaggcccttccacaaacatcgaatcttgggtgaccctcacgctaacactgaggcaaatatttctgtgcccatttcacaaatgagtccagtgaagcttacagaagtgaagcggcttgttcaagagtcacaagccagcaaggagctgaagcaagttctgcggggccattttcgtctcccaagtgacatacaaatatgtagttcaggtcataaggtccccgacacgcagaccctgcaaacttttcggccagaaatttgtcgcgaccctgagacgcccccggccgtgtccaggacccccgtcctcaggccccacaacttctcgcccggcctcggggctccttcccgcgtccgccggcccccgccccgcagacccgtggaccggaccctacccggcggcccccgtccccccgcggcggcggcggcgtcctacgggcgggcgcggctcgctcccgggctggcgggacggcggcggcaactggcccgcgggccggccccggcgcgaggggagcggccgggagcgccccgtttctcacagaccccaacatggcgtcggccgccaccgcccgcgacgacgacacctcccggcgctgcgacggctccgggaccgcgggaggaagcgcccggaaagtttcgcgtctcccctcccggcccgtcaggagccggcggaccacccacccgggcttcacctaccccgacggccgcgggcggcggcggcggcgacagcgaaggcgaaggtccgatcctcctggtcgcggacgcagggcgcggactctgcccgttccccgccggggcttccagggtgtgtgctgtccgcagccccgcgcagccggcgcgatccagacgcggtgggcgggctggccgccagcgcagccgctcgcaggctgaacaccacatggaagctgccacagcttggggcttccaccctctgaagccacagcccgagctctacattggcccctttcagccatggctggagtggctggaatacaaggcaccaagtccctag

SEQ ID NO: 136878 - DNA, 426 bp, Homo sapiens
  misc_feature (1)...(426): n = a,t,c or g
cgtccgtgacattctgcggccatttaagagacactatataatacagcgggcgcgagctcggccccccacacctgtggtctagagctagcctaagctcgnnnnnnnnnnnnnnnnnnnnagatttcccgggtcgacgatttcgttttatgctgccactgctacggagttcccgggtcgacgatttcgtcctgcgtccgcgaccaggaggatcggaccttcgccttcgctgtcgccgccgccgccgcccgcggccgtcggggctattagtgaaagatggtggatcgcttggcaaacagtgaagcaaatactagacgtataagtatagtggaaaactgttttggagcagctggtcaacctttaactatacctggacgagttcttattggagaaggagtattgactaagttgtgcaggaaaaagtccaaa

SEQ ID NO: 136879 - DNA, 2579 bp, Homo sapiens
  misc_feature (1)...(2579): n = a,t,c or g
gttcgtgacattcagcggccatttatgtgacactatctaatacagagggcgcgagctcggccccccacacctgtggtctagagctagcctaagctcgnnnnnnnnnnnnnnnnnnnnagatttcccgggtcgacgatttcgtttgattccatcaaagatgagggagacttaaggaatggatggctaatcaagacaccaactaaatcttttgcagtttatgctgccactgctacggagttcccgggtcgacgatttcgttctaatgatattcttgtatatggcaatattgtcatccagaagaaaaaatataacaaacaacatattattcccctggaaaatgtcactattgattccatcaaagatgagggagacttaaggaatggatggctaatcaagacaccaactaaatcttttgcggtttatgctgccactgctacggagttcccgggtcgacgatttcgtcctgcgtccgcgaccaggaggatcggaccttcgccttcgctgtcgccgccgccgccgcccgcggccgtcggggctattagtgaaagatggtggattgcttggcaaacagtgaagcaaatactagacgtataagtatagtggaaaactgttttggagcagctggtcaacctttaactatacctggacgagttcttattggagaaggagtattgactaagttgtcgcaggaaaaagcccaaagcaaggcagtttttcttgcgtaatgatattgttgtatagggcaacattgtcatccagaagaaaaaatatatcaagcaacatattattcccctggaaaatgtcactattgattccatcaaagatgagggagacttaaggaatggatgggtaatcaagacaccaactaaatcttttggcagtttatgctgccactgctacggagaaatcagaatggatgaatcatataaataaatgtgttactgatttactctccaaaagtgggaagacacccagtaatgaacatgctgctgtctgggttcctgactctgaggcaactgtatgtatgcgttgtcagaaagcaaaattcacacctgttaatcgtcgccaccattgccgcaaatgtggttttgttgtctgtgggccctgctctgaaaagagatttcttcttcccagccagtcctctaagcctgtgcggatttgtgacttctgctatgacctgctttctgctggggacatggccacatgccagcctgctagatcagactcttacagccagtcattgaagtctcctttaaatgatatgtctgatgatgatgacgatgatgatatgcagtgactaaggacacatttgggagtatttaatcaggtgaggctctctgagaaatcaactttgggggaaatgcaagactctgagctctctctctgtctgttttgttctagccatgaatttgcctgagaaacttgtaacctatgtgcctcaatatattccatagaaagtaggtccccctgccttctcccactcctcacactcttctacagggataggcttttgcaaatatatcagataaattttttgtttcttgtttatttttaggttattttcttggaaggttgggaaaagaggtttgtttaaccaggtcatgtactacggtgttgtttttcatgttctgttataagtaaaactaaaaagcacagaattggtgggaaaaggggctataatgtgggttccattaataatgttagcagcttttttctaaccatcctgtctaatggttaagacacccagtaacaaaaacacatgatttggaaatactttggctttttcatatacctagtggtgccttatcataatagcaccggtaacatgaaataagcccctaccttcttactttctggtttgttgaaaaaatacactggtgctctttgaagtgataaaatgagtgtttatgaatgggtgtaattaggaaatacttctcatctgacagctacaaataactaagttgtggaggtattttcactctatggtgaataaatatttttccctaaaataggtgggaatatatttttgcgtttatatagggctccaaattataattggcgaatatatattgtaaattaataaaagctgtcattcttaggaatttggtttgaaatttatcagttatacagaattgtcatactgcattagcttctacctttagtaagacatattttttaggtataaattcttatgctttaacattatttctggattgaaaatcttataaaacccttgaaaataaacagtctcttttttacaaagcctgtgttagagcacagatttacctaggcttgaagatttggaagaaataatatgtaagaatggcctcaaggcagaccactttaagtttggctagacttcatatcgtggaagtattgtctatttcagtgtgaaactatcttgaatttgcaaatatagtgttatattttataaagttttgtaaaatcccaaacaatatttctatttttgtaaaacaattgtatgtataatctgtatttgaaatcattttgcaatctatggaaatagagtagcaattgctatttctaaattgtgaactttaagtcaatctagatttatt

SEQ ID NO: 136880 - DNA, 2373 bp, Homo sapiens
atgctttcagccagtgcttccagcgcctgttcaaagcacgcaagcggtgcccgcacggtgccttgcgccaatctgcccgatccccgcctttttatgggcgataccggtattgatgagtggcgtaatgccggtttctaccacgcgacgaatgtccagccccaggcacgcgccctgaaaatcccagcttgggatctgcaactgcatattgcgttcaaggtaaatttccgccatctcttcagataccgctcttgccgcttccatgccacccgcaccgacaaagcgcgttacgccaggcgctgcgatcattgccgcacctccgataccaaaggtttcggtaatcgcgctatcgcccatatccgggttcgcctgctcctgcgagaagccggtgaaaaacagaccttgcggagtgtttacaggcgcagtaaaccagcgttcgcccagcccgcttacccgaatcccgaacatattgccgttgcgggtcattgccgtgacgatgctgcctgcgcggatcatcgcgccagcatccatcgccgccttgcattcgcagcccaagtcctggactacctgcaacaagaaaatagttacggtcatcgggtgatggcctcacaacaagccttgcaggatcgcatcttaaaggaaatcatcgaccgcattccgcaacgagaagtttctgcgccctacatcaaaaatggctaccgctatcggcatatttatgaaccaggctgtgaatatgctatctaccagcgtcaatcggcattcagtgaagagtgggatgggcgtagctgggttcgaaaagggctggaagccggattaacgctggggatagaaacggtctggagcaaaaagcgtatcctgacggtttacctgaatatcgccgaatttggcgacggtgtgtttggcgtcgaagctgcggcacaacgttatttccacaaacccgcgagcaaacttacccggtcggaagctgcattactggcagctgtattacctaatccacttcgtttcaaagtctcctcgccatcgggctacgtgcgtagccgtcaggcgtggattttacggcagatgtatcagttaggcggtgagccgtttatgcaacaacaccaccatcgctgttgttatcgacatgttcgaaaaaaaaccagtgggctgggccatgtcgttctcgccggacagcaggcttaccatgaaagcactggaaatggcatgggaaacccgtggtaagcccgtcggggtgatgttccaagcgatcaaggcagtcattatacgagcaggcagttccggcagttactgtggcgataccggatcaggcagagtatgagtcggcgtggaaactgctgggataacagcccaatggagcgcttcttcaggagtctgaagaacgaatgggtgccagcgacgggctatgtaagcttcagcgatgcagctcacgcaataacggactatatcgttggatattacagcgcactaagaccgcacgaatataatgttgcagtagcaggagatcatccagccgcagtacaggtcacgatgactctggttaatgataccggctttgaccccgtattttccgggtctatcggtgactcatggcgtcagcagctgtgcacaccatcctattgttgtgagagggcgtcttccagggcgattgtacctccagcatacctcacagtacaccttcacaggttacagaaacgctcccctaccaaacaacgcataagcgtggctgccgcagcttcggtgcatggtttagccccgttacatcttccgcgcaggccgactcgaccactgttctttcccgatatcagccgctttaaagatccggatgccgcactgcctgaaattgcgctgtacgtcggcggcaagctcttccagtcgattttcctctgcaccacgtttgtgaacacgttagcctctggcctggcttcacatgccagcgtgtcgcgtctgctgtatgtgatggggcgtgacaatgtgtttccggagcgcgtgtttggctatgtgcacccaaaatggcggactccggcactcaacgtcattatggtcgggattgtcgcgttgtcggcgctgttcttcgatttagttaccgccacagcgttaattaacttcggtgctctggtggcgtttaccttcgtgaatctgtcggtgtttaatcatttctggcggcgtaaaggaatgaataaaagctggaaggatcacttccactatttgctgatgccgctggttggcgcgctgacggtgggccgacaatacgcgccacataacctgcaccgtaggttcccattgccagaattaacgccattgccgttgatgattcaggaaaaaatatttcatgaaacactaacgctgcgccgagcgaatataactggaaatccataa

SEQ ID NO: 136881 - DNA, 602 bp, Homo sapiens
aggcagagtatgagtcggcgtggaaactgctgggataacagcccaatggagcgcttcttcaggagtctgaagaacgaatgggtgccagcgacgggctatgtaagcttcagcgatgcagctcacgcaataacggactatatcgttggatattacagcgcactaagaccgcacgaatataatggtgggttaccaccaaacgaatcagaaaaccgatactggaaaaactyyaacgcggaggccagttttagttgaccactaacagactacctgaagggagccgcggtcgcctggcagttgcagtagcaggagatcatccagccgcagtacaggtcacgatgactctggttaatgataccggctttgaccccgtattttccggctctatcgctgaatcatggggtcagcattcgggcacaccatcctattgttgagactgggaggctgccaccatgcttcgcgctttccctctggcgaaaaagggagaaactaaagatctgcgtcagttcccgaacatcgataacgcctatatggaactgggcaccaaccgcgcagacgccgttctgcacgatacgccaaacattctgtacttcatgcaattttaa

SEQ ID NO: 136882 - DNA, 1200 bp, Homo sapiens
atgtacaaatttgaagttacgaaaaagaccttcacaaactttgagaagcaggctaaagcagtcacaatgggagcagaacccagtctcttgacatctctggggactctgtggtctggtgaacggttccaatgcatgagggccaagcctcaccaggtgtctactgttaaagtgaaggcattgattggaaaagaatgggaccctgcaacttggaatggggacgtgtgggaggaccctgatgaagctggggacactgagcttgtaaaccctgatcaatcttttttgccagaagaaacagcttctccatccccagtattggcaacattccctctccaaccgatgctgccatcagcctttccacctttgtctgaggagataaaccctgcactgcctgaggcaacagtgatggcctcccctgaggcagttgccaggcaagataatgttgattctcctcaggagccactgccaacatccctgtttgcttctagagctataactagactaaagtcctggtgggcccctagaggcaaggttcagagtgtgacccatgaggagaaggcagatggatcttggagaatgacagtggattattgtaagcttaaccaagtggtgactgcaattgcagctgctataccagatgtggtttcattgcttgagcaaattaatacatctcctgatacctggtatgcggccattgacttggcaaatgcccttttctccattcctgtccataaggggtatatcaactctctggctttgtgtcataatgttatttggagagaacttgattgcttttcacttccacgagataccacactggtccattacattgatgacattatgctgattggatccagtgtgcaagaagtagaaaacaaactggacttactggtgaaggataaattgctgcatttggctcctcctacaaccaaggaagaggtacaacacatggtgggcctgtttggattttggaggcagcacattcctcatttgggtgttttacaccagcccatttatcgagtgatccgaaaggctgccagtttgagtggggtccagaacaggagaaggctctgcaacaggtccaggctgctgttggtgggaaacaatctgaaaacaacctgggtcaccagaggtcaccaggcctctggttttcctgaagaccccactgcttctccagaagctgccatggccaccttgctctga

SEQ ID NO: 136883 - DNA, 1330 bp, Homo sapiens
atgggagcagaacccagtctcttgacatctctggggactctgtggtctggtgaacggttccaatgcatgagggccaagatctgggaaagatctagaaagggaaggagattctctacggatgtaatctcccccacaaaagacagctttgcagggccatttcaaccaattagcgacacgctcgttcagcatcagagaatctatggactgaaagtgtgtgtcctccccgatccctgcaaaattcgtatattgaaacctaatccccagtgtgttggtaaatgggaagaagaggttgctgaaaatgaaattcaagtgtttggtggggagaggtttgatatcaacaaatattctaagtccccacccccaccaactccccaacccctttacctgactgctggctttgcttcctgcagaaatcacagaaaatctgaggagttgagagaaggaaaaggagagtcaccagggaagtcaaagccttttcacttgcaggccaattttactgtagctctggtaactactttacaaggtgataagcattcacaagaggcttttattaggccagtagctaaggcaaaaactacatgcacatatttaagcaacgtgtgtgaaatgaaagactttaaacgtataaattgtcctgacccttttcacaagatggcgccgaaagcgaagaaggaagcttcctgcccctcctgaaagctgaagccaaagcgaaaggctttaaagggccaagaaggcaagtgttgaagaggtgtccacaaccacaaaaaaagaaaaagaaaaaaagaaagatcccgcacgttcacccacctttcccggcggcccggaagaccactgcggattccggagacagccccaaatatccctcgggaagagccgctccccggagaaacaagcttgacccactatgctatcatcaagtttccgctgacccactgagtctgcccatgaagaagatagaagacaacaacacactgtgtgttcatatgtggagctgttaaaagccaccaccaagaaccagattaaacaaggctgttgaagaagcttgtatgacatttgatgttggccaaggttcaacaccctggatttcggcctggatgggagagaagaagggcatatgttccgacttggctcctgatttaccgattgcttttgggatgtttgccaacaaaatttggggattcatctaaacttgagttccagcttgcctaatttctgaatatatatatatatatatatatccttttcaccatatacatgcctgtctgttcatttctggttgggctgggaaggcacacacacacactgacatgacaggggctttggcaagact

SEQ ID NO: 136884 - DNA, 2679 bp, Homo sapiens
ggggcgggcgtgtggttttctaggcactaaaaaggcttgtgttgtttgccaggcaggggaccaatggggccttttgccttttccaaggtggtatgaccaaggaatgaagcctctcccggtttgggcctggattaatataaatccagctggacccagaaaaaagaagcctcagttttcaggcctttgaacaaagcttcagataaaaggtttctgggtcacaacttttaccatgttttttaactttgtagtttcccaggacacagaccctagatccagggcatgctggagtgcccacaccttctcctaatgtagtcctcaccccttcctgatgtttcagaatgaaggactcggcattgaaggtgctttatctgcataataaccagcttctagctggagggctgcatgcagggaaggtcattaaagggtgggtgaagaaacatgaaccactttcctttggctctatacactctcaggggaaggggcccccagaaggcttagaatagtcatacagattaacataggcctacagagcccaggcattagggcagcacaaaccaggctttaagcaaaggcaaataaaatactacacctctcagcaaagtgaagacacacgctctggggccacctgaagcttctgtgcagaagtgagaatgttttccaagaggcttgtcttgtcattcccttacaggtagatttaggtcaagcattgcattccctgggagccagtaagtaccaaggagagaactaacgtagattctctatcccttttttcccatatgggagtgggtttctgcctctccaccaagggtcccctatgctctctgaagattcctcagtcacttagaagggggggacaccagagaacaggtggcattggttggacctcctgcttgctcactctgccccatgcactgcaacaggtcccttctctaaaaaaattttgcacctgcccacctggggcaccccttgctgagcacagatgcccaggtagatccttcagctaggccatatgtgtatgtgtgtgcttactggtgtatgtatgtgtgcatgcaggcatatatgtgtgagcatatgtgtgcacgcatgtatctgtatgtaaccatgtatgtgtgagtgcaggtatgtaggtatgagcatgggggggggaaaaggaaaaagggggccaggcatgtattcgggccatggaagtatctgatgtatgtgggtggtgaggggattgtacagagaggaaatgagaccttcttttggttttcagcaacctcacaggggggtagaaatttgtccaaaacaattccaaaggggggcttattaagacagggttcagaaaaaggcttgagacccaacggggcattaaaggagggggttgagtctattttgggttgtagaggcttgaagatttgaccctgaactagagggtggagtggaggtggtacaatgtgcttccatgccttgatgtccactctgggccagtggacaggagaagccatgtcatgacagctgctgagaagcctcccttctgcccagcctgggggcaggccgtctcacagcagtcctgtgccctagagcccaggacaggggaagaaggagggaaaggcatccagggccctgcatctggcctctttcccacaggtgaagagatcagcgtggtccccaatcggtggctggatgccagcctgtcccccgtcatcctgggtgtccaagggtggaagccagtgcctgtcatgtggggtggggcaggagccgactctaacactagaggtgagacttggggcatcctcactggggactcagccacagatgctgagcctactgaagccgggcagcccacagccctggtgctgtgggacaccctagcaggattctgttgatggcagctttgcctcctccctaaggatccttgccaaagccctcctttgtggccctggtttctgcccttccctgaccctcccctccttttgccggaagccagtgaccatcatggaggctctatcttggggccaaggaatcccaaaagcttcaccttctaccggcgggacatgggggctcactctccagcttcgagtcggctgctctacccgggctggttcctgtgcacggagcctgaaagccgatcagcctgtcagactcacccagcttcccgagaatggtggctggaatgcccccatcacagacttctacttccagcaggtgtgactagggcaacggtgccccccagaactccctgggcagagccagctcgggtgaggggtgagtggaggagacccatggcggacaatcactctctctgctctcaggacccccacgtctgacttagtgggcacctgaccactttgtcttctggttcccagtttggataaattctgagatttggagctcagtccacggtcctcccccactggatgcctgctactgctgtggaaccttgtaaaaaccacgtggggtaaaactgggaataacatgaaaagatttctgggggcggggggccgcgcccagggtggggaaacatttcctgcttaatggtaactgacaagtgttacccttgagccccgcaggcaaccccattcccaggtggacccttaaggggtcagtagctctcccacatgaagtcctgtcactcaccactgtgccaggagagggaagggggcataagagccagggaactattgccccttgcccagc

SEQ ID NO: 136885 - DNA, 663 bp, Homo sapiens; identical to SEQ ID NO: 124951

SEQ ID NO: 136886 - DNA, 1080 bp, Homo sapiens
tcattggcgggatttgagctggctttcgctgacataaagacgtacgccgcggaatttctcgttagagagaatcgccgcgcgagcaaacgcctgcttgagcagatcgcagccagcttccagatgtttgtccgggttcttcggcagaacgcggcgataatccgggaagcgaccatccaccagtttggaggtgaagataaagtcgccaacgtgggcgcgaatgttgttgctgccaatctgtacgcgcagcggattgtcgccgccgtcgagcatacgcatcagttcaatcacgcctttacgcggtacgatcaccgaatggcttggcaaagattgaccaattggcattgaacagaccgccagacggtggccgtcggttgccacggtgcgcagttcttcaccttcggtttcaaacagcataccatttaagtaatagcgaacgtcctgatgcgccatagaaaactgggtcgcttcaatcagacgcttcatcgttgcctgcggcagggtaaattcgacttcactctgccagtcatcgaggttcgggaaatccgccgctttcagcttgaccggcaatttcctgcggcctttctggccaacccacggcgggattattaaaggaaaattgtttccgcccggaaaacgggtcggccgcgtccctcggccccggggtggcgtggaaacacagacgccagacaccgttggcccctccattattttcttatatccgcccctgcagtgaccggagaacggcgtgttcctagggctctgctgccgtcgtggaagcaggatttccgcggttgtgtaacggcctgtcgcaggcgtgcagggacctggactccgcctcgtccccggggctcgggcagccgagccatggcggggaactgtggggcccgcggcgcgctgtcggcgcacacgctgctgttcgacctgccgcccgcgctgctcggagagctctgcgctgttctggacagctgggacagcgccctgggctggcgcggcctgggtgagtccggggggaccgggccggggccggcgggggaagcccaacgccgccgcgggggccccgctcgggcgtcgcccctgcat

SEQ ID NO: 136887 - DNA, 1325 bp, Homo sapiens
ttagaggccacatagtccgagatatcgtcctgtgtggtgcctggctttagagcacagggcgatatacagagcacagggcgatgatatcttttggaattcgggattaccaagcggtggagaaccttccagtctcatgggcatgccaacataagccgccgctctggctggccgcatcttcaatctgcacgctggaaaccgaatcggtcagcatcatgcggacgttttcgcatttcagcgcgttcagaacatccagcaccataactgacgttgaagccgatttccatctccgcaccgctataggtaacgtcgaggatctcttccgcttcttcctgttccgggttgttggcggtgattttcagctggttttcgctgacataaagacgtacgccgcggaatttctcgttagagagaatcgccgcgcgagcaaacgcctgcttgagcagatcgcagccagcttccagatgtttgtccgggttcttcggcagaacgcggcgataatccgggaagcgaccatccaccagtttggaggtgaagataaagtcgccaacgtgggcgcgaatgttgttgctgccaatctgtacgcgcagcggattgtcgccgccgtcgagcatacgcatcagttcaatcacgcctttacgcggtacgatcaccgaatggcttggcaaagattgaccaattggcattgaacagaccgccagacggtggccgtcggttgccacggtgcgcagttcttcaccttcggtttcaaacagcataccatttaagtaatagcgaacgtccagccccagacccgcgcccaccagcagcgaaatcgccagacgcggcaacaagctgtagtgaaaaatcatctgctcgatgacgtcaatatccggcgaccaggcagcctgcgcccactggctacgcggcagcgcctgcgagaagttcatccaggtgagcgccgtagcgacaatcactccgatggcgttatccagaacgcgcacaaagtgcattgccgagagcgtcgcaccataaaaccagactgcaggtacgcgctgaaagcgtccggcgcggacaaacggcatggcctgccacagcggcgttgccattagcgcatccatgtctttgctgttgtcgtgatcaaaacagagcacatcaacgtctttatacgccgccagacgatcgatactgacggcggtactgccccagaagttggtttccccttgccaggcatttgggatgccgtactcatcaagaatttccagctcacggatgtgtatcgccgctgcgggtgtcagcgttaagccttgccagccgaaatcttgtgggttaaaggttcctgaatgcat

SEQ ID NO: 136888 - DNA, 2490 bp, Homo sapiens
gcctgtcgcaggcgtgcagggacctggactccgcctcgtccccggggctcgggcagccgagccatggcggggaactgtggggcccgcggcgcgctgtcggcgcacacgctgctgttcgacctgccgcccgcgctgctcggagagctctgcgctgttctggacagctgcgacggcgcgctgggctggcgcggcctggcagagagactttcaagcagctggctggatgttcgtcatattgaaaagtatgtagaccaaggtaaaagtggaacaagagaattactttggtcctgggcacagaaaaacaagaccatcggtgaccttttacaggtcctccaggagatgggacatcgtcgagctattcatttaattacaaactatggagcagtgttgagtccttcagagaagagttatcaggaaggtggatttccaaatatattattcaaggaaacagccaatgtcaccgtggataatgttcttattcctgaacataatgaaaaaggagtactgcttaaatcttccatcagctttcaaaatatcatagaaaggaactagaaattttcacaaagactttcttattggggaaaggggagagaatttgggggttaccaggaggggaagattcaaaccctaacatatgctgtcaaattatttaaacaggagaaaaaaatgcagtgtaagaagcattggaagaggtttttatctgagcttgaagttttactactgtttcatcacccaaacatactagagttggctgcatattttacagagacttgagaagttctgtctgatttatccatacatgagaaatggaacactttttgacagattgcagtgtgtaggtgacacggccccactcccttggcacattcgaatcggtatattaataggaatatcaaaaaccattcactacctgcacaacgttcaaccatgctcggtcatctgtggcagtatatcaagtgcaaacatccttttgggatgatcagtttcaccccaaactaactgatttttccatggcacacttccggtccccccctagaacatcaaagttgttgcataaatatgcccagcagcaagcagaaaacatctgtggtacattgccagaagagtacatcagacaggggaaactttccattaaaacagatgtctacagctttggaattgtaataatggaagttctaacaggatgtagagtagtgttagatgatccaaaacatatccagctgcgggatctccttagagaattgatggagaagagaggcctggattcatgtctctcatttctagataagaaagtgcctccctgccctcggaatttctctgccaagctcttctgtttggcaggccggtgtgctgcaacgcgggcaaagttaagaccatcaatggatgaaggtctaaagggcgcttgaaagtactcaagccagcttgtattttggctggagatcctcccacatcactaaaggcccttagggggcctttctcctctattccctggagaaagtaacaaagtattccagtgggaagatgatgaaagagccgaataacaatttactaccctcttgatagaaggccttgaggatgaaacgatggcctcaaaaaaactcctttttgaatgcagccagccttgaggtatggtttctgagcttggaacaaaaagcccgagaagccagagaaaatgaggaagcttgcaacatgcccagttcttctttgtgaagaaagttggttccccaagtataatagttccatccccaggacttaaggcccttataagggaaataaaagatcctttcttcacaagctttcagggcattcttgcctgaaccaagccagtggagagcagctgttcctccaaattttcctgggatgaatatgaacagtacaaaaaagaataaattctaccagaagataaagaaaaaagcaagtattgcataggcacctgagcataggtatgaccttgggaagacattggctccataagcaatgccaagagaatgatcaatagtgagtttgggtgatgcagataaacaatctggataattccatttcttttttcccaaaccctcaaacagagtgccttaaaaaattgttttatcaggataattgtctcatgaccaaatccacgctcaattagagccattcaaaattccttaagatcatgggttctgacttcagccaaacaaaacaatcaaaacctaccaaaaagggactggattgtaatgtcctctccatcatcctcagtgtgagtcctcagagcctccatctgccaagaacattcagttggattccatcgtttggtttagcttgcttgcacgggttgtaggaaatgtctaatttgtaaatgttaatagatacctttggaaagaatcaccttgttattctgattgacccctcttgttttttggttaatccctgactagcctgcttgtctgaaaatgagccaggttcacccttagctacggcatgctctgggttgaaaggggatttcttcccaag

SEQ ID NO: 136889 - DNA, 1964 bp, Homo sapiens
cggtgggagcggggcgggaagcgcttcagggcagcggatcccatgtcggccctgaggcgctcgggctacggccccagtgacggtccgtcctacggccgctactacgggcctgggggtggagatgtgccggtacacccacctccacccttatatcctcttcgccctgaacctccccagcctcccatttcctggcgggtgcgcgggggcggcccggcggagaccacctggctgggagaaggcggaggaggcgatggctactatccctcgggaggcgcctggccagagcctggtcgagccggaggaagccaccaggagcagccaccatatcctagctacaattctaactattggaattctactgcgagatctagggctccttacccaagtacatatcctgtaagaccagaatttgcaaggccagagtttgaattcttatacaaatggagcgtatggtccaacataccccccaggccctggggcaaatactgcctcatactcaggggcttattatgcacctggttatactcagaccagttactccacagaagttccaagtacttaccgttcatctggcaacagcccaactccagtctctcgtgggatctatccccagcaggactgtcagactgaagcaccccctcttagggggcaggttccaggatatccgccttcacagaaccctggaatgaccctgccccattatccttatggagatggtaatcgtagtgttccacaatcaggaccgactgtacgaccacaagaagatgcgtgggcttctcctggtgcttatggaatgggtggccgttatccctggccttcatcagcgccctcagcaccacccggcaatctctacatgactgaaagtacttcaccatggcctagcagtggctctccccagtcacccccttcacccccagtccagcagcccaaggattcttcatacccctatagccaatcagatcaaagcatgaaccggcacaactttcccttgccagtgtccatcagtacgaatccctcggggaccagtgaacaatggatgattccagaatccttttggattccccaagtcccagtatagtgcctgagccctcagcctgtatgggtaatgcccacccagtgacccatccccaacaatcaagatcaaagtagcagtcttcctgaagaatgtgtaccttcagatgaaagtactcctccgagtattaaaaaaatcatacatgtgctggagaaggtccagtatcttgaacaagaagtagaagaatttgtaggaaaaaagacagacaaagcatactggcttttggaagaaatgctaaccaaggaacttttggaactggattcagttgaaactgggggccaggactctgtacggcaggccagaaaagaggctgtttgtaagattcaggccatactggaaaaattagaaaaaaaaaggattatgaaaggatttataacaaagtggaagcctgttactaacttgaccaaagaacacttgatttggttaattaccctctttttgaaatgcctgttgatgacaagaagcaatacattccagcttttcctttgattttatacttgaaaaactggcaaaggaatggaagaatattttagtcatgaagttgttttcagttttcagacgaatgaatgtaataggaaactatggagttaccaatattgccaagtagactcactccttaaaaaatttatggatatctacaagctgcttattaccagcaggagggaaacacacttcacacaacaggcttatcagaaacctaccagatgaaactggatataatttgagacaaacaggatgtgtttttttaaacatctggatatcttgtcacatttttgtacattgtgactgctttcaacatatacttcatgtgtaattatagcttagactttagccttcttggacttctgttttgttttgttatttgcagtttacaaatatagtattattctct

SEQ ID NO: 136890 - DNA, 320 bp, Homo sapiens
agcttaaacccctgtcccaagggcgttaaggtcgcccgctggcttggaaggttcacacctatcttccatcagcaccatgatgccggcggtcatgagtgtagggaaggtcacagagaatggcgggagcccccaggggatcaagtccccctcgaagcctccaggaccaaatcggattggctgaaggaaccaggtaagtgttcacacctagcggtgacctctggtgggttcaatccatgagaacattgggagatgtttccgagtttcctatgataaaaccttggaagaattgggaataaaacggacatacccagaggccttga

SEQ ID NO: 136891 - DNA, 5836 bp, Homo sapiens
cgggatggcaactgcggtcaccctgctaaagtcggggcggggcggcggtcctccccctcaccccccccagtccgagcgccgccgccgccgccgccgccgccgccggccgcttcagtaacacgtccccaggagactcgcaggagcaacacgtgatgtgtctacttatcagggttgctccgagtgtgtgttccaggagtggtggctctgaggtgtgaccctgcccacgtttgggcccagccaccttcagccccccaataaggtgggcagcttgataacacaaagaaaacagtgtcaacgagtactaccaagagaagaagacaagaagtcaacacagactcattttctactccgtgtgaatgatagctacagcaggggaaagtttcatagtctatcagtgggtcagaaaatggagttttatagcagaggcttcttagaagcttaaacccctgtcccaatgacgtcaagttcgtcccgctggcttggaaggttcagacctatcttccatcaacaccatgatgtcggcggtcatgagtgtagggaaggtcacagagaatggcgggagcccccaggggatcaagtccccctcgaagcctccaggaccaaatcggattggcagaaggaaccaggaaacgaaagaggagaagtcttcctataactgccccctgtgtgagaagatttgcactacccagcaccagctgaccatgcacattcgccagcacaacacagacactggaggagccgaccactcatgcagcatctgcggaaagtcactgagctcggccagctccctcgatcgccacatgctggtgcactctggcgagaggccttacaagtgcactgtgtgtggccagtcatttaccaccaatgggaacatgcacagacatatgaagatccatgagaaggacccaactagtgccacagccacagccccaggtagaggagactttgcatccgctaagtcctccaagaggaaactgagtcacgatgccgagtcagagagagaagacccagcaccagctaaaaagatggtagaagacgggcagtcaggtgacttggagaagaaagctgatgaagtctttcactgcccagtatgtttcaaggagtttgtttgcaagtatggactggagacccacatggagacccattcagataacccactaagatgtgacatttgttgtgtcacctttcgaacacatcgaggactgctgcgtcacaacgcgcttgtccacaaacaacttcccagggatgcaatgggcagacctttcatacagaacaacccttcaattcctgctggcttccacgacttaggattcacggacttctcctgtaggaagtttcctcgcatttctcaggcctggtgcgaaacaaacctgcggaggtgcatcagcgagcaacaccgttttgtctgcgacacctgtgacaaggcgttccccatgctctgctcagtggctctgcacaagcagacccacgtggcggcagaccagggtcaagaaaagccgcaggccacgcccctgcctggtgacgccctggaccagaagggcttcctggccttgcttggcctgcagcacaccaaagacgtcaggcctgcccccgccgaggagcccctgccggatgacaaccaggcaattcagctccagacactcaagtgtcagctacctcaggaccccggctgcaccaacctgctgagcctgtcacctttcgaagctgcttccctaggcggttctctcacagttctccccgcaaccaaggacagcataaagcacctgtccctgcagcccttccagaagggcttcatcatccagcctgacagcagcattgtggtcaagcccatctctggcgagtcggccatcgagctggcagacatccagcaaattctgaagatggcagcctcggctccccctcagatcagtcttccgcccttctccaaggcccctggccgccccactgcaggcgatcttcaagcacatgccccctctgaaggcaaagcccctggtcacaccacggacggtggtgggccacctccacgcccccgcctctcatcaacgcccagcaggcttcccgtggctgtatcagccccagcctgccgccaccgcccctgaagctcctcaaaggctcactggaggcggcctccaacgcccacctgctgcagtccaagtccgggacccagccccacgcggccacgcggctctccctgcagcgcagccgcgggcggagctgccgggccagcctgagatgaagacgcagctggagcaggacagcatcatcgaggccctgctgccgctgagcatggaggccaagatcaagcaggagatcacagagggggaactcaaggccttcatgacagcgcccggcggcaagaagacgcccgccatgcgcaaggtgctctacccttgccgcttctgcaaccaggtgtttgccttctcgggggtcttgcgtgcccacgtgcgctcccacctgggcatctcgccataccagtgcaacatctgcgactacatcgccgccgacaaggccgcgctcatccgccacctgcgcacgcacagtggggagcggccctacatttgcaagatctgccactaccccttcactgtcaaagccaactgcgagcggcacctgcgcaagaagcacctcaaggccacccgcaaggatatcgagaagaacatcgagtatgtgagtagcagcgcggccgagctggtggacgccttctgcgccccggacaccgtgtgccggctgtgcggcgaggacctcaagcactatcgtgccctgcgcatccacatgccgacgcactgcggccgcggcctgggcgggggccacaagggccgcaagcccttcgagtgcaaggagtgcagcgccgcgttcgcggccaagcgcaactgcatccaccacatcctcaagcagcacctgcacgtgcccgagcaggacatcgagagctacgtgctggccgccgacggcctgggccccgcagaggcgccggccgctgaggcgtcggggcgcggggaggacagtggctgcgctgcccttggtgactgcaagcccctcactgccttcctggaaccccagaacggctttcttcacaggggccccacccagcctccacctccccatgtctcgatcaagttggagcccgccagtagctttgcggtggacttcaatgagcccctggacttctcgcagaagggcctggccctggtccaagtgaagcaggaaaacatctcctttctgagcccttcttccctggtcccctatgactgctccatggagcccatcgacctgtccatccccaagaacttcaggaaaggggacaaggatttggccactcccagcgaagccaagaagcctgaggaggaggcggggagcagcgagcagccctctccctgcccagcacccggcccttctcttcctgtaactttggggcccagcggaatcctggaaagccccatggcccctgctccggcggccaccccggaacccccagcacagcccctgcagggccctgttcagctggcggtcccaatctactcctcagccctggtcagcagccctccactcgtgggcagctcagccctcctgagtggcacagccttgctgcgtccactgcggcccaagcccccgctgcttttgccaaagccccccgtgacagaagagctgcccccgctggcctccattgcccagatcatctcatctgtatcctcggcccccaccctgctgaaaaccaaggtggcggacccagggcccgcaagcactggcagtaacaccacggcttcagacagcttaggaggttctgtccccaaagccgccaccaccgccacccccgctgccaccaccagcccaaaagagtctagtgagcctcccgctccagccacaggcccagaggctgcctctcccaccgagcagggcccagcgggcacgtcgaagaagaggggccggaaaagggggatgaggagccgaccccgcgccaacagcggcggggtggacctgtactccagcggggagtttgccagcatcgagaagatgctggccactacagacaccaacaagttcagtccgtttctgcagacagcggaggacaacactcaggatgaggtggccggagcccctgccgaccaccatgggcccagtgatgaagagcagggcagtcccccagaagacaagctgctgagggccaagcggaactcgtacaccaactgcctgcagaagatcacctgtccccactgtccccgggttttcccttgggccagctccctacagaggcacatgctcacacacactgacagtcagtcggatgcgggagactgcagccgccgcgggcgaagtggctatgacctcacctcacgggacagagagcagccgtcggagggcgccactgagctccgccaggtcgcaggggatgcgcctgtggagcaggccacggcggaaacggcctcgcgcgtgcaccgggaagagcacgggcgtggggagagccatgagccggaggaggagcatggcactgaggagagcactggggacgccgacggcggaagaggacgcgtcgagcaaccagagcctggacctggacttcgccaccaagctcatggacttcaagctggcggagggcgacggcgaggcaggcgccgggggcgcggcctcgcaggagcagaagctctcctccgacacctgtgggaagagcttcaagttcctgggcaccctgagccgccaccggaaggcgcacggccgcccaggaggcccaaggacgagaagggagatggcgccagcactgcagaggaggggccccagcccgcccctgaacaggaggagaagccccccgagaccccggcagaggtggtggagtcggccccgggtgccggggaggccccggccggaaaagctcgcggaggagacggagggcccctccgacggggagagcgcggccgagaaaaggtcctcagagaagagcgacgatgacaagaaaccaaagacagactcccccaaaagcgtggccagcaaggcagacaagaggaagaaggtctgcagcgtgtgcaacaagcggttctggtcgctgcaggacctgagccggcacatgcgctcccacacaggggaaaggccatacaaatgtcagacctgcgagcgaaccttcaccttgaagcacagcctggttcgccaccagcggatccaccagaaagccaggcatgccaaacaccacgggaaggacagcgacaaggaagagcggggtgaggaggacagcgagaatgagtccacccacagcggcaacaacgccgtctcagagaacgaggctgagctggctcccaatgccagcaaccacatggctgtcacccggagccggaaggagggcttggccagtgccaccaaggactgcagccacagggaggagaaggtcacggcagggtggccgtctgagcctggccagggtgaccttaacccagagagcccggcggccctggggcaggacctgctggagccgcgcagcaagaggcctgcccacccaatcctggccacagctgatggcgcctcccagctcgtcgtaggggatggagtgacagcctcagtccccctcagcacagacaaaagccagcagagcaaagcgtctatacttcatggggtttcctcagtgccctttggctgttgaggagtgagagagagagagagagagagagagagagagagagagagacaagcaggagcgtggctgctcgctcagtgccatagccttaccgcagcctgcgcgggaggcccacagcccgtgccgattccagtgccttaactacttaccggatccctccatattatcatgggtgttgtatttttccaaaatgacttcttaaacaaaacaaatattataatg

SEQ ID NO: 136892 - DNA, 434 bp, Homo sapiens
cagtgaaatataatgcttgtgaagaactattgtagagtcagacacacctggattcacaatcttcactgatactagcatggggtccttacacagaatttttatgacaggaagactacacaaaaaatagataagtctaaccaagttagtaatgggacacacatgaggtagccaatacttactgactgaccctcctctactcataaaccatttaatcctcacaaattcttcaagtagacctggtccttttgcatatttctgtgcttgttatttattgatattaagttccaaggggaggggatgtattcatttagcagaaacaaggaccaaaaaagacattaacagaattggaaactcacaactagttttaaaactgaagtgttcggagctctggtctgtcccaccactgactgagaccaacaatccaccctcctgcc

SEQ ID NO: 136893 - DNA, 703 bp, Homo sapiens
  misc_feature (1)...(703): n = a,t,c or g
aatgggtttagttttttttnattttttacaaatatactggagaatcatgcaatgctgccagcattggatgcaatccggggccacagtcaagaaaggcaaaccagagctcagaaaaaaggtacatccagcagtggtttgcctttttttacaaatatacgtgggagaaatcatcgccaatggctggccaaggcatttggatgcaaatcccgggggccacaaagtctgcaaaactccctttgcctaactgggtccctgtaaatggcaagaaccttatcagtctcgcctttaattgttccactatgaactcctggcattatctttcaaaaattaaagaaaccacggccatctttttctaccggtatgaactttcggttgtcggaatgacccactgctgggatggtacccttttttcttggagctctgggtttgccctttcttggactgtggggccatcacccatggtcacccacaccaggcaggcggggaaggtctggttcaagccggtccccttgattcccccttcacgggaggatggatatacagggttttttgggctcctggtgtttgtcaagcaccaattggatttacaggttcctacccggaaggacccaagggaaaatccgggaattttcggcacccagaagggacccacccacggccctcgcttcgacatcttgacctgtgccgaattcctgcagcccgg

SEQ ID NO: 136894 - DNA, 385 bp, Homo sapiens
ctggaaacttaggccctgagctcagggccccaattcgttggccgtgaagtccgtaggataccccgtgatcaacgcgattcgagatcgacaaggaaacacggcacacaggttcagctgcttgagcgaaggcagtttgatgaggtgctcggcgcaggcactggttacattggtagaaggccaaactgatggttctccaggtttccgaaaggacgccggagctcagcaaacgagccaagtcagcgtccagctccttcagctcccgctgccggtcacacagctgctcgtacatgcgcttccccacgtctgtgctctccagggttgagatgatctgcagttgggtgtcgttgttgtcgatgatgttgtattccagcatcaagcacaggat

SEQ ID NO: 136895 - DNA, 520 bp, Homo sapiens
aattgccccatgtgctggcctggccagtccccgagggtccccagtacttgaggccggagaaatccacctcctaagaggcgctcagtctcagcagagtcgtgacgtcattggcctcagtccccgtccccataggcctgggcgctcttggctgtggcaactgtcttagaagaatggtcccccatggccgctgatgtgtgcagtaatgagtgccgcccgccttaatcgtggaacagttaatgaacacacctgggtctccggagcccacatgcacccacacatgctcaggcagcagcttagcccctcttattcacaggtgtgggcacagggaactttcgggaatggggggcccagtgtgttcatgttgctctgatctgccgcctcctcacagaaggcctttgttttggagctttgagtggggacaaaatgttggcatttcactcacattcctcttcattctttgaatcagacataaagtctagacgtccccagaggttaatcttgggaacaaaaaaaaaaaaaa

SEQ ID NO: 136896 - DNA, 866 bp, Homo sapiens
tcaggaaggcacgcttagagcgaaccacatccatcggagagggcagtgcaggtcgcagggtgcacaggtcagtgtttcccgctccactggaaacttaggccctgagctcagggccccaattcgttggccgtgaagtccgtaggataccccgtgatcaacgcgattcgagatcgacaaggaaacacggcacacaggttcagctgcttgagcgaaggcagtttgatgaggtgctcggcgcaggcactggttacattggtagaaggccaaactgatggttctccaggtttccgaaaggacgccggagctcagcaaacgagccaagtcagcgtctgtggacttggagggcagtgttagcctggtgggcccgcctttcctttgcagctccttcagctcccgctgccggtcacacagctgctcgtacatgcgcttccccacgtctgtgctctccagggttgagatgatctgcagttgggtgtcgttgttgtcgatgatgttgtattccagcatcaagcacaggatctccaccatggtctggttccccctcagtgccaggagcatgcagggacccagcttgttttctgccagggagagcaggaattttttggtcttgtaacaggagcccatgaggatgtgcaccatgctggcgaacagctccccgtcatcgtcgcaggccacccctccggggctgtagagctggaaccagccatctttgccggcccgcacgctcagcaggcatgagtggacctcttgcctggggtcttcggcgaacctctgaatcacgtacttcagttccttggtgaacttctcatgtgcgagagcttctctggggaatggaatgggttgaagcaaactggccagagacggtc

SEQ ID NO: 136897 - DNA, 1528 bp, Homo sapiens
tccttcctttttgttgtcctgtttgtttccctttaaaaaaataactattaatactacccactaacccgacagctgactggtttatacagtactacacgcccaggtgggggcgggagggcggtggggtcgggcgggggggacggtcaaagacttcataaataagaggcggggtcccagacccgcaatttgtcaacatgtcttaaataggtgcattatttaaatcttatgtacaaacaagaatcactttgcatagcaatggtgaggacacaggacgggtgcagtgatgtgactgggtcttcttgtcccaagggcggggggcgagttcgcagctcagctcggagcctctaggaagaaagcatccttcgtccggcccgcaatggtggcatcggagttgacttttcccacacgacggcatcaaacacaaaggcaaagaaaatccacaaagggtcccccaccccccacccacccccaaacccctccccgacccgctgatgctcctcttgttgctacaaagtccactttagatcaggcctgggcgctcttggctgtggcaacttcttagaagaatggtcccccatggccgctgatgtgtgcagtaatgagtgcgcccgccttaatcgtggaacaattaatgaacacacctgggtctccggacccacatgcacccacacatgctcaggcagcagcttagcccctcttattccaggtgtgggcacagggaactttcgggaatggggggcccaagctctcgcacatgagaagttcaccaaggaactgaagtacgtgattcagaggttcgccgaagaccccaggcaagagcatccctgtgagtgtcttctatagtattccagtgttgcgcggctggtccacgactgaggcaagattcgagcctggtccactcatgcctgctgagcgtgcgggccggcaaagatggctgttccagctctacagccccggaggggtggcctgcgacgatgacggggagtgttcgccagcatgtccctggcagccacttttctttctgtctctgaatttccctatccaggtacctcatgtgcacatcctcatggctcctgttacaagaccaaaaaattcctgctctccctggcagaaaacaagtgggtccctgcatgctcctggcactgagggggaaccagaccatggtggaagcatctgctgggagccaggagctgctgcaggcacgggggcagtggtggtcaccgcggccggccctcagtcaaagccgtgggagctagacttcacccctcagtgggaagagcatcgaagagttggcaggcgcagcaaagccatgggagctcccgtggaaatgagagttcgggcagattgctcaggggcctgcaaacatcccccgggggcctgccccatgtccagacccgcacggacgctgacttgctcgtttgctgagctccggctccttcggaaacctggagaacctcagtttgccttcaccaatgtaaccagtgcctgcgccgagcacctcatcaaactgcttcgctcaagcagctga

SEQ ID NO: 136898 - DNA, 397 bp, Homo sapiens
ccgaagcccctgttgcaagtgaggacaaagtgtggaaggccgtgagggtctgcagtccgagatggccttgtcctcagactgcagtgcactgttgatgcgctggaatgccttctctttttccaggtgcaggtcttcagccgtgacccggtaccccagctctaagcgatgtggcagcatcaaaggctcccctcgtgtctttgagtaactgagggtcagctggcagcgggatgaggctggccccctcctctgctttagcctgcgcaagcctcccgtggagctgtaggagctggagatggcatttcgtttggtgctcgagctcgtccaggatgtctgggatgtgtggttatatctgatttctgagctctgggcgtggaggtctgtctgcagaggcccgggc

SEQ ID NO: 136899 - DNA, 2358 bp, Homo sapiens
atggtgggcagcaggcggatctctggagttatcccgctgccctttaccaggagagcaggaatcttcagtgatccacgggcaaatatgcagccattgtgggcacctgttcctcccgcgacctttgtgcccacgtctctccctccagtacctactgcacgaccccccacgtccgcctcctgccattgccagcaggtgccttgcgcgggtttagaagtcgcgttgcccggcaacagaacaatctgctggcttagcctttggccaagttggcagctggatgaggacgctcagagcccagctcttgagagttcaagtatccgacagttccccactgctcccaggagcggttacccgggcactctgtgcccctcattcctgtttgggccaaggccgaggacctgcgagtaccacagtaagccagtgctgtgtgctccgagttccagggcatcccccagctcagccactacactgagcacaaggactctgtggggcccaggagcaggtagtcacccctttggggtccacaacacccggctgtccccagacttgtgtccagggaagatagtgttgagggccctcaaggagagcggggcagggatgcctgagcagcacaaggaccccagagtccaagaaaatcctgatgatcagagaacggtccccgaggtcaccggggatgcacggtctgcattttggcccctgcgggacaatggaggcccctctccctttgtgcccaggcccgggcctctgcagacagacctccacgcccagagctcagaaatcagatataaccacacatcccagacatcctggacgagctcgagcaccaaacgaaatgccatctccagctcctacagctccacgggaggcttgccggggctaaagcagaggagggggccagcctcatcccgctgccagctgaccctcagttactcaaagacagtgagtgaggacaggcctcaggctgtctctttgggtcacacacggtgtgaaaagggggcagatacagcaccagggcagacaatcgccccaacggcctctaggccccacatcaacacttcactgcacgttgaggacaaggccatctcggactgcagaccctcacggccttcccacactttgtcctcacttgcaacaggggcttcgggtgggcctcccgtttctaaagcacccactatggatgcacagcaggacagacccaagtcccaagactgcctgggcctagtggcccccctagcatctgctgcagaggtccccgctacagctcccgtgtctgggaagaagcacagaccaccaggacccctgttctcctcctcagatccccttcctgccaactcttcccactcccgggactcagcccaggtcacctcgatgattcctgcccccttcacagctgcaagcagggatgccggcatgagaagaacaaggtcggctcctgcagctgccgcagcagcccctcccccctccacattgaaccccacgtcggggtcactactcaatgcagtggatggaggcccctcacatttcttggcctcagccacagctgcagcacgtgcccagaggtcagaagtgagatataaccagagatcccagacctcccggaccagatcctgcctcaaacgaaatgccagctccagctcccacagctctacggaaggcctccaggaagtaaagcggaggagggggccagcctcatcccactgccagctggccctcagttcctcaaacacagtgagtgaggacggacctcaggctgtctcttcgggtcaccgctgtgaaaacaaggcaggtacagcaccagggcagacacttgcccccaggggtggctcccccagatcccaggcctctaggccccacatcaacactgcactgcacgttgaggacaaggccatctcggactgcagaccctcacggccttcccacactttgtcctcacttgcaacaggggcttcgggtgggcctcccgtttctaaagcacccactatggatgcacagcaggacagacccaagtcccaagactccctgggcctactggcccccctagcatctgctgcagaggtcccctctacagctcccgtgtctgggaagaagcacagaccaccaggacccctgttctcctcctcagatccccttcctgccacctcttaccactcccgggacacagcacaggctaggacaacatctcagagccttctgcctgctgcagactcggctcagcccaaatcactccatgaaattggggtgtggcatctgcctcaaggagcatttctacaacctctgctgcctctaccgcaaatgaaactggctctcacccactggctctcggtgacgggcacagtgcggagccccacagggagtgtgtag

SEQ ID NO: 136900 - DNA, 1203 bp, Homo sapiens
atgcctgagcaggacaaggaccctagagtccaagagaatcctgatgatcagagaagggtccccgaggtcaccggggatgcacggtctgcatttcggcccctgcgggacaatggaggcctctctctccctttgtgcccgggcccgggcctctgcagacagacctccatacccagagagctggggtaccgggtcactgttgaagacctggaccgggagaaggaggcagcattccagcgcatcaatagtgcactgcaggttgaggacaaggccatctcggactgcagactctcacggccttcccacactttgtcctcacttgcaacagggacttctggtctgcctgccgtttctaaagcacccagtatggatgcacagcaggagagacacaagtcccaagactgcctgggcctactggcccccctagcacctgctgcagaggtcccctctacagctcccatgtctgggaagaagcacagaccaccaggccccctgttctcctcctcagatccccttcctgccacctcttcccactcccaggactcagcccaggtcacctcgctgattcctgcccccttcccagctgcaagcatggatgcgggcatgagaagaacaagccctggcacttctgctcctgcagccgcagcagcccctcccccctccacattgaaccccacgttggggtcactactagagtggatagaggcccttcacatttctgggcctcagccacagctgcagcaggtgcccagaggtcagaaccagagatcccagacctcccggaccagctcgtgccccaaacgaaaggccatctccagctcctacagctctacgggaggcctcccggaacgaaagcggaggagggggccagcctcatcccactgccagctgaccctcagttcctcaaacacagtgagtgaggacggacctcaggctgtctcttcgggtcacacccattgtgaaaagacggcagatacagcaccagggcagacactcgcccccaggggtggcttccccagatcccaggcctctaggccctgtagacacaagtttcccctgctgccacgcaggcgaggggagcctttgatgctgcctcctcccttagagctggggtaccgggtcactgctgaagacctggaccgggagaaggaggtggcattccagcgcatcaagagtgcactgcaggttgaggacaaggccatctag

SEQ ID NO: 136901 - DNA, 1762 bp, Homo sapiens
gtaccacagtaagccagtgctgtgtgctccgagttccagggcatcccccagctcagccactacactgagcacaaggactctgtggggcccaggagcaggtagtcacccctttggggtccacaacacccggctgtccccagacttgtgtccagggaagatagtgttgagggccctcaaggagagcggggcagggatgcctgagcagcacaaggaccccagagtccaagaaaatcctgatgatcagagaacggtccccgaggtcaccggggatgcacggtctgcattttggcccctgcgggacaatggaggcccctctccctttgtgcccaggcccgggcctctgcagacagacctccacgcccagagctcagaaatcagatataaccacacatcccagacatcctggacgagctcgagcaccaaacgaaatgccatctccagctcctacagctccacgggaggcttgccggggctaaagcagaggagggggccagcctcatcccgctgccagctgaccctcagttactcaaagacagtgagtgaggacaggcctcaggctgtctctttgggtcacacacggtgtgaaaagggggcagatacagcaccagggcagacaatcgccccaacggcctctaggccccacatcaacacttcactgcacgttgaggacaaggccatctcggactgcagaccctcacggccttcccacactttgtcctcacttgcaacaggggcttcgggtgggcctcccgtttctaaagcacccactatggatgcacagcaggacagacccaagtcccaagactgcctgggcctagtggcccccctagcatctgctgcagaggtccccgctacagctcccgtgtctgggaagaagcacagaccaccaggacccctgttctcctcctcagatccccttcctgccaactcttcccactcccgggactcagcccaggtcacctcgatgattcctgcccccttcacagctgcaagcagggatgccggcatgagaagaacaaggtcggctcctgcagctgccgcagcagcccctcccccctccacattgaaccccacgtcggggtcactactcaatgcagtggatggaggcccctcacatttcttggcctcagccacagctgcagcacgtgcccagaggtcagaagtgagatataaccagagatcccagacctcccggaccagatcctgcctcaaacgaaatgccagctccagctcccacagctctacggaaggcctccaggaagtaaagcggaggagggggccagcctcatcccactgccagctggccctcagttcctcaaacacagtgagtgaggacggacctcaggctgtctcttcgggtcaccgctgtgaaaacaaggcaggtacagcaccagggcagacacttgcccccaggggtggctcccccagatcccaggcctctaggccccacatcaacactgcactgcacgttgaggacaaggccatctcggactgcagaccctcacggccttcccacactttgtcctcacttgcaacaggggcttcgggtgggcctcccgtttctaaagcacccactatggatgcacagcaggacagacccaagtcccaagactccctgggcctactggcccccctagcatctgctgcagaggtcccctctacagctcccgtgtctgggaagaagcacagaccaccaggacccctgttctcctcctcagatccccttcctgccacctcttaccactcccgggacacagcacag

SEQ ID NO: 136902 - DNA, 2058 bp, Homo sapiens
  misc_feature (1)...(2058): n = a,t,c or g
gtaccctgcaaagtcacaggggcggggctgcccaagaccctgggaacccacttcttgcatcacctagatgtgacacatggagtcaaaggaggtcattttggagctttaagatttgcctgctgggttttggacttgcatggggcctgtagctctttcgctttggccaacgctcagagcccagctctcgagagttcaagcatccgacggttccccactgctcccaggagcggttacccgggcactctgtgcccctcattcctgtttgggccaaggccgaggacctccgagtagggctcagttgcctggagccccttcagcccatccccgagttcactttgcttgtgggatctccccgttgctccgactctgtggggcccaggagcaggtagtcacccctttggggtccacaacacccggctgtccccagacttgtgtccagggaagatagtgttaagggccctcaaggagagcggggcagggatgcctgagcaggacaaggaccttagagtccaagagaatcctgatgatcagagaagagtccccgaggtcactggggatgcacggtctgcattttggcccctgcaggacaatggagtcctctttccctttgtgcccagtcccgggcatctgcagacatacctccatgcccagaggtcagaaatcagatataaccagacatcccagaccacctggacgagctcatgcaccaaccaaaatgccatctccagctcctacagctctgcgggaggcttgctggggctaaagtggaggagggggccagcggagcaaaagagcagggcagggatgcctgagcaggacaagggaccccagagtcccaanaaaatcctgatgatcagagaacggtccccgaggtcaccggggatgcacggtctacagttcggcccctgcgggacagtggaggcctctctccctttgtgcccaggcccgggcctctgcagacagacctccatgcccagagctcagaaatcagatataaccagacatcccagacctcctggacgagctcgagcaccaaacgaaatgccatctccagctcctacagctccacgggaggcttgctggggctaaagcagaggagggggccagcctcatcccgctgccagctgaccctcagttactcaaagacagtgagtgaggacaggcctcaggctgtctcttcgggtcacacacggtgtgaaaaggcggcagatacagcaccagggcagacactcgccccaaggggtggctcccccagatcccagggctctaggccccgtagacgcaagattgccctgctgccacacaggtgaggggagctgcaggttgaggacaaggccatcttggactgcagaccctcatggccttcccacactctgtcctcacttgcaacaggggcttctggtgagcctcccgtttctaaagcacccactatggatgcacagcaggacagacccaagtcccaagactgcctgggcctagtggccccccttgcatctgctgcagagatcccctctacagctcccgtgtctgggaagaagcacagaccaccaggacccctgttctcctcctcagatccccttcctgccacctcttcccactcccgggactcagcccaggtcacctcgctgattcctgcggccttcacagctgcaagcatggatgtcggcatgagaagaacaaggcctggcacgtcggctcctgcagctgccgcggcagcccctcccccctccacattgaaccccacgtcggggtcactactcaatgcagtggatggaggcccttcacatttctgggcctcagccacagctgcagcaggtgcccagaggtcagaagtgagatataaccagagatcccagacctcccggaccagatcgtgccgcaaacaaaatgccagctcgagctcccacagctctacggaaggcctcccggaacgaaaggatgccggcatgagaagaatgttttgtgttcgaaattgtttgaggggtttgggtttatttttgttggtttttttttttttgcttacatgggcatccttcagcttttaataatctgaaaaat

SEQ ID NO: 136903 - DNA, 1936 bp, Homo sapiens
atgatgatgaggtgtgaactaatgagagagaggtccaaggtgccctacatcgtgcgccagtgcgtggaggagatcgagcgccgaggcatggaggaggtgggcatctaccgcatgtctggggtggccgcagacatccaggcactgaaggcagccttcaacgtcaggaagcagccgctcttgtccatgtgcccgacgatcatggtgggccaggacggccaggtccggatggtggtgggagctgctgggggcacgcagatcaccacagacactgcactgcccccaagccacgctgatcacactcccatgccccaggccatcatctacaacctctggttcggctatgacgtgaagagggccgtggaggagccccggctgcacaacaagcttctgcccaacgtcacgacagtggagagaaacattgaccagacagacctccatgcccagaggtcagaaatcagatataaccagacatcccagatctcctggacgagctcctgcaccaaccgaaatgccatctccagctcctacagctccacgggaggcttgccggggctaaagcggaggagggggccagcctcatcccactgccagctgaccctcagttcctcaaagacagtgaacagcgataagttcgacgccaacgatccgatcctgaaagatcagacgcaagaatggtccggttctgcaacctttacatctgacggaaaaatccgtttattctacactgactattccggtaaacattacggcaaacaaagcctgacaacagcgcaggtaaatgtgtcaaaatctgatgacacactcaaaatcaacggagtggaagatcacaaaacgatttttgacggagacggaaaaacatatcagaacgttcagcagtttatcgatgaaggcaattatacatccggcgacaaccatacgctgagagaccctcactacgttgaagacaaaggccataaataccttgtattcgaagccaacacgggaacagaaaacggataccaaggcgaagaatctttatttaacaaagcgtactacggcggcggcacgaacttcttccgtaaagaaagccagaagcttcagcagagcgctaaaaaacgcgatgctgagttagcgaacggcgccctcggtatcatagagttaaataatgattacacattgaaaaaagtaatgaagccgctgatcactaggggtagctctagaccgtcaattcgggaggatgaaaacggcagatcgcaaaaaccagtacatccagaaggagacatgaccatgaacatcaaaaaaattgtaaaccaagccacagttctgacttttacgactgcacttctggcaggaggagcgactcaagccttcgcgaaagaaaataaccaaaaagcatacaaagaaacgtacggcgtctctcatattacacgccatgatatgctgcagatccctaaacagcagcaaaacgaaaaataccaagtgcctcaattcgatcaatcaacgattaaaaatattgagtctgcaaaaggacttgatgtgtgggacagctggccgctgcaaaacgctgacggaacagtagctgaatacaacggctatcacgttgtgtttgctcttgcgggaagcccgaaagacgctgatgacacatcaatctacatgttttatcaaaaggtcggcgacaactcaatcgacagctggaaaaacgcgggccgtgtctttaaagacagcgataagttcgacgccaacgatccgatcctgaaagatcagacgcaagaatggcgaggggaggcctttgatgcttgccaccttccttagaagtgggggtaccggggtcacttgtgaaggaactggaccgggagaaggaggcggcatttccagcgcatcaacagtgcactgcaggttgaggacaaggccatctcggactgcagaccctcatggccttcccacactttgtcctcac

SEQ ID NO: 136904 - DNA, 1036 bp, Homo sapiens
cactcgttgcccaggctggagtgcaatggtgcgatctcagctcactgcagtctccacctcagcaggagagcaggaatcttcagtgatccacgggcaaatatgcagccattgtgggcacctgttcctcccgcgacctttgtgcccacgtctctccctccagtacctattgcacggccccccacgtccgcctcctgccattgccagcaggtgccttgcgccggtacctggctgtgcttattcatccattatggtcgctctgtcactggtgccattatgtgctcacatgcccactccctcaggtttagaagtcgtgttgcccggcaacagaacaatctgctggcttagcctttggccaagttggcagctggacgaggacgctcagagcccagctcttgagagttcaagtatccgacagttccccactgctcccaggagcggttacccgggcactctgtgcccctcattcctgtttgggccaaggccgaggacctgcgagtagggctcagttgcctggagccccttcagcccatcccccagttcactttgcttgtgggatctccccgttgctcctgcccctggactgagtggcaggccatcctacaaacacccgcacactcgacatcagtggtgtcaagacaactctaagaaggttttccgtgatcctgcaagacctgtgttccatcctggtgattctgtcttcaacttcactgcacagatagtgttgagggccctcaaggagagcggggcagggatgcctgagcagcacaaggaccccagagtccaagaaaatcctgatgatcagagaacggtccccgaggtcaccggggatgcacggtctgcattttggcccctgcgggacaatggaggcccctctccctttgtgcccaggcccgggcctctgcagacagacctccacgcccagagctcagaaatcagatataaccacacatcccagacatcctggacgagctcgagcaccaaacgaaatgccatctccagctcctatgcgatagctggaccgcctacactgaaataa

SEQ ID NO: 136905 - DNA, 2415 bp, Homo sapiens
atggacaagtacctactgcacggccccccacgtccgcctcctgccattgccagcaggtgccttgcgcgggtacctggctgcgcttattcatccattatggtcgctctgtcactggtgccattatgtgctcacatgcccactccctcaggtttagaagtcgcgttgcccggcaacagaacaatctgctggcttagcctttggccaagttggcagctggacgaggacgctcagagcccagctcttgagagttcaagtatccgacagttccccactgctcccaggagcggtatatctccgctctgtgcccctcattcctgtttgggccaaggccgaggacctgcgagccatcctacaagcacccagacactcgacatcagtggtgtcaagacaactccaagaaggttttccgtgatcctgcaagacctgtgttccatcctgggtgattcttgccttcaatttcacttgcacagggtaccacagcaagtcagtgctgtgttgctccgagtttcaggggcatcccccagcccagccactacactgagcacaaggactctgtggggcccaggagcaggtagtcacccctttggggtccacaacacccggctgtccccagacttgtgtccagggaagatagtgttgagggccctcaaggagagcagggcagggatgcctgagcaggacaaggaccccagagtccaagaaaatcctgatgatcagagaacggtccccgaggtcaccggggatgcacggtctgcattttggcccctgcgggacaatggaggcccctctccctttgtgcccaggcccgggcctctgcagacagacctccacgcccagagctcagaaatcagatataaccacacatcccagacatcctggacgagctcgaacaccaaacgaaatgccatctccagctcctacagctccacgggaggcttgccggggctaaagcagaggagggggccagcctcatcccgctgccagctgaccctcagttactcaaagacagtgagtgaggacaggcctcaggctgtctcttcgggtcacacacggtgtgaaaagggggcagatacatcaccagggcagacaatcgccccaacgggtggctcccccagatcccaggattctaggccccgtagacgcaagattcccctgctgccacgcaggcgaggggagcctttgatgctgccacctcccttagagctggggtaccgggtcacggctgaagacctgcacctggaaaaagagacggcattccagcgcatcaacagtgcactgcacgttgaggacaaggccatcccggactgcagaccctcacagccttcccacactttgtcctcacttgcaacaggggcttcgggtgggcctcccgtttctaaagcacacactatggatgcacagcagcacagacccaagtcccaagactgcctgggcctactggcccccctagcatctgctgcagaggtcccctctacagctcccgtgtctgggaagaagcacagaccaccaggacccctgttctcctcctcagatccccttcctgccacctcttaccactcacgggactcagcccaggtcacctcgctgattcccgcgcccttcacagctgcaagcagcgatgccggcatgagaagaacaaggcctggcacctcggctcctgcagctgcagcagcagcccctcccccctccacattgaaccccacgtcggggtcactactcaatgcagtggatggaagcccctcacatttcttggcctcagccacagctgcagcacgtgtccagaggtcagaagtgagatataaccagagatcccagacctcccggaccagatcctgcctccaaggaaatgccagctccagctcccacagctctacggaaggcctcccgcaactaaagcggaggagggggccagcctcatcccactgccagctggcccacagttcctcaaacacagtgagtgaggacggacctcaggctgtctcttcgggtcacacccgctgtgagaagaaggcaggggcttcgggtgggcctcccgtttctaaagcacccactatggatgcacagcaggacagacccaagtcccaagactgcctgggcctactggcccccctagcatctgctgcagaggtctcctctacagctcccgtgtctgggaagaagcacagaccaccaggacccctgttctcctcctcagatccccttcctgccacctcttcccactccggggactcagcccaggacacctcgctgattcctgcccccttcacacctgcaagcagggatgccggcatcagaagaatgtttcgtgttcgaaattgtttgagggaaaagtgttgtatattcaaagttccaaagaaacagaatatccaagacatcaccaatcatccaaaacatagtgtaggaggccacagttaa

SEQ ID NO: 136906 - DNA, 4850 bp, Homo sapiens
  misc_feature (1)...(4850): n = a,t,c or g
atggacaagtacctactgcacgaccccccacgtccgcctcctgccattgccagcaggtgccttgcgcgggtacctggctgcgcttattcatccattatggtcgctctgtcactggtgccattatgtgctcacatgcccactccctcaggtttagaagtcgcgttgcccggcaacagaacaatctgctggcttagcctttggccaagttggcagctggacgaggacgctcagagcccagctcttgagagttcaagtatccgacagttccccactgctcccaggagcggttacccgggcactctgtgcccctcattcctgtttgggccaaggccgaggacctgcgagtaccacagtaagccagtgctgtgtgctccgagttccagggcatcccccagctcagccactacactgagcacaaggactctgtggggcccaggagcaggtagtcacccctttggggtccacaacacccggctgtccccagacttgtgtccagggaagatagtgttgagggccctcaaggagagcggggcagggatgcctgagcaggacaaggaccccagagtccaagaaaatcctgatgatcagagaacggtccccgaggtcaccggggatgcacggtctgcattttggcccctgcgggacaatggaggcccctctccctttgtgcccaggcccgggcctctgcagacagacctccacgcccagagctcagaaatcagatataaccacacatcccagacatcctggacgagctcgagcaccaaacgaaatgccatctccagctcctacagctccacgggaggcttgccggggctaaagcagaggagggggccagcctcatcccgctgccagctgaccctcagttactcaaagacagtgagtgaggacaggcctcaggctgtctctttgggtcacacacggtgtgaaaagggggcagatacagcaccagggcagacaatcgccccaacgggtggctcccccagatcccaggactctaggccccgtagacgcaagattcccctgctgccacgcaggcgaggggagcctttgatgctgccacctcccttagagctggggtaccgggtcacggctgaagacctgcacctggaaaaagagacggcattccagcgcatcaacagtgcactgcacgttgaggacaaggccatcccggactgcagaccctcacggccttcccacactttgtcctcacttgcaacaggggcttcgggtgggcctcccgtttctaaagcacccactatggatgcacagccggacaaactcaagtcccaagactgcctgggcctagtggccgccctagcatctgctacagaggtctcctctacagctcccatgtctgggaagaagcacagaccaccaggacccctgttctcctcctcagatccccttcctgccacctcttcccactcccaggactcagcccaggtcacctcgatgattcctgcccccttcacagctgcaagcagggatgccagcatgagaagaacaaggcctggcacctcggctcctgcagctgccgcagcagcccctcccccctccacattgaaccccacgtcggggtcactactcaatgcagtggatgaaggcccctcacatttcttggcctcagccacagctgcagcacgtgcccagaggtcagaagtgagatataaccagagatcccagacctcccggaccagatcctgcctcaaacgaaatgccagctccagctcccacagctctacggaaggcctccaggaactaaagcggaggagggggccagcctcatcccactgccagctggccctcagttcctcaaacacagtgagtgaggacggacctcaggctgtctcttcgggtcaccgctgtgaaaacaaggcaggtacagcaccagggcagacacttgcccccaggggtggctcccccagatcccaggcctctaggccccacatcaacacttcactgcacgttgaggacaaggccatctcggactgcagaccctcacggccttcccacactttgtcctcacttgcaacaggggcttcgggtgggcctcccgtttctaaagcacccactatggatgcacagcaggacagacccaagtcccaagactccctgggcctactggcccccctagcatctgctgcagaggtcccctctacagctcccgtgtctgggaagaagcacagaccaccaggacccctgttctcctcctcagatccccttcctgccacctcttaccactcccgggacacagcacaggtcacctcgctgattcctgccaccttcacagctgcaagcagggatgccggcatgagaagaacaaggtcggctcctgcagctgccacagcagcccctcccccctccacattgaacaacacgtcggggtcactactcaatgcagtggatggaggcccctcacatttcttggcctcagccacagctgcagcacgtgcccagaggtcagaagtgagatataaccagagatcccagacctcccggaccagatcctgcctcaaacgaaatgccagctccagctccagctcccacagctctacggaaggcctccaggaactaaagcggaggagggggccagcctcatcccactgccagctggcccacagttcctcaaacacagtgagtgaggacggacctcaggctgtctcttcgggtcaccgctgtgaaaacaaggcaggtacagcaccagggcagacactcgcccccaggggaggctcccccagatcccaggcctctaggccccacatcaacagtgcactgtacgttgaggacaaggccatctcggactgcagaccctcacggccttcccacactttgtcctcacttgcaacaggggcttcgggtgggcctcccgtttctaaagcacccactatggacgcacagcaggacagacccaagtcccaagactgcctgggcctagtggcccccctagcatctgctgcagaggtcccctctacagctcccgtgtctgggaagaagcacagaccaccaggacccctgttctcctcctcagatccccttcctgccaactcttcccactcccgggactcagcccaggtcacctcgctgattcctgccaccttcacagctgcaagcagggatgccggcatgagaagaacaaggcctggcacctcggctcctgcagctgccgcagcagcccttcccccctccacattgaaccccacgtcggggtcgctactcaatgcagtggatggaggcccctcacatttcttggcctcagccacagctgcagcacgtgcccagaggtcagaagtgagatataaccagagatcccagacctcccggaccagatcctgcctcaaacgaaatgccagctccagctcccacagctctacggaaggcctccaggaantaaagcggaggagggggccagcctcatcccactgccagctggcccacagttcctcaaacacagtgagtgaggacggacctcaggctgtctcttcgggtcaccgctgtgaaaacaaggcaggtacagcaccagggcagacactcgcccccaggggtggctcccccagatcccaggcctctaggccccgcatcaacagtgcactgcacgttgaggacaaggccatctcggactgcagaccctcacggccttcccacactttgtcctcacttgcaacaggggcttcgggtgggcctcccgtttctaaagcacccactatggatgcacagcaggacagacccaagtcccaagactgcctgggcctactggcccccctagcatctgctgcagaggtctcctctacagctcccgtgtctgggaagaagcacagaccaccaggacccctgttctcctcctcagatccccttcctgccacctcttcccactccggggactcagcccaggacacctcgctgattcctgcccccttcacacctgcaagcagggatgccggcatcagaagaatgtttcgtgttcgaaattgtttgagggaattggaaataactactttaaagttcgtatggaaccaaaaaagagcccgcattgccaagtcaatcctaagccaaaagaacaaagctggaggcatcacgctacctgacttcaaactatactacaaggctacagtaaccaaaacagcacggtactggtaccaaaacagagatatagatcaatggaacagaacagagccctcagaaataacgccgcatatctacaactatctcatctttgacaaacctgagaaaaataagcaatggggaaaggattccctatttaataaatggtgctgggaaaactggctagccatatggagaaagctgaaactggatcccttccttacaccttatacaaaaattaattcaagatggattaaagacttaaacgttagacctaaaaccataaaaaccctagaagaaaacctacgcattaccattcaggacacaggcgtgggcaaggacttcatgtctaaaacaccaaaagcaatggcaacaaaagccaaaattgacaaatgggatctaattaaactaaagagcttctgcacagcaaaagaaactaccatcacagtgaacaggcaacctacagaatgggagaaaattttcgcaacctactcatctgacaaagggctaatatccagaatctacaatgaactcaaacaaatttacaagaaaaaaacaaacaaccccatcaaaaagtgggcgaaggacatgaacagacacttcgcaaaagaagacatttatgcagccaaaaaacacatgaaaaaatgctcaccatcactggccatcagagaaatgcaaatcaaaaccacgatgagataccatctcacaccagttagaatggcaatcattaaaaagccaggaaacaacag

SEQ ID NO: 136907 - DNA, 429 bp, Homo sapiens
ttaacgaccatccagctctggtttttcattggtgcctaatggaaaatgagacatgaaaccagatacaatgtcctggtttccaggggtgtggggtgtcatcgacttttcttccttaatggtgtattcgagcacctcggccgagctttcgttcagagaaggaaagtggacacagagcaccagctgcttcgagctgctgtcccggcgaaccaggaacatcgaggtctcacccagagccagcatgttgacggacactcgcttctccttctcacgctcccaaattctttcttgtgtcagatccaagaaccttctcttggggtctggatcgggagccctttctggtaacgtgaggatacggccccaagcacaggaggctcctgaggagccctctgtcctgaccttgctctggtgatatcccaattctgctgccat

SEQ ID NO: 136908 - DNA, 1092 bp, Homo sapiens
ccggtaatagaggacacatctcttaactgggttgctctaagaactgatgtctaaaccgtctcagcatggcctgtagaggaggagctgggaatggccaccgtgcctcagctacactctctcgggttagccctggaagtctttacacatgtagaacccgtacccataatatatgcatggtatctgactttttctacccaaatatgggaggcgtggaaagccacatttaccagctctctcagtgcctgattgaaagagggcataaggttataattgtcacccatgcttatggaaatcgaaaaggcatccgttacctcaccagtggcctcaaagtctattacttgcctctgaaagtcatgtacaaccagtctacagccacgaccctctttcacagtctgccattgctcagggtgcgtcttttgggagctttagaacacaaggatgttagaaatgtcttagttcaaggacatatttttctgaatacctcccttactgaagcattctgcatggcgatcgtggaagcagccagttgtggtttacaggttgtaagtaccagagttggtggaattcctgaggtgcttccagaaaaccttattattttatgtgagccttcagtaaaatctttgtgtgaaggattggaaaaggctattttccaactgaagtcagggacattgccagctccagaaaacatccataacatagtaaagactttctacacctggaggaatgttgcagaaagaactgaaaaggtatatgaccgggtatcagtggaagctgtgttgccaatggacaaacgactggacagacttatttctcactgcggcccagtaacaggctacatctttgctttgttggcagttttcaacttcctcttcctcattttcttgagatggatgactccagattctatcattgatgttgcaatagatgccactgggccacggggtgcctggactaataactattctcacagtaaaagagggggtgagaataatgagatatctgaaaccaggtagaaggaagcctagattgtaagattttaaacatttgtaatagttctataaagactatggaaaataaccttgcttttggggg

SEQ ID NO: 136909 - DNA, 369 bp, Homo sapiens; identical to SEQ ID NO: 114809

SEQ ID NO: 136910 - DNA, 3626 bp, Homo sapiens
actggcggccatggaactcaccggtaatagaggacacatctcttaactgggttgctctaagaactgatgtctaaaccgtctcagcatggcctgtagaggaggagctgggaatggccaccgtgcctcagctacactctctcgggttagccctggaagtctttacacatgtagaacccgtacccataatatatgcatggtatctgactttttctacccaaatatgggaggcgttggaaagccacatttaccagctctctcagtgcctgattgaaagagggcataaggttataattgtcacccatgcttatggaaatcgaaaaggcatccgttacctcaccagtggcctcaaagtctattacttgcctctgaaagtcatgtacaaccagtctacagccacgaccctctttcacagtctgccattgctcaggtacatatttgttcgggagagagtcacgataatccattcacatagttctttttctgctatggcccatgatgctctctttcacgccaagacaatggggcttcagacagtcttcacggaccattccctttttggatttgctgatgtcagctcggtgcttacaaacaagcttctaaccgtgtctctttgtgatacaaaccacatcatttgtgtgtcttatactagtaaggaaaatactgtactaagagcagcactgaatcctgaaatagtgtccgtcattcctaatgctgtagatcctactgacttcactccagacccatttagaaggcatgatagtataactattgttgttgtcagcagacttgtttacagaaaagggatcgatttgcttagtggtataatacctgaactctgtcagaaatatccagatttaaatttcataattggaggagagggaccaaagagaatcattttggaagaagttcgggaaagataccagctgcatgacagggtgcgtcttttgggagctttagaacacaaggatgttagaaatgtcttagttcaaggacatatttttctgaatacctcccttactgaagcattctgcatggcgatcgtggaagcagccagttgtggtttacaggttgtaagtaccagagttggtggaattcctgaggtgcttccagaaaaccttattattttatgtgagccttcagtaaaatctttgtgtgaaggattggaaaaggctattttccaactgaagtcagggacattgccagctccagaaaacatccataacatagtaaagactttctacacctggaggaatgttgcagaaagaactgaaaaggtatatgaccgggtatcagtggaagctgtgttgccaatggacaaacgactggacagacttatttctcactgcggcccagtaacaggctacatctttgctttgttggcagttttcaacttcctcttcctcattttcttgagatggatgactccagattctatcattgatgttgcaatagatgccactgggccacggggtgcctggactaataactattctcacagtaaaagagggggtgagaataatgagatatctgaaaccaggtagaaggaagcctagattgtaagattttaaacatttgtaatagttctataaagactatggaaaataaccttgcttttggggggtttttgtttttttagagttaatttagtaagttatgctacctctatatcattcaatattttctgttgaggaaagataaaaatgtatgcaattcctgagtgtagaaacttcttgcacttatttaaaatttaggagagaacatttaagccactcaggtatgcaatttttcagactactgaaatccctgtagcagagatgttttaacattatattttgagagctttgggtgctgaagggccaaacgttttctgggcattttttggccagtttttaatgtaacaccattagacactcaccagatgtttacaagttttctttaggggaactacaacaattatatgaactgttttatatcatgttcatatacatttattagggaatctaaatcatgtctttgaacatttattagggttcactcagtagggtgttacatgttaattaacagggttccttgagtaaggtagtcccatcagttacccgcacattttgaacccctgctctgtgtagaatgttgaactagatgcttcccgccattaaggaccaggggtgcattcactctttgtttaccattcaaatggcttacttcatcataattgtggttgatatgagatcaatatccaaacatgccaaaaatgctcatgccagttaatgccaggaaaaaaatcaccgacacactactagtactttgttcctgttgtatgcattctcctaggtagagcctccatcttcagttgtgtttgtgaaggtattttttgctttttaaatactggggaccgatatcactgttgatagtgcagagaaaccctccacatttttcagtgcataattgagttttctataaatgccttcgtgttttctgagcagaatgtacgaggtgtgccatcccaaaaccagctgctaccctgtccttttaatgtaagtcactccccttcactgtggcctcgctgatgtctgataagtattgtcagtgtgcaaaaggctttacttcagaatggtttatttatagcaaactaagttgaaaattttagaaacagtctttgtggggtggatgttattaactgtcagtgttgttgcccagaaccatgggttttttaaaccccaaattatccacatggtgtgtattatgaattctttgaactcttaaggtttttgtgagaaaaggactgtgaattcaaaacaataaggcacttgtgggtgcactacatagattctgacagtgttgtgattctgtataggatttttaaaaatgacaacattcacaaaatttattactttttaaaaaataacatgcctattaactggttgcactgatataaaagaaatatatttgtgttttgtttgtactaaaatgcaaaagcaagagtgcaatttttaaaatctagaagttaggggttttgttggagaaaaatggactgatctttaaactattcagtcttactgggatttttatgcatagaaactcacatataaacatgaaataaacagtgccagttattcataggaaagtgagaaactggtatattttggctattattctattcaacaggttttagaggccatgcccacccattttttcccttatatttttggcttaatttttttaaattgtccatttaattcttaaacgggccttttattggagttggaaaataggatctaaagttagttgcctttgcctgtaaaacaagtgatttgcaaattattatttttcctttttttttaacaaatggaagtaaatttgtttcacgtaaatcttaattttcaacctttcctggataccttaattgtaactgtcagtttgcactggtcggtatatggaaacacattgctctactctgctacttagttgattttaaagtgaatttacagtgatgagaaatttgtgaaaaatatattgtatttcttttgatgtttcaaaaggttgcctatgaaaaactgatttgttaaaacatgctacatgtccgaaaaataaagaccagaatgacattttgataaaaaaaaaaaaaa

SEQ ID NO: 136911 - DNA, 263 bp, Homo sapiens
cttccctcctcgtcccgggcctcacctgcacccagcgccagagacgctgcaggggacagcgctggaccgtacagacctgcctaacatgccagcgcagccaacgcttcctcaatgatcccgggcatttactctggggagacgagcctgaggcccagctcgggagccaagcagaccgccttcctgaggagaaaatgcagacgaagggttccagtaaccagtgatggattcaccccatctcccgaataaagtttacttgttttaca

SEQ ID NO: 136912 - DNA, 637 bp, Homo sapiens
atggcggggccggtgaaggaccgcgaggccttccagaggctcaacttcgtgtaccaggtgagtctgcgacaagggccccacggggacggtgctcggcgtcccagagtgactgctcccctcccgcaggccgcccattgtgtccttgcccaggaccccgagaaccaggcgctggcgaggttttacttgctacactgagaggaccattgcgaagcggctcgtcttgcggcgggatccctcggtgaaagaggaacttctctgtcgaggctgctcttccctcctcgtcccgggcctcacctgcaccccagcgcccagagaccgttgcaggggacagcgctggaccggtacagacctgccctaacatgcccagcgcagccaagcgcttcctcaatgatcccgggcatttactctggggagacaggcctgaggcccagctcgggagccaagcaggtgagagattccaaaccactacaaccccttgccaaacacagcccactccatttcagaccgccttcctgaggagaaaatgcagactcagggttccagtaaccagtgatggattcaccccatctcccaaataatggtttacttgttttacattccatgattctgttctgtgggtatttcaactcttaattcc

SEQ ID NO: 136913 - DNA, 446 bp, Homo sapiens
gcgtcgacccacgcgtccgcaggaggaaggtgggtctgaatctagcaccatgacggaactagagacagccatgggtttgatcatagacgtcttttcccgatattcgggcagcgagggcagcacgcagaccctgaccaagggggagctcaaggtgctgatggagaaggagctaccaggcttcctgcagctctctggcccagggctgggtcatcagcacaccctgctgctgctgttcagatctgcatcctggtcccgcttggtcccacagtgagaacgctttgctatcacatgggcaggctctgagagccctgccggcctggccttctcaaagaagacctgagagcttgggacccaagcagagaggaagaacagggctcagggtgcttgctccatgctcgctccacacctggggctcaaccctggctttccccggctccctgtgtgac

SEQ ID NO: 136914 - DNA, 526 bp, Homo sapiens
gattttctcggccctgccagcccccaggaggaaggtgggtctgaatctagcaccagtgacggaacctagagaccagccatgggccatgatcatagacgtctttttcccgatattcgggcagccgagggcagccacgccagacccctgacccaagggggagctcaaggtgctgatggagaaggagctaccagggcttcctgcagagtggaaaagacaaggatgccgtggataaattgcctcaaggaccctggacgcccaatgggagatgcccagggtgggactttcagtgaagttcatccgtgttccgtggctgcaatcaccgtctgcctgtcacaaagtactttgaagaaggcaggactcaaatgaatgccctgggagatgttcacagatttcctggcaagagccattgggtccccaaggctttcccaaaatgttttgtttgggcatttatttccccttagggttgagcctgcttcatgttacctctggattaataaatgctttatgaaatgaaaaaaaaaaaaaa

SEQ ID NO: 136915 - DNA, 1128 bp, Homo sapiens
ttatgaaggtgttttttctgtatagatagttattaacttggtgtccttggatgggtgatgataggtggagccttctagtccgacatcttgctgctcatcttccttctcctgctcctcctcctttatcttcttcttattgttattattattatttccccatgtagatgcatctatacgtgatcgtctacccgtgtgtgccagaagggctgctgaggaggtggcaggcacactcctgtcctctggtttattttcatgtgttttaacttggagcacaaagataggattgtggttcagaactccaagccccccctccccccagccttccaggtcctctttgcccaagtataatgccagcaccccatatgcgagccctcccatgatgccaatgatgggccctcctttccgtgggatgatgccagtgggacttgctcctggtcccatgctcttgcagtacaacacgtgctcctgaaaggcagggaggtgtcgggactctggagtgcctggcccaatgccggatgcacagtagtgcccaatgcctgcagcctcatacttctgcaccctttctggttgagaatctcttgcccaggacacttttgtgttcagagtgaatttcctgacaagtagcaaatttaagtgtcccctgccagaagcgcactgagcatgcagagccccatcccttttatttttaatgtgcatcagtatgaggcagtcccaaagagggtgctctgggcagagctcagcaaacatctggcctgtggaagaggcctcagcaacacagctctggaaggaggtgggaacaggcaagagctttgaaaggctgcagatggtgagggtgccagggtgacagactgtgggtggcagttttctttgtattccaaataggctgaggattttctctcctttcactgtaatcccttcatgccattgggtccttagctgtggaccatacgtgtcacactgagctttccatctgctggtcctggcctcagcacacttcccacaaacatcaggcctgtcggaagacatccttagccatggaccacacatgtcacccctgagctgtccatctgctggtcctgagctcagcagatctcccactatctttacgatgagtctctggagctgcat

SEQ ID NO: 136916 - DNA, 752 bp, Homo sapiens
cattagtcagtctggtggaattccaacggcctgcagagcaacatgcccaagttttattgtgactactgcgatacatactctcacccatgactctccatctgtgagaaagacacactgcagtggaaggaaacacaaagagaatgtgaaagactattatcagaaatggatggaagagcaggctcagagcctgattgacaaaacaacggctgcatttcaacaaggaaagatacctcctactccattctctgctcctcctcctgcaggggcgatgataccacctccccccagccttccgggtcctcctcgccctggtatgatgccagcaccccatatggggggccctcccatgatgccaatgatgggccctcctcctcctgggatgatgccagtgggacctgctcctggaatgaggccgcccatgggaggccatatgccaatgatgcctgggcccccaatgatgagacctcctgcccgtcccatgatggtgcccactcggcccggaatgactcgaccagacagataaggatagaggggaggccttattgtatcggttttatattacctgttctgcttcaccaggagatcatgctgctgtgatactgagttttctaaacagcataaggaagacttgctcccctgtcctatgaaagagaatagttttggaggggagaagtgggacaaaaaagatgcagttttcctttgtattgggaaatgtgaaaataaaattgtcaactctttcagttaaaaaaaaa

SEQ ID NO: 136917 - DNA, 455 bp, Homo sapiens
ggtggtttttaatacatgacagaactcacactggggagaagccttataaatgtaatgaatgtgttaaagcattccatagatccacatgccttcatgctcataaaagaactcacactggggagaagccatatgaatgtaatcagtgagggaaagccttcaactcttcccattcctttcaaatacatgaaagaactcacacgggggagaagccatatgaatgtaaggaatgtggaaaagcattcaagggtcccagttctgttcgcagacatgaaagaacccactctacgaaaaaaccctatgaatgtaaacattgcgggaaagcattatcttatcttaccagctttcacaaccacttgggaatgcacactggagagatatctcatacatgtaagatatgtgggaaagccttttattctcccagtgtcacttcaaacacatgaataaactcacactgg

SEQ ID NO: 136918 - DNA, 1668 bp, Homo sapiens
ccagatgacaggctgaacttccaggagaagaaagcttctcctgaaataaaatcatgtgacagctttgtgtgtggagaagttggcctaggtaactcatcttttaatatgaacatcagaggtgacattggacacaaggcctatgagtatcaggaatatggaccgaagccatgtaagtgtcaacaacctaaaaaagccttcagatatcacccctcctttagaacaccacaaagggatcacactggagagaaaccctatgcttgtaaagaatgtggaaaaacttttatttcccattcaagcattcaaagacacgtggtaatgcacagtggggatggaccttataaatgtaaattttgtgggaaagcattccattgtctcagtttatatcttatccatgaaagaactcacactggagagaaaccgtatgaatgtaaacaatgtggtaaatcttttagttattctgctacccatcgaatacatgaaagaactcacattggagaaaagccttatgaatgtcagcaatgtggaaaagccttcagatctgcctcacagcttcaaattcatggaaggactcacactggagagaaaccttatgaatgtaagcagtgtgggaaagcctttggatctgcctcacaccttcaaatgcatggaaggactcacactggagagaaaccctatgaatgtaagcagtgtgggaagtcttttggatgtgcctcgcgacttcaaatgcatggaaggactcacactggagagaaaccgtataaatgtaagcaatgtgggaaagcttttggatgtccctcaaaccttcgaaggcatggaaggactcacactggagagaaaccctataaatgtaaccaatgtgggaaaaagtggaaagaccagaacattgaatatgagtaccaaaaccccaggagaaacttcaggagtctcatagaagggaatgtcaatgaaattaaagaagacagtcattgtggagaaacttttacccaggttccagatgacaggctgaacttccaggagaagaaagcttctcctgaagcaaaatcatgtgataactttgtatgtggagaagttggcataggtaactcatcttttaatatgaacatcagaggtgacattgggcacaaggcatacgagtatcaggactatgcaccaaagccatataagtgtcaacaacctaagaaagccttcagatatcacccctcctttagaacacaagaaaggaatcacaccggagagaaaccctatgcttgtaaagaatgtggaaaaacctttatttcccattcaggcattcgaagacgcatggtaatgcacagtggggatggaccttataaatcaagctttcttcgttcacatcctaaagtccctggtcacggccggcgctttgccatgaaccctactttactgaacaaggaggacgaacgcggtaacaagaatgtggtaaccagagagcacttggaccgtatgaagaatagctgcatcgtttgtaacatgggacattccaacacagagattgacgtgaatgtcgttatggggaactacgagagactggagcgggatgcccggatgacaattcgcaaaaaacggaagcgatattccgatatccgattccgaatcatggggcggtatacggttcgagtcgaggttctgacggcggtcaattccgagtag

SEQ ID NO: 136919 - DNA, 2779 bp, Homo sapiens
atgggagagaagccttatcaatgcaaagaatgtggaaaagcatttgcatataccagttctcttcgtagacatgaaaggacccactctgggaaaaaaccgtatgaatgtaagcaatatggggaaggcttatcctatcttataagttttcaaacacacataagaatgaactctggagaaagaccttataaatgtaagatatgtgggaaaggcttttattctgccaagtcatttcaaacacatgaaaaaactcacactggagagaaacgctataaatgcaagcaatgtggtaaagccttcaatctttccagttcctttggatatcatgaaaggattcacagtggagccaaaccctatgagtgtaagcagtgtgggaaagccttcagatctgcctcacagcttcgagtgcacggtgggactcacactggagagaaaccctatgaatgtaaggaatgtgggaaagccttcagatctacctcacaccttcgagtgcatggtaggactcatactggagagaaaccctatgaatgtaaggaatgtgggaaagccttcagatatgtgaagcaccttcaaattcatgaaaggacagaaaaacacataagaatgccctctggagaaagaccttataaatgtagtatatgtgagaaaggcttttattctgccaagtcatttcaaacacatgaaaaaactcacactggagagaaaccctatgaatgcaaccaatgtggtaaagccttcagatgttgcaattcccttcgatatcatgaaaggactcacactggagagaaaccctatgagtgtaagcaatgtgggaaagccttcagatctgcctcacaccttcgaatgcatgaaaggactcacactggagagaaaccctatgagtgtaagcaatgtgggaaagccttcagttgtgcctcaaaccttcgaaagcatggtaggactcacactggagagaaaccctatgagtgtaagcaatgtgggaaagccttcagatctgcctcaaaccttcagatgcatgaaaggactcacactggagagaaaccctatgaatgtaaggaatgcgaaaaagcattctgtaaattctcttcttttcaaatacatgaaaggaagcacagaggagagaagccctatgaatgtaagcattgtgggaatggattcacatctgccaagattcttcaaatacatgcaagaacacacattggagagaaacactatgaatttcttttcgatatcatgaaaggactcacactggggagaaaccctatcaatatacatgaaagagctcacacgggggagaagccatatgaatgtagggagtgtggaaaagcattcaagtgtcccatttctgttcgcagacatgaaagaacccactctaggaaaaaaccctatgaatgtaaacatcgtgggaaagtattatcttatcttaccagctttcaaaaccacttgggaatgcacactggagagatatctcataaatgtaagatatgtgggaaaggcttttattctcccaggtcacttcaaagacatgaaaaaactcacactgcagagaaaccctatgaatgcaagcaatgtggtaaagccttcagtagttccagttccttttggtaccatgaaaggactcacactggagagaaaccctatgagtgtaagcaatgtgggaaagccttcagatctgcctcaatccttcaaatgcatgctgggactcaccctgaagagaagccctacgagtgtaagcaatgtgggaaagccttcagatctgccccacaccttcgaatccatggtagaactcacactggagagaaaccctatgagtgtaaggaatgtgggaaagccttcagatctgccaagaaccttcgaattcatgaaaggacacaaacacacgtaagaatgcactctgtagaaagaccttataaatgtaagatatgtgggaaaggcttttattctgccaagactcacactggagagaaaccctatgagtgtaagcaatgtggaaaaaccttcagatctacctcacaccttcgaaaacatggtaggactcacactggagagaagccctatgaatgtcaggaatgtgggaaagctttcagatctatgaagaaccttcaaagtcatgaaaggacacaaacacacgtaagaatacactctggagaaagaccttataaatgtaagctatgtgggaaaggcttttattgtcccaaatcattgcaaagacatgaaaaaactcacactggagagaaactctatgaatgcaagcaacgttcagtagttccttcagtagttccagttccttttgatatcatgaaaggactcacactggagagaagccctataaatgcgagcaatgtgggaaagccttcagagctgtgtcaatcctttgaatgcatggtaggactcaccctgaagagaaaccctatgaatgtaagcagtgtgggaagtcttttggatgtgcctcgcgacttcaaatgcatggaaggactcacactggagagaaaccgtataaatgtaagcaatgtgggaaagcttttggatgtccctcaaaccttcgaaggcatggaaggactcacactggagagaaaccctataaatgtaaccaatgtggtaaagtctttagatgttcttcacaacttcaagtgcatggaagggctcactgcatagacaccccataaccccaggctttaggaggctgaggtggggggactgcttaagcccaggagttcaagaccagcctgggcaacatagtgagactctgttataaaaattaaataaataaataaaaagacaa

SEQ ID NO: 136920 - DNA, 2386 bp, Homo sapiens
aagttgttgttttgaaaatccatctcaaaacaacaacaacaaaaatgctttatggaagaaagtacagaaagcgagaaagggatgtgatgaccaaagcagggaataaatgtttggagtccacggcactttcttgggaatagagtctaggcccccactgctgtcactgtcacccagcctcctctacacatgtgagatgtttcaggaccctgtggcctgtgaggatgttgctgtaaacttcacccaggaggagtgggctttgctggatatttcgcagaggaaactctacagggaagtgatgctggaaactttcaggaacctgacctctataggaaaaaaatggagtgaccagaacattgaatatgagtaccaaaaccccagaagaagcttcaggagtctcatagaaaagaaagtcaatgaaattaaagatgacagtcattgtggagaaacttttacccaggttccagatgacaggctgaacttccaggagaagaaagcttctcctgaagtaaaatcatgtgacagctttgtgtgtgcagaagttggcataggtaactcatcttttaatatgagcatcagaggtgacactggacacaaggcatatgagtatcaggaatatggaccaaagccatataagtgtcaacaacctaaaaataagaaagccttcaggtatcgcccctccattagaacacaagaaagggatcacaccggagagaaaccctatgcttgtaaagaatgtggaaaaacctttatttcccattcaggcattcgaagacacatggtaatgcacagtggggatggaccttataaatgtaagttttgtgggaaagctgtccattgtctcagattatatcttatccatgaaagaactcacactggagagaaaccatatgaatgtaaacaatgtggtaaatcctttacttattctgctacccatcgaatacatgaaagaactcacactggagaaaagccttatgaatgtcagcaatgtgggaaagcattccatagttccagttcttttcaagcacataaaagaacccacactgggggaaagccatatgaatgtaaacaatgtggcaaatccttcagttggtgtcattcctttcaaatacatgaaagaactcacactggggagaagccctgtgaatgtagcaaatgtaataaagcattccgtagttacagatcctatcttagacataaaaggagtcacacgggagagaagccttatcaatgtaaggaatgtagaaaagcattcacgtatcccagttcccttcgtagacatgaaaggacccactctgcgaaaaaaccttatgaatttcctttcaatatcatgaaaggactcacactggagagaaaccctatgagtgtaagcaatgtgggaaagccttcagatgtgccccacaccttcgaaggcatggtaggactcactggagagaaaccctatgagtgtaaggaatgtgggaaagccttcagatctgcctcacaccttcaaattcatgaaaggacacaaacacacataagaatacactctggagaaagaccttataaatgtaagacatgtgggaaaggcttttattctcccaagtcatttcaaagacatgaaaaaactcacactgcagagaaaccctatgaatgcaagcaatgtggtaaagccttcagtagttccagttcctttccgtaccatgaaaggactcacactggagagaaaccctatgagtgtaagcaatgtgggaaagccttcagatctgcctcaatccttcaaatgcatgctgggactcaccctgaagagaagccctacgagtgtaagcaatgtgggaaagccttcagatctgccccacaccttcgaatccatggtagaactcacactggagagaaaccctatgagtgtaaggaatgtgggaaagccttcagatctgccaagaaccttcgaattcatgaaaggacacaaacacacgtaagaatgcactctgtagaaagaccttataaatgtaagatatgtgggaaaggcttttattctgccaagtcatttcaaatacatgaaaaatcttacactggagggaaaccctatgagtgtggcctccagctgcccagaacagctgcagagagtgtggattctgagaagctgcagggccctggaaagcaggagacccacgtgcagcttttgtctctctattgcctgcgccgtgtcctggactgctcacgggagttctgcaggagacgccggaatatctggaagctgaaaaatggatcgtcatcgccatcattgcttgtcgctgacttcggacttgtcctcggactccttggagacatctgcagactagaagtagacaacataaacataccaatattaataatgccagtgacaacaatgatcctccgaggggtttga

SEQ ID NO: 136921 - DNA, 709 bp, Homo sapiens
atgaaagaacacatagagagaaatcctgtgactataaaaaatgtggtaaagccttcaatcaatacagttcccttagaagacatgaaagctcatactggagagaaaccctacgaacgtcaaaaatgtgaactcaaccagaggcttcgggactatgcctttcagtaccatgagagtaactctggggtggtatctgctgacagcgaaaccaaatcagggcactctggatgtctaatcaaagagatgaaaaatgcaactaaaactcacaatggtatcactggtggtattattttcaatgctaatcactggagagagacaaacacaatatatacacgtatacatataaacaaacaagaaaagtatcaggcaactcacgtgtcctatgcagcgaactaaaataacaagggcattggcctctccgaggatatgatatttatttaagctgaggtctgaatgaccaggagccttcagagcaaagatcttgaaaaccagatacctcaggcaaaagggaagaattgctttaatcttggactgtttaaataaaaagaaaacagaggcatagtagagtaggcagaaacatatgcgatgagctcagagaggtttataaaaccctacatgatctgttctatccacctctctgagctcatgtagggttttataaacaaggctaaacctctgagtctttttctaagttgatatgaaagcttcagta

SEQ ID NO: 136922 - DNA, 303 bp, Homo sapiens
  misc_feature (1)...(303): n = a,t,c or g
cctagcctaaaatgaaatgtagtttgcctntcttgtgatttgaagagaagcagcagtctttacttttccagccaaatccagtagcagaatcatcttccacaacaaggaattaaaggcggagggatttctctttcctgagctcaccaaacttattccagtgttgnatcgcaagctgttgatgcacaggcgtcttgtggcaagcccagcntcagtttatgttagacaatcagtacacatgctggtgtgttttccaatggccagtgataagnaattaaataagtatttgtgagatttgctattttt

SEQ ID NO: 136923 - DNA, 438 bp, Homo sapiens; identical to SEQ ID NO: 124105

SEQ ID NO: 136924 - DNA, 1439 bp, Homo sapiens
atgccgagggcggagccaagagcgacactgggggagcaggaaaaggcggggcttccgcttggggcatggaggctgtacctcttacgtcacttccgtaaacaaacggagctgcggaggagcgggtcccgggatgtgaccggggctctgcttgtggctgcggcggtggcttctgaggctgtcgggtctttgcgggttgcggaagggggccccaatacccttcttcttcaggtcttaagaaggctggaccgtggtgcaataaggaacttaaaacaatggaagagcggaaagtgaagaggaggagtcctaagtcttttagtgcccactgtactcaggttgtcaatgtccaaaaaaaaatgtccattccagtgagtaaaaagcacaagggttttcaaatcctgcatcacaagtcaacttcacaagccgaccaaaagttaaaaaagaagtgatgaaaagaaaagaccaaacctcaagggttggaagaagggcaaaggcactccagtcaactcccgatccaacactccttcctcacttgatgtctccagatgttccaggaagatggagagagggctgctcagtctttttgaatgatttccactcctggaaaactttcaaacattttggaaattgaatgttccattagaacagatggaacatgtttccggggaattgcaggagaaattagctcgcttgaatttggagctctatggggagttagaggaacttcctgaggataagagaaaaacagccagtgactccaatctggataggcttctgtcagatttagaagaattgaattcttccatacaaaaactccatttggccagatgcacaagatgttccaaataccttccgctagctaaaatgaaatgtacgtttgctttccttgtgatttgaagagaagccagcagtcctttactttttccagccaaattcccagtagcagaatccatcttcccacaaccagggaatttaaagtaattaaaagtgccaagttccaatgatccgttttcacttactgctttttagtaaatggtgactccgctgtaaattccgccattaactgggaggccctaggcccttggttgaaggcttcaatcaggaaatgtgacgcagagaattgtgcctgctgtgcttcatattgttgccttatggggattatactttgaaatgccattggtgctgatgttccttgacagggcggagggatttctctttcctgagctcaccaaacttattccagtgttgagtcgcaagctgttgatgcacaggcgtccttgtggcaagcccagctttcaagtttatgttagacaatcagtacacatgctggtgtgttttccaatggccagtgataagaaattaaataaagtatttgtgagatttgctattttttaataaaggtaattgttttaaattaaaaaaaaaaaaaaagggcggccgct

SEQ ID NO: 136925 - DNA, 1299 bp, Homo sapiens
ctagggagtgtcagatggtgtgatctgccctgatggctcgtcttgaattattgttccatctggtgaagcatccggcgccactgtggccagaggtgtctggtccgtatcaggatctggcccttgaagcttccgccccgcctcgccgtccgcgagggactgcggtgtggtacgctccgtgacgtcatgccgccgagcatgtcgggagttgtagttggtccgcccgggccccgcccctgggccgtgcggtgacaccacttcagggccggcccccggaacttttgggcaggcgtcagcgcccgtgtcaccgccacgtcgcggacatggtgagtatctctgctcgtcaccgacccctgtgtttttccccggactttggcagccgccacgagcgggcttcacagcgcctgaaaggagctggtcctgccggggtccaagatggcagctgcgagctgcgtgggcagggcggctctccagttcgcctgtctccgcgcttctgacattcaaagtcattatactttcaactggtctgctttttggtccacttggtgggtggaaaatcttatcatctttgccagaaatatttgccaatttagccacataagggtcagcagaatgtgatgggtaaggatcaaatgttcctgccttcattccaccaggctttttaccaggagaagacggtttaaaagtatttgaaattgttttcttcttctcttcttttttaattggtggtaaagattcctcagaaaaataaggattaccgtcaaaatagtcccttgggtgaagatttaacttaaatggtgctcctttaagtaaacaatggtgctcttcattcgctttccatatccagttcctttctttcccgggtttgtgtataaattctttccaggtgccttgtatttttctcgaggttttgactgcgcgctgaaaaatgggactggaccacctattgttccatagtagcttcctaagccacatgattaaattgtgacacatatttatcacccacagtaatatattccatctcactaaagaggccaatcctttccatgtccgtttttcctccttccgcaggcatggtggcgtctggtgggtggtacctctctatacccgctaacttcaaaagtttccctagggtcacgtgttttatagcaaagtcctttcttgaggacacccactccgacagccgagatcaggttgccccagctcgtccaggttgccccagcttgtccacgttaactgcgctgcgggagcggcgagggttcccaagcgcaagacaagcttgggctgcgcagcgcctctgca

SEQ ID NO: 136926 - DNA, 375 bp, Homo sapiens
cctattaaactggaaattgatgaagaaaaaaacctgctgatcaagtttgacccttcctacagaaacgatctgaacaactgggtggcagaagaaattctagcaattaagtatgtggaacaccctcagatagacagcctggacctgcgcggagaagtgcattaccccaacctcagctttgagacaaaggagctggattttggctgcatcctgaacgatactgagctcattcgctacgttaccatcaccaactgcagtccgttggttgtgaagtttcgctggttcttcttggtgaatgatgaggaaaatcagataaggcttttcatggggttttctgtattccatgtactggccattcatgaatattttccattttga

SEQ ID NO: 136927 - DNA, 4282 bp, Homo sapiens
tttgctctagccccggaggctggcttctacagcctgggtcaacagccctcgactcgcatttctggctctggttgtgttcacccagtgagggtctggcctttctctatagaaccagctattggaactcttaatgtgggagagtccatgcaactggaagtggagtttgagccacagagtgtgggcgatcacagtggaagacttatcgtgtgttatgacacaggtgaaaaggtgtttgtatctctctatggagctgccatagacatgaatataaggctggataagaattccttgaccatcgagaaaacctacatatctctggccaatcagcgaactataaccattcacaatcgcagtaatatcattgcccatttcctgtggaaggtatttgctacccagcaagaagaggacagagaaaaatatagcaaggtcacagccgttttctcaatagcagccagctctaattctagatttgctctgtacgagagctcctacaattctcaaaggagcccctcagagtgggcctgtgatgatctgatcaaagaggagaaggatgagactgatgagttttttgaagagtgcattactgatcctttactccgagaacatctttctgttctgtcccgaacctttgcgaatcaaaggaggctggtgcagggagacagcaaactgttcttcaataacgttttcactgtggagcccctggggtggtcagaaaggaaggaaatggcagaaatccgagatgttcaaaagaaagacactaaagtgctttttgatcaactggctgttgatggtgaggaaggtgatgtctggcccaactcatcagctgaaatcaccgtgtactttaacccactagaagccaagctctatcaacagaccatttactgcgacattttaggccgagaaatccgtctgcccctccgaatcaaaggggaaggcatgggacctaagattcacttcaactttgaattgctggatattgggaaagttttcactggatctgcacattgttatgaggcgatactgtacaacaaagacagcatcgatgctctcttcaacatgacccctccaacttcagctttgggggcctgctttgttttcagtcccaaggaaggcatcattgaaccaagtggagtccaagctatccagatctccttcagctctaccatcctgggaaactttgaagaagagttcctggtcaatgtcaatgggtcacctgagcctgtgaaactgaccattagaggctgtgtcattggacctaccttccattttaatgttccagctctgcactttggtgatgtttcctttgaaaaaaatctcagatctattaaacagctaacaatgaaaaacaaactttttaaaatatcaggagaaaatataggtggttatgtttatatgctagcaagtgtgaaggtcttaaacaagatgcccaatgcaaaggccataaagaaaaaggttgagctagacctgtgcttcccccatgaagctactgagcacactgagatgtgctggtttcctcataccttgatatgttccctcaataatacctctttgatccccatgacttacaaactgcgtatccctggggatggccttggccataaaagcatttcatattgtgagcagcatgtggactacaaaagaccgtcttggaccaaggaagaaatatcctcaatgaaaccaaaagaattcaccatctctcctgactgtggcaccattcgcccccagggatttgctgctatcagggtgacattatgctccaacactgtacagaaatacgagctggcactcgtggtggacgtggagggcatcggagaagaggtgctggcgctcttaattgcagcaaggtgtgttgtacctgccctccacctggtcaatacagaggtggactttgggcactgcttcctgaagtacccgtatgagaaaacactccagcttgccgatcaagatgacctcccaggattctatgaggtccagcctcaggtgtgtgaggaggtgcctactgtgctgttttccagccccacccccagcggggtcatctccccaagcagcaccatccacataccactggtcctggagacccaggtcactggaggaacacagatccacgggtttacatctcaatctttgggagccaggacccccctttggtatgtcacttaaagagggcttggagaaggcccagttatctacgtccatcccaatcaagtggacttcgggaatatctacgtcctaaaagactcttccaggattctcaacctatgcaaccagtccttcattcccgcatttttccaggcacacatgggtgaatgtcagcccttcccagatgtggcactcactgtcagccatctgtcacactcagcctcatgtgcggccacacagcacagcaccactgtgattagatttacccttcgcaagaaacagctgtttgttatcagccagagggctgctgctctcaacaccttgctggagggagcacgcaagcgaatgaggtgggaactggaatgcatgagtgctgaaaccagccaaccgcataggcaccagcaagatcaaactccacttactgggacctgctgcactccacccctcacaggtgggagtgcacagtcaattttccgtttaataacaggaaatatcacaatgaccaagccctccctaaaagcaaaggatagccctaaaagtcaaccaccaaagagacacaaggatgatagagtagtttcgagcctgactcgtgcacacaaaaaatccctttggacgattgaacccaatgaaggcatggttcctccagaaactgatgttcaactggcactgaccgccaacctgaatgacacactgacattcaaggactgtgttattttggacattgaaaatagcagtacctatcggattcctgttcaggcttccggaactggttccactattgtttcagataagccctttgctccagaactcaatttgggggcacattttagcctggatacccactattaccactttaagttgatcaacaagggacgtcggatccaacagttgttctggatgaatgatagcttccgaccccaggccaagctgagtaagaagggccgggttaagaagggacatgctcatgtccaaccccagcccagtggctctcaggagcccagggatccacagagccccgtgtttcatctccaccccgccagcatggagctgtacccaggccaggcaattgatgtgatactcgaaggctattctgctactcccaggatagtgaaagagaagctggtgtgccacgccatcatcggggcacagaaggggaagagcttggtgatggctgtgaacatcacctgtgagttcgtcgcacctctcatccagctctccaccaagcagctcatctaccgactggagaagaaacctaacagtatcctgaaacctgattaccagcccttggccgtaaagaacatttccaccctgcccgtgaacttgttgctgtcaacatctggacccttctttatatgtgagactgataaatccctgctgccggcaactcctgagcctattaaactggaaattgatgaagaaaaaaacctgctgatcaagtttgacccttcctacagaaacgatctgaacaactgggtggcagaagaaattctagcaattaagtatgtggaacaccctcagatagacagcctggacctgcgcggagaagtgcattaccccaacctcagctttgagacaaaggagctggattttggctgcatcctgaacgatactgagctcattcgctacgttaccatcaccaactgcagtccgttggttgtgaagtttcgctggttcttcttggtgaatgatgaggaaaatcagataaggtacccccagcacagaactctcacagaactctgcttttcatttgttttctctttcaggcttttcatggggttttctgtattccatgtactggccattcatgaatattttccattttgaccactaattattgacagcaattaacaaggagcttaaaatcacgatccatcctcgatttcctaacaggaaacatagataaaacatctttgaaagttcccatatcaccaccgaattaacaaagcaatatccataagcccactttaattttgagtctagtgataagaccattagaaattcatcactaaaaaataaagtctttgtagaattgtttaaattattattttattgtggtaatatatatacaacttaacaaatttttaagtgtacaatacagtattattgactataagtaaaccagatttctagaacttaaaaaaaa

SEQ ID NO: 136928 - DNA, 1755 bp, Homo sapiens
tcatatatctataattattgtcatcttcataaattgtaaatattgatgtctgggtatagcgcggatcacttccatcaccactttatactggttcatcggctggtaaatggtcgagatttgccgctgaccgaaggcgttatttaacagactgttggcggcttgtacgtcgattcccagccgtgccatggtgtcgcggtcgtaaaccagattcatctccgcgccgttatcctgctgatcggagttcacgtccgccagttccggcaacgtcgccagttttttgcggattttcggctcccattctcgcagtgccgccaggtcgtcggataacaacgtgtactggtagctggcgttcgactgacgcccaccaacgcgaatatcctgtaccgccatcaggaacagattcgcccccggttctttcgccagttttacgcgcagacggtcgataatttgctgcgccgtttcgctgcgttcgtcgcgtggcttgagggtgataaacatcatcccgctgttcactcgcgaaccgcctgtaaagccggtgacattatccactgccggatcgtcacggataattttcatgaaatccagacgggtatgattgagcacccattttagtgacttgccgtagccttgttgcagggctaccaacatgcgaccaaaaccacgcagtcgcttttgctcgcgcggcttgctggctttcagcatccagccacacatcattggcgttaatgtcagagaaaccagcaacgatataccaatggcgacagaaagcgtcacggcaaattcgcgtaacagtcggcccggcaatccgcccatcaacagcagcggcaggaacaccgccaccagtgacagactcatcgacagcaccgtaaaaccgacttcgcgagtaccttgcagtgcggcttgcaacggtttcattcccgcttccagatgacgtgcaatgttttccagcaccacgatggcgtcatccaccacgaaaccagtagcgatggtgagcgccattaacgaaagggttattgagactgaatcccttccccaacccagtggtacgcccaagaaatgctcgttgtcgatgttttcgtccatgcccaaatgaccgcgtagccagcgcaccagcggcttgtcgccaatgcctgattcatcttcatggtcgagcgccatcttcacgccggtaaacagcaggaaggcaccgaagatatacaggatccagtcgaactgcgaaattagccagctgccagtgaagatcatgatggtacgcagaacaatcagcccacgaagcaacggcccagttatcaacccccatggccatacggcgggcagttgtaatgccgccggaacagagaaatagaacaaaaaaggaatacgtctgcgtattcctttcgggttgcccggtgaccggatgtgttttttcacacatcgtaatgacgatcgaccggcaatgaagttactccccccagtctggcggcggatctcggtcagcagtttggcggtgatgcgactgaccgccagccctggatgatccaccagatgctcatccaccagggtagcgaacagctctgcttcgtagagcatggtattaatatgctgcggctgggtgagatcctgcatttggctgccacgcggcacgaagcacactttctggcattcagacagtttttcaatcaccagcgatcctgcttcgccctgaatctcgctcgccaggacagaatcactgacttttgagtgctgcaaggtgacgctgaaatcaccgtaatccat

SEQ ID NO: 136929 - DNA, 2067 bp, Homo sapiens
ttagatccagctttcttttgattcacatttgaatggtgtatcttttttactttcaactgctttttcattcttcacgtttacacatgggaatgtgcttctctcacctgtcagcatctctgggtaagcattcagtgttctacaaatactgacgtccagaggatgtgagagagctgttgtgggtgggcgccgtgggacatgaactcggagacctgtggatgtgagagagccgtcgtggggtgggcgccgtgggacgtgaactcggagacctgtggatgtgagagagccgtcgtggggtgggcgccgtgagacatgaactcggagacctgtggatgtgacagtgccattgtggggtgggcgccgtgagacatgaactcggagacctgtggatgtgagagagccgtcgtggggtgggcgccgtgagacgtgaactcggagacctgtggatgtgagagagccgtcgtggggtgggcgccgtgagacgtgaactcggagacctgtggtctggacttgctggctcttctcggactgggcatctcgtctttcgtactgatcacgggctgcgccaacatgcttctcatggctgccctgtggggcctctacatgtccctggttaatgtgggccatgtctcccccgcacatcacgttcacatgagctgtctctgctgacggtggcctggtgggggctgtgcttgttgagtgtctggacggtgaagtggctttttctcccttcaccacatgctcttggtgaggacgtcgctctgcagtcttcactggaggtgtgaggttccgccgcctctgggggtctgagcgtggtttgtcgcagcgtggacttgcacgtttttgttttggtactttgggggtctgtcttcttggtgttggctctgaatctgtcgttggctgactctgtcgttgactgactctgtcgttggctctgactctgtccttggctctgactctgtcgttggctgactctgtcgttggctgactctgtcgttggctgactctgtcattggctctgactctgtcgttggctgactctgtcgttggctctgactctgtcgttggctgactctgtcgttggctgactctgtcgttggctctgactctgtcgttggctgactctgtcgttggctctgactctgtcgtctctgactctgtcattggctgactctgtcgttgtctctgattctgtcgttggctgactctgtcattgtctctgattctgtcgttggctgactctgtcgttgtctctgattctgtcgttggctgacttctgtcgttggctctgactctgtcgttggctgactctgtcattggctctgactctgtcattgtctctgactctgtcgttgtctctgactctgtcgttggctgactctgtcgttggctttgactctgtcgttggctgactctgacgttggctctgactctgtcgttggctctgactctgtcattggctctgactctgtcgttgtctctgactctgtcgttggctgactctgtcgttggctctgactctgtcgttggctgactctgtcgttggctgactctgtcattttctgtaactctgtcattgtctctgactctgtcattggctgactctgtcgttgtctctgactctgtcgttggctgactctgtcgttggctctgactctgtcgttggctgactttgtcgttggctgactgtcgttggctgactctgtcgttggctgactctctcgttgtctctaagtctgtcgttggctgactcctgcagtacttccgggtgtttttcctaagaagagtgttcttttcattcctgcagggatcagctgcagtaggtttaacacggttgcggttctgagactgcgtctcccactcattttccagtttgtcatctgacctggtccttatgacaatattggaaataaccaaagtttttttacttcccgtcaaatcacaagtatcttcccatctcgccgacgttgtcttacagcagctttggtcagcatgtactgctcctgtagtgaatggactatgtactctgaggtcggttttcacacagtaatgggagcactgtccatccat

SEQ ID NO: 136930 - DNA, 992 bp, Homo sapiens
cacggcgaaaatcacgtcgctcaattccaccagaatcagtaccagcatcagcggtgtggcgtacagcaatccattcttacgcacaaagaaatgctcgttgtcgatggtgtcggtcatgcgcaaatgaccgcgtagccagcgcaccagcggcttgtcgccaatgcctgattcatcttcatgggcgagcgccatcttcacgccggtaaacagcaggaaggcaccgaagatatacaggatccagtcgaactgcgaaattagccagctgccagtgaagatcatgatggtacgcagaacaatcgcccggagcacgccatacaccagcacggggggttgtaatgccgccggaacagagaaatagctgaacaccgtcagccagacaaagacgttatcgaccgccagcgatttctcaatcagataacctgtgagaaaggccagtgcctgtggatcggcaacggcgcgaccttcggtttgcaccagataccaccagaaagcggcgttaaacagtaacgacagcgtcacccagaccagcgaccaggccgcagcctgtttcatggtcatggcatgtgccccacgacgcccctgcaacaacaggtcgatagccagcataatggcgacaacaacagcgaatccgccccatagcaacggcgtgccgacagtattcatagaagttccttacacataaaaaaacggccaccgtcggaagacgtcagccggtgctttttatgcatagacctcgccttccggcaaggtttcactttcaacaaaaaaggaatacgtgtgcgtattcctttcgggttgcccggtgaccggatgtgttttttcacacatcgtaatgacgatcgaccggcaatgaagttactcccctttgcaggtaacaaagtatgacagaccattcagccagtcaatggtctgttacataccttttacactgttttactttggcaattatagttttacgctatctgacggaaaaatcaccccagtctggcggc

SEQ ID NO: 136931 - DNA, 596 bp, Homo sapiens
gcattctgcaggttttccattttagtgggttctgcttttatttcagagacagacatgtgtcttctctgtccgtttccaataggtaaagccatatcagttagactgcaatactttaaacacgagacaaaacaatccatatgtttagggaaccagaaaagtcccctggtctgtcccttctttggggagcagggcctcgacagctccagctcccttgacctaccttcctccccgaaccccgcccccaccttgtgcccctgtgtccagccccccagggggcctgtgtctgtgtctgtgcctgtgtctgtgatggggagccgcctcgcacccctgttgtctgcttgactctttgtgtctgttatcctgggcaggatggtcattctcaaaaaccctggggtcctgggccaaagacaggcagggcccagtccaggggccccaggcctccccagtcccagtgtgcgagccccacttggacacaagtgttcagagaggtccccctctgccacttgacagggaccttcaaacctcgacagtgatgcaaggacacagagagtaccagataggtagcagagaccaaggcgcagggtgcttcagatgag

SEQ ID NO: 136932 - DNA, 998 bp, Homo sapiens
ggaattcccgggtcgacgatttcgtgtcggccgcggaggagctgcagcctccaacagaagggaaaacggacacctgtggaggggaagaaacgtgtccaagatcattcacacagagcgtcagctctggggtcagaacccagctcccaaggctttccgtgtccagaccacctccctcacctggttggccagcctccacctgatgagccgggcaggctgcaagtggcaagttccctgggaaggtgtggtccctgccatgctatctgctctgctcagcgactgaaggtgcccgcatcccagctctgccaggaagcaaaggttgtcacatcttcccaagccaggccagccaggagcgctgcatgcaaattctgccgtgggctaaggcacgctaaccagagccggcggcatggacttcgtcatgaagcaggcccttggaggggccacaaaggacatggggaagatgctggggggagaggaggagaaggaccccgacgcgcagaaaaaggaggaggagcggcaggaggcgctgcggcagcaggaggaggagcgtaaggccaagcacgcgcgcatggaggcggagcgggagaaggtccggcagcagatccgagataagtatgggctgaagaagaaggaggagaaggaagcagaggagaaagcagccctggagcagccctgcgaggggagcctgacccggcccaagaaggccatccctgcgggctgcggggacgaggaggaggaggaagaggagagcatcctggacacggtgctcaaatacctgcccgggccgctgcaggacatgttcaagaagtaaccaggcctcctgccccagcctactccacctgttactacttctttttggttctttcttttctttttattaggttaagtctcaattctgaaggggaaaacctcagttggcctctgcccctcttccctggccaggggcttctccccctcagctctccctcacacctcccttcatcccagggtatccggaattc

SEQ ID NO: 136933 - DNA, 3539 bp, Homo sapiens
atgccaagctacaagggctgcggtgagactcagagacacgctaccaatggcaccgcggccccacctcgccgaagcagctgccggggagacgcgataaaactgccccacgcggaaaagaaggaagggcggcccccagcctcaacttcatatcctttgagactgggcactcgctctgcccggagctcctcccactgctggtgcaccagctgggaggatcctccagaggccactgctggagaggaaaaacgccaccccaagtctcctgctgtttgctgtggggaggggacggtgctgactgccagcacggtcacctggcgggcggagcctgcacggggagaaatctgggcgaggctgtgtccccgggaccgcccagggagcagggcagctgctgtgatttgggagaggccgtgctgcgataggctcattgctgaccggaccgggccccccaacagctcggagccccactgccgggcagcaacgattcctctgcccacctggcccctcccagaggggcagaccctgaccctgaaagccctggccaagatggcagcccccgccctgctgctcctagcactgctgctgcccgtgggggcctggcccgggctgcccaggaggccctgtgtgcactgctgccgcccggcctggccccctggaccctatgcccgggtgagaagggtgaggccggcgtccgaggtcgggccggcaggagcgggaaagagggtgccgccaggctgcccggggcctgcagggccgcagagtgccagaaggggcagtgtggggccgccgggcgccgcgtgccgacgtgcctacgccgccttctccgtgggccggcgcgagggcctgcacagctccgaccacttccaggcggtgcccttcgacacggagctggtgaacctggacggcgccttcgacctggccgcgggccgcttcctctgcacggtgcccggcgtctacttcctcagcctcaacgtgcacacctggaactacaaggagacctacctgcacatcatgctgaaccggcggccgcggcgtgctctacgcgcagcccagcgagcgcagcgtcatgcaggcccagagcctgatgctgctgctggcggcgggcgacgcctgtctggagtgttcctgaagaacttccagcagtacttccaggacaggacgagctgggaagtcttcagctacatgcccaccatcctctggctgatggactggtcagacatgaactccaacctggacttgctggctcttctcggactgggcatctcgtctttcgtactgatcacgggctgcgccaacatgcttctcatggctgccctgtggggcctctacatgtccctggttaatgtgggccatgtctggacggatggtggctccacttcaaagagtactgagagcagcgccagggctggaggggacgctgggaggccgccagcacccagggacaccgccctcggtgcttcatttctcactgacgatgaacagcatgtttgggctccaggacttcaatgtaactcccctggcagctcaagcaacgcttcctccgggaagcccgggccgccccacacttgttccgtcgaccgctgcccccaacagcctgcagatgttcacaggaggccacggggcctgtgggtctcgacgtcgcccccgggtctgatcacagcaggattccaataaaacgggtccacgtgcacctcccggccctggctggtgcagcacagcccgccgacaggagctatttctctgttcggcggcattacaacgccgcgtgctggtgtatggcgtgctcggggcgattttctgcgtaccatcatgatcttcactggcagctggctaatttcgcagttgactggatcctgtatatcttcggtgccttcctgctgtttaccggcgtgagatggcgctcgcccatgaagatgaatcaggcattggcgacaagccgctgtgcgctggctacgcggtcatttgcgcatgaccgacaccatcgacaacgacatttctttgtgcgtaagaatggattgctgtacgccacaccggtgatgcggaggatttttagtttccagccttcctgttccttttggaatggaaagctttttccttgtcccttgaacgactgcctctatggtgtcgcctacatttgtgaagaagatgttctttccatcttggtgcagaggcagtcggcagaacccctgcattatggagtaagttgtcacatcttcccaagccaggccagccaggacgctgcatgcaattctgacgtggtaagggtccagaccattcatctcaggcaccggggacagaatatgcaaacaccaagaagatgtatagatggggactggggcacttggagcacagaggaccccagggttttgagaatgaccatcctgcccaggataacagacacaaagagacaagcagaaacaggggtgcgaggcggctccccatcacagacacaggcacagacacagcacaggccccctggggggctggacacaggggcacaagagctattcattgctggtgtggggcccaacctttctgccagtgttgctgagctggcaggctgtggcctggagctgttgggggcaatctttaacttcagtagggagattgcctggagtgaggccaatgccgaggaattagagatggagagacaggtgttgatcccaaaattaactctcataaatatcctgcatgctgaacttcatcacagtcttttttccaggaaccaacctgttacagttggtgctgaacatgagtcaggaaagcagacactgggtggagaggttggagctgaaccacctgctgctcagctggcaatgagacgctggcaccgatcgcccctggcccaggccacgtccctgctgccatctctagagcaggtcagccaaggggcaggccaagtgtgcatctgcaggactcacctgctgggaaataaatccattggcgctggcaccgtgtgggcgctgcagtgccttgcgggcagcatcctaatgccgggaggtgcagggggagggagacgacataaggccaccaggactgggaaatcacatttaagtaagaaaagtatggtcattgtactaccaccaaagtacggtcaatggtacagtgctacccgcaccatgaacaagatgagtaactactatcagattgggaaggtgtggtccctgcatgctatctgctctgctcagcgactgaaggtgcccgcatcccagctctccaggaagcaaaggggcgggaaagaattcactgagttcacgttcttgcagcacaagcctgacctgccgctggcagtgctggggagccaggggtccaaaaggaggattgggctatgcgtggggcagaggcagccaggaaccagaggtgctcgagaacagaaacttgccagcatcactgagaaccagaggtgcctcatggctggcacgttgtgggctgagacagtgtatgcacaggccctggcgctgctgggaggcacacgctaccagcagctggaatcaaccatcatgcccatgtctggcagagaccacaccttcgtgctcacttaa

SEQ ID NO: 136934 - DNA, 1106 bp, Homo sapiens
caaataactccaggtaaccggcagcagctggtccacatcatagtctgtgagagattgctcatgtcttgcctgttttcctacctcttcattctaaggaaaaggacccacaatctgagtgccctgctctgggacatagggccccacaaagacagtgtcggggaccaaggagctcaggccgcctgccccacctttgccacctgcaagactgtatactccagccaacagaacactgaagattctgctctcagggtgttgattgacgtctggaaggcagagactcgtggattagcaagcatgtgtaagaaagtgctctggatgccacagggtggtaatttgtgcatggaaaatggctggggtgaagaggagactaggcacatagtcacagttggcagcaacgtctccttttgggtgtggatttatttgttccccaatgcaactgtgagcaccatgagtgcaggaaagtgcctgtttctgatcatgggtatttcctggggtgtgacttcatgtacagtcaagagggagaaactctgagtggggagcactaggggaatagttgaaggcttaatcttcattttgggagaaggaggggagtgttattatccacgttcattattcacagtagcaaatttcacagtaggcaaaagggtgacagacactcaattgtccatcgacagataaatggataaacaaaatgtgccatatccatacagtagaatattactcagacataaaaaggaatgaaattccgatgcgtgctacatgtagacaaaccctgaaggcatgatgctatgtgaaattaaccagttacaaaaggacaaacactggatgattccattcataggatgtgcctagagcagtcaaggtcatagaggtggacagtagaatagtggttgcctggggctgtgaggaggaggaaatggggggttcatgtttactgtgtacagaagttctgtttggcaagatgaaaaaattctggagctggatggtggtgacagttgacaataatgaacttaatgctactgatctgtgtacttaaacatggttaaaacaatacattttatgtttgttatattttaccacaataaacagctacttaaaagtcaaaa

SEQ ID NO: 136935 - DNA, 761 bp, Homo sapiens
aaatacgaactaccatcagagaatactacaagcacctctatgcaaataaactggaaaatctagaagaaatggataaattccttgacacatacaccctcccaagactaaaccaggaagaagttgaatctctgcatagaccaataacaggctctgaaattgaggcaataattaatagcttaccaaccaaaaaaagtccaggaccagatggattcacagccgaattctaccagaggtacaaggaggagctgacaaacagagagccaaacatgagtgaactcccattcacaattgcttcaaagagaataaaatacctaggaatccaacttacaaggaacatgaaggacctcttcaaggagaactacaaaccacttctcaaggaaataaaagaggatacaaacaaatggaagaacattccatgctcatgggtaggaagaatcaatatcatgaaaatggccatactgcccaaggtaatttatagattcaccatccccatcaagttaccaatgactttcttcacagaattggaaaaaactacttcaaagttcatatggaaccaaaaaagagcccgtattgccaagtcaatcctaagccgaaagaacaaagctggaggcatcacgctacctgacttcaaactatactacaaggctacagtaaccaaaacagcatggtactggtaccaaaacagagatatagaccaatggaacagagccctcagaaataatgccacatatctacaactatccgatctttgtcaaatgtga

SEQ ID NO: 136936 - DNA, 609 bp, Homo sapiens
atggggagaaaccagagcagaaaagctgaaaattctaaaaatcagagtgcctcatctacaccaaaggatcacagcgcctcgccagcaacggaacaaagctggatggggaatgactttgatgagttgacagaattaggcttcagaaaatcggtaatgacaaacttctcccagctaaaggaggatgttcgaacccatcacaaagaagctaaaaacctagaaaaaagattagacaaatggctaactagaataaacagcatagaggagaccttaaatgacctgatggagctgaaaaccatggcacgagaactacgtgacacatgcacaagcttcagtagccgattcgatcaagtggaagaaggggaaatacaaactaccatcagagaatattatgaacacctctacgcaaataaactagaaaatctagaagaaatggataaattcctggacacatacactctcccaagactaaaccaggaagaagttgaatccctgaatagaccaataacaggttctgaaattgaggcaataattaatagcctaccaaccaaaaaaattccagggccagacagattcacagccaaattctaccagaggtacaaagaggagctg

SEQ ID NO: 136937 - DNA, 564 bp, Homo sapiens
atggggagaaaccagcacaaaaaggctgaaaattccaaaaggcagaatgcctcttcttttccaaaggattacaactcctcaccagcaagggaacaaaactggatggagaatgagtttgatgaattgacagaaataggcttcagaaggtgggtaacaatgaactcctctgagctaaaggagcctgttctaacccaatgcaaggaagctaagaaccttgaaaaaagaccactcgccagactagtaaagaagaaaactgagaaaaatcaaatagatgcaataaaaaatgataaaggggatatcacaactgatctcacagaaacacaaactaccatcagagaacactataaacacctctacacaaataaactggaaaatctagaagaaatggataaattcctggacacatacaccctcccaagtctaaaccaggaagaagtcaaatccctgaatataccaataacaagatctgaaattgaggcagtaattaatagcctatcaaccaaaaaaagtccaggactggacggattcacagccaaattctaccagaggtacaaagaggagctg

SEQ ID NO: 136938 - DNA, 889 bp, Homo sapiens
gcagataaagaagttcttcgaaaccaatgagaacaaaaagacaatgtaccagaatctctgggacacagctaaagcagtgttaagatggaaatttatagcactgaatgcccatatcagaaagctggaaagatctgaaatcgtcaccctaacatcacaattaaaagaactagagaagcaagagcaaacaaattcaaaagctagcagaagacaagaaataactaagatcaaagcagaactgaaggagatagagacacaaaaaacccttcaaaaaatcaatgaatccagagaaatacaaactaccatcagagaatactataaacacctctatgcaaataaactagaagatctagaagaaatggataaattcctggacacatacaccctcccaagactaaaccaggaagaagtcgaatccctgaatagaccaataacaggctctgaaattgaggcagtagttaatagcctaccaaccaaaaaaagcccaggaccagagagactgacagccgaattctaccagaggtacaaagaggagctggtaccattccttctgaaactattccaaacaacagaaaaagagggactcctccctaactcattttatgaggccagcgtcctcctgataccaaaacctggcaaagacacaacaaaaaaagaaaatttcaggccaatatccctgatgaacatcgatgtgaaaatcctcaataaaatattggcaaaccgaatccagcagcacatcaaaaagcttatccaccacaatcaagttggcttcatcattggggtgcaaggctggttcaacatatgcaaatcaacaaacgtaatctatcacgtaaacagaaccaatgacaaaaaccacgattatctcaatagatacagaaaaggccttcgatga

SEQ ID NO: 136939 - DNA, 849 bp, Homo sapiens
attaaccaaatatatggactgctagccagactaataataaagaagaaaggagagaagaatctaatagacgcagtaaaaaatgatgaaggggatatcaccactgatcccacagaaatacaaactaccatcagagaatactacaaacacctctgtgcaaataaactagaaaatctagaagaaatggataaattcctggacacatacacccttccaagactaaaccaggaagaagttgaatccctgaagagaccaataacaagttttgaaattgaggcagtaattaatagcctaccaaccaaaaaaagcccaggaccagacaggttcacagccgaattctaccagagccgatatcacacggaatgggcaaaagctggaagcagtccctttgaaaaccggcacaagacaaggctgtgccctctctcatcgctcctattcagcatattattggaagttctggccagggcaatcaggcaagagaaagaaataaagggtattcaaataggaaaagaggaagtcaaattgtttctgtttgcagatgaaatgatcgtgtatttagaaaaccccatcgtctcagcccataatatctttaagctgataagcaacttcagcaaagtcttaggatacaaaatcaatgtgcaaaaatcacaaacattcctatatgccaataatagacaaacagagagccaaatcatgagtgaattcccagtcacaattgctacaaagagaataaaatgcctaggaatacaacttacaagggatgtgaaggacctcttcaaggagaactacaaaccactgctcaaggaaataagagaggacataaaccaatggaaaaacattccatgcttatag

SEQ ID NO: 136940 - DNA, 530 bp, Homo sapiens
aaatacaagctaccatcagagaatactataaacacctctatgcaaataaactacaaaatctagaagaaatggataaattcctggacacatacaccctctcaagactaaaccaggaaaaagtcgaatccctgaatagaccaataacaagttctgaaattgaggcagtaattaatagcctaccaaccgaaaaagtccaggaccagacagattcacagccaaattctatcagagtattggaagttctggccagggcaatcaggcaagagaaagaaataacgggtattcaaatagaaaaggaggaagtcaaattgtatctgtttgcagatgaaatgatgatacgtttagaaaaccccatcgactcagcccaaaatctccttaagctgctgataagcaacttcagcaaagtctcaggatacaaaatcaatgtgcaaaactcagaagcattcctatacaccactaacagacaaacagagagccaaatcatgagtaactcccattcacaattgctacgaagagaacaaaatacctag

SEQ ID NO: 136941 - DNA, 757 bp, Homo sapiens
tcaagtcggcctaggacgctccagattggtaggggtaggggcgtccaccattactgaggcttgagtaggcagttttcccctcacagtgtaaacaaagccgcaggggaagttccaactgggcggggccctccacagctcagcaaagccaatgtagccagactgcctctctcgattcctcctctctgggcagggcatctctggaaaaaaggtggcagccccagtcaggggattatagataaaacactcatctccctgggacagagcacctaggggaaggggcagctgtgggtgcagcttcagcggacttaagcattcctgcctgctggctctgaagagagcagcggttctcccagcacagcactcaaactctgctaagggacagactccctcctcaagtgggtcgctgacccgtgcttccagctcctctttgtacctctggtagaatttggctgtgaatccgtccagtcctggactttttttggttgataggctattaattactgcctcaatttcagatcttgttattggtatattcagggatttgacttcttcctggtttagacttgggagggtgtatgtgtccaggaatttatccatttcttctagattttccagtttatttgtgtagaggtgtttatagtgttctctgatggtagtttgtgtttctgtgagatcagttgtgatatcccctttatcattttttattgcatctatttgatttttctcagttttcttctttactagtctggcgagtggt

SEQ ID NO: 136942 - DNA, 669 bp, Homo sapiens
atgaaaataccaaatgtacgtctgactgatgtacctgaaagtgatggggacaatggaaccaagcttgaaaactctctgcaggaagttctccaggagaacttccccaacctagcaaggcaggccaacattcaaattcaggaaatacagagaacaccacaaagatactcctcaagaagagcaactccaagacacataattgtcagattcaccaaagttgaaatgaaggaaaaaatcttaagggtagccagagagaaagaaatacaaactaccatcagagaacacaataaacacctctgcataaataaactagaaaatctagaagaaatggataaattcctcgacacatacaccctcccaagactaaaccaggaagaagttgaatacctgaatagaccaataacaggctctgaaattgaggcaataattaataggttaccaaccaaaaaagtccaggaccagttggattcacagccaaattccaccagagatgcagaaaaggcctttgacaaaattcaacagcccttcatgctaaaaactgtcgataaattaggtattcatgggatgtatctcaaaataataagagctatttatgacaaacccacagccaatatgatactgcatgggcaaacactggaagcattccctttgaaaactggcacaagacagtga

SEQ ID NO: 136943 - DNA, 1436 bp, Homo sapiens
atggggagaaaccagcgcataaaggctgaaaattgcaaaaaccagaactcctcttctcctccaaaggatcacaattcctcgccagcaagggaacaaaagtggacgaagaatgagtttgacaaattgacagaagtaggcttcagaaggtgggtaataacaaactcctccaagctaaaggagcatgttctaacccaatgcaaggaagctaagaaccttgaaaaaaggttagacgacttgctatctggaacaaccagtttaaagaagaacataaatgacctgatggagctgaaaaacacagcacgagaacttcgtgaaccatacacaagtatcaatagccaaatcgatcaagcagaaaaaaggataacagagattgaagatcaacataatgaaataaagggtgaagacaagattagagaaaaaagaatgaaaaggaatgaacaaagccttcaagaaatatgggactatgtggaaagaccaaatctacatttgactagtgtacctgaaagtgatggggagaatggaaccaagtcggaaaacactctgcaggatattatccaggagaactttcacaacctaccaacacagaccaacattcaaattcaggaaatacagagaaaaccacaaagatactccttgagaagagcaaccccaagacacataaacgtcagattcaccaaggttgaaatgaaagaaaaaatgttaagggcagccagagaggaaggtcgggttacccacaaagaaatacaaactaccatcagacaatactataaacacctctatgcaaataaactagaaaatctagaagaaatggataaattcctggacacatacaccctcccaagactaaaccaggaagaagtcgaatccctgaatagaccattaacaagttctgaaattgaggcagcaattaatagactaccaaccaaaaacaaagcccaggaccagacggattcatggattcacagctgaattttaccagaggtacaaagaggatctggtaacattccttctgaaattatgccaaacaattgaaaaggagggagacctccctaactcattttatgaagccagcatcatcctgagaccaaaatcgggaagagacacaacaaaaaaaagagaatttcagacccatatccctgatgaacatcgatgcaaaaatcctcaataaaatactggcaaaccgaatccagcagcacatcaaaaagcttatccaccatgatcaagttggcttcctccctgggatgcaaggctggttcaatatatgcaaatcaataaacataatccatcacattaacagaaccaaagacaaaaaccacatgattatctcaatagatgcagaaaaggcctttgacaaaattcaacagccttccatgctaaaaactctcaataaactaggtaatgatgggacttatctcagaataataagagatatttag

SEQ ID NO: 136944 - DNA, 994 bp, Homo sapiens
gtaccgattttccggtccaacaattcgttcaattcagaaccacaccacacacaaccagggccgaaaatggcacaaaaaagggatcaagaaaccccgagcacaaagatacgaatctcttaaggggcctgaagtgtaaccctctggtcagggtgtaacctgcctcctgagggcagattggctatctcccttgcttggcagcggcacttatggtgggccccaagttcctgaggaacacgcgctttgccaagaagcacaacaaaaagggcctaaagaagatgcaggccaacaattgccaaggccatgagtgcacgtgccgaggctatcaaggccctcgtaaagcccaaggaggttaagcccaagatccccaaagggtgttcagccgcaagcttcgattcgactttgcctacattgcccaccccaagctttggggaaggcgttgcttcgttgcccgtttttgccaaggggcttcaggctgttccgggcccaaaggcaaggccaaagtgcccaaggccaaggtcaaggtttcgccaaggccaaggccaaggccaaggccaaggatcaaaccaaggcccaggctgcagccccagctttagtttccagctcaggctcccaaacgtacccaggcccctacaaaggcttcagagtagatatctctatctgccaacattaggacagaaggactggtgcgaccccccacccccgcccctgggctaccatctgcatggggctggggtcctcctgtgctatttgtacaaagaaacctcaggcagggaaaaaaaaattcatcctaagcttcccttggtaaaatgacaggcattcatgcagcttaaaggttctggaaaactgattttcttccatgatggtactactccacagtctagacaaaatgcagccatcaacatgaaaaactgctgcttgattttttttcctccaacatgttttaaacagagctgcagatgctcaagacgaaatcgtcgaccgggaattcggactg

SEQ ID NO: 136945 - DNA, 702 bp, Homo sapiens
  misc_feature (1)...(702): n = a,t,c or g
agcagatgtactgcgtgttcaaccgcaacgaggatgcctgccgctatggagtgcatcggggtgctggccttcctggcctcggctttcttcttggtggtcgacgcgtatttcccccagatcagcaacgccactgaccgcaagtacctggtcattggtgacctgctcttctcagggtgtgctggcctccctggcctaccagcgctacaaggctggcgtggacgacttcatccagaattacgttgaccccactccggaccccaacactgcctacgcctcctacccaggtgcatctgtggacaactaccaacagccacccttcacccagaacgcggagaccaccgagggctaccagccgccccctgtgtactgagcggcggttangtgggaagggggacagagagggccctcccctctgccctggactttcccatgagcctcctggaactgccagcccctctctttcacctgttccatcctgtgcagctgacacacagctaaggagctcatagcctggnggggtggcagacacaccccaagtgctgtgccagacggtcagtcagcgtnaatctncagggactttaggaagggttttantagtgttttcctggttttaataccttagccgctgaatggtagaacagnagtgccatgtgtatgaaatgctanttccccggcggtaancttggacgtattntggttttg

SEQ ID NO: 136946 - DNA, 300 bp, Homo sapiens
atggagagcggggcctacggcgcggccaaggcgggcggctccttcgacctgcggcgcttcctgacgcagccgcaggtggtggcgcgcgccgtgtgcttggccaagggtgaaagccagcaagagtccggggctggcatctacccagacagcgtctcactctgctgcccagcccactttcaagtcaatgtggagcttcccagctcgccctccccatcctggatttcagatccctcctaccctcaccctactttctctcggagtttgacaggggagcagggaatcatcctgtatgaagagtga

SEQ ID NO: 136947 - DNA, 1592 bp, Homo sapiens
  misc_feature (1)...(1592): n = a,t,c or g
gcggcggcggcagcggcggcgacggcgacatggagagcggggcctacggcgcggccaaggcgggcggctccttcaacctgcggcgctttctgacgcagccgcaggtgggtggcgcgcgccgtggtccttggtcttcgccttgatcgtgttctcctgcatctatggtgagggctacagcaatgcccacgagtctaagcagatgtactgcgtgttcaaccgcaacgaggatgcctgccgctatggcagtgccatgcggggtgctggccttcctggccttcggccttgcttcttggtggtcgacgcgtatttcccccagatcagcaacgccactgaccgcaagtacctgggtcattggtgacctgctcttcttcagctctctggaaccttcctgtggtttngtttggtttctgcttcctcaccaaccagtgggcagtcaccaaactcgaagaccgtgctggtgggggccgactctgtgagggcagccatcaccttcagcttcttttccatcttctcctggggtgtgctggcctccctgggctaaccagcgctacaaggctggcgtggacgacttcatccagaattacgttgaccccactccggaccccaacactgcctacgcctcctacccaggtgcatctgtggacaactaccaacagccaccctttcacccagaacgcggagaccaccgagggctaccagccgccccctgtgtaattgaggcgggcggttaggttggggaagggggacagagagggccctcccctctgccctgggactttcccatgagcctcctgggaacttgccagcccctctctttcacctgttccatcctgtgcagcttgacacacagctaaggagcctcatagccttggcgggggctggcagagccacaccccatagtgccttgtgcccaaagggcttcagtcagctgctcactcctccagggcacttttaggaaagggtttttagctagtgtttttcctcgcttttaatgacctcagccccgcctgcagtggctagaagccagcaggtgcccatgtgctactgacaagtgccttaagcttccccccggccccgggtcaaggcccgtgggaacccgctattattctgcgttctctgcccaaaaaaaatccgtgggggccccaatcaaaacctgcccctgtggcaagcgggagccagaccccaggctctttgtgtccctcacctaaaggtttgccttcccctggtgccccactggctgtatgattctggggggccacccaccctagtgccgggtggccttctgggctggccttcccgttggtgttgatgtgcgggtgcttggtgctcattggcactttccctcctgctcccacccctggcagcagggaaggggctttgccctgacaaccaccccgcgcttatgtaaatattctgcatgttgttacttaggaaagcctgggagagggcaggggtggccccactggcctcccaagactctgtctgtgcccgagtgtattataaaaatcgtgggggagatgcccggccctgggatgctgtttggagacgggaataaatgttttctcattcaaaaataaacataaaaaaaaaaa

SEQ ID NO: 136948 - DNA, 337 bp, Homo sapiens
cccgcagccagtgcaggcactctggacctctcagggtggcgatgaagtttccagcgcggagtaccaggggagcaaccaacaaaaaagcagagtcccgccagccctcagagaattctgtgactgattccaactccgattcagaagatgaaagtggaatgaattttttggagaaaagggctttaaatataaagcaaaacaaagcaatggtaggtatctgactttgtgttagaattaatttttcctctctaagcgactcattacttaaatctgttccatcacgcaaaagttatttttttctgttacatgaataaaaagttatttttgtttacctgtgaaa

SEQ ID NO: 136949 - DNA, 3030 bp, Homo sapiens
attcatgtagccatccacggtcttcctctttctcaccaacatgtacttatcctcttcctcctcctcctccatgggtagagcgtcaagggacccgaggatccgggaccttgacctggtaagaggacgagctctccgttcagggtttctcctggaagcaacacccgggaatgtacgccttcgcggtctccttgattgcattccatcttgtatctcactctctgagaaaccgcaaaatgattcatcgtcagagtcggcatgaaaaataccggccagttcgttagtgacatctggccttggtttctgtaaaaatccacaatggtctaatacatcttgcacctcactttcatgtgatgccttccaccttggaatgactttgtcagatgccagtgccatgctcttggactttccagcctccagaaccatgagccaaataaacttctgttccttataaattacccagtctgtggtattctgtgtcccaacgcgggaaagacagcccgagccccgcccctccgggcccgggtcggcgcgcccagcctgccagccgcgctgctgctgctcctcctgctgtgggaccgctgaccgcgcggctgctccgctgctccccgctccaagcgccgatctgggcaccccgccaccagcatggacggttcgccgcgtgccgcagaaagatctcagagtaaagaagaacttaaagaaattcagatatgtgaagttgatttccatggaaacctcgtcatcctctgatgacagttgtgacagctttgcttctgataattttgcaaacacgaggctgcagtcagttcggggaaggctgtagggacccgcagccagtgcaggcactctggacctcttcagggtggcgatgaagtttccagcgcggagtaccaggggagcaaccaacaaaaaagcagagtccccccagccccccagagaattctgtgactgattccaactccgattcagaagatgaaagtggaatgaattttttggagaaaagggctttaaatataaagcaaaacaaagcaatgcttgcaaaactcatgtctgaattagaaagcttccctggctcgttccgtggaagacatcccctcccaggctccgactcacaatcaaggagaccgcgaaggcgtaccatttcccgggtgttgcttccaggagaaaccctgaacggagagctcgtcctcttaccaggtcaaggtcccggatcctcgggtcccttgacgctctacccatggaggaggaggaggaagaggataagtacatgttggtgagaaagaggaagaccgtgggatggctacatggaatgaagatgacctggcccagaagcccgtcgctcccagatccatccgtgacccttccgcatataattcgcccagtggaagaaattacagaggaggagttggagaacgtctgcagcaattctccgagagaagatatataacccgttcacttgggctctacttgtcatcaatgccgtcagaagactattgataccaaaacaaactgcagaaaccccagactgcttggggcgttcgaggccagttctgtggcccctgccttcaaaaccgttatggtgaagaagtcagggatgctctgctggatccgaactggcattgcccgccattgtcgaggaatctgcaactgcagtttctgccggcagcgagatggacggtgtgcgactggggtccttgtgtatttagccaaatatcatggctttgggaatgtgcatgcctacttgaaaagcctgaaacaggaatttgaaatgcaagcataatatctggaaaatttgctgcctgccttctacttctcaaatctttcttgtaaaagtttccaattttttcactgaaaccctgagttaaaaatcttgatgatcagcctgtttcataaagaaactcccaatcaagttaatcttaggcagacatgtgtttctggagcatcacaggaggtatattgctagttacactttgccctcctgcagtttcttctctgctcccaacccccatctcacagcatccccctctatttccaatgctcctctccaaccgcttagtttctgaatttcttttaaattacagttttatgaaagcatattttatttacttggtgttgaaatagcccctccataaaaccctaagcacttggaaacacaataatagtattaacctaactagatcctattgaatttcagagaagagccttctaacttgtttacacaaaaacgagtatgatttagcattcatactagttgaaatttttaatagaatcaaggcacaaaagtcttaaaaccatgtggaaaaattaggtaattattgcagattgatgtctctcaatcccatgtattgcgcttatgttacaagttgttgtcacagttgagacttaatttctcctaatttccttctgcccgaagggtaagtggtgcgtccagcttacacaatcataattcaaaggttggtgggcaatgtaatacttaattaacataatgatggaagagctatctggagattatgagtaagctgatttgaattttcagtataaaactttagtataattgtaggtttgcaaagtttatttcagttcacatgtaaggtattgcaaataaattcttggacaattttgtatggaaacttgatattaaaaactagtctgtggttctttgcagtttcttgtaaatttataaaccaggcacaaggttcaagtttagattttaagcacttttataacaatgataagtgcctttttggagatgtaacttttagcagtttgttaacctgacatctctgccagtctagtttttgggccaggtttcatgtgtcagtattccccctcctctttgcattaatcaaggtatttggtagaggtggaatctaagtgtttgtatgtccaatttacttgcatatgtaaaccattgctgtgccattcaatgtttgatgcataattggaccttgaatcgataagtgtaaatacagcttttgatctgtaatgcttttatacaaaagtttattttaataataaaatgtttgttctaaa

SEQ ID NO: 136950 - DNA, 337 bp, Homo sapiens
ggcacgagggctccgtccccaagatcaaccgctccatgcagaactggcaccagctagaaaacctgtccaacttcatcaaggccatggtcagctacggcatgaaccctgtggacctgttcgaggccaacgacctgtttgagagtgggaacatgacgcaggtgcaggtgtctcttctcgccctggcggggaaggccaagactaaggggctgcacagcggcgtggacattggcgtcaagtactcggagaagcaggagcggaatttcgacgatgccaccatgaaggctggccagtgcgtcatcgggctgcagatgggcaccaacaaatgcgccagccagtc

SEQ ID NO: 136951 - DNA, 1209 bp, Homo sapiens
atgactgtcaaaggagtcttcaagcatggaaggtgtccagggaaggacgtagtgggaggcgattggatcatgtgggcagtttctgccatgctattctcacgacagtggaaccgcctactcaagcctcagcaacggcagatgccccttcccccaccaagctcccgcatcctaagtcgatctcagactgctgcattagcagtgagcaaggctctgtgggtgtgggacccaccaagccaggcacaggaggatatctcctggtctaccagttgtgaagacagtgggaaaagtgcagtatttgggcaagagtgtactgcttctccagatcccaagctggacaaagaggttgtctttggttcatgctccccatatcagtactgtttgcagggaccaggaaaatgggatggagccaggaaagccatcctgaaccatgagttccacgcagttcaacaaggggccttcttaccagctttttgccgagatcaagaaccagctcctgttcaaatgcgaccctcagaagcaggcggcgctctgcagctggatcgagggactcacccgcctctctttcagccccgacttccagaagagtctgaaggaagggattgtcttatgcacactcatgaacaagctgggctcagtccccaagatcaacggctcatgcagaactggcaccagctagaaaatctctccaacttcatcaaggccatggttggatacgacatgaaccccatggacctgttcgaggccaacgacctgtttgagagtaggaacatgacgcagaaccgtatcctgccctctggaccactcgaccatcagcctccagatgggtgcaaacaaacgctccagccagggggcatgacggctcccgggaccccgcagcacatctacaacaccaaactgggagcccacaagtgtgacaactcctccatgtccctgcatatgggtgacacgcagagtgccaaccacagcgtccagggctttggcctgggccagcagatatactatcccaagtactgccctcaaggcctgcagccagtggggctcccttggatgccggcaactgcccaggaccaggggaggcccccgaggatcccccctgctcccaggaggaggccactactgaggcccccgaacatgctggctccctacatcatcgccctgtctgggtttgggggattttcctgtattttcgtctttcttttttttttttaa

SEQ ID NO: 136952 - DNA, 1053 bp, Homo sapiens
tcacgctgctttcatgcctgctaacacaacatcggggggcaatgccaagcctggagtgtcccacaggttggccggggatacggacagcacaccggggtggggagactcactgagcacgggctgccccatagaagggccagaatcccaagcactgacaacacattcgggaaacgccgggagcgcaggttcattcctgtgggaagtggaacccgcaggccctgtggagaacagcttggcagctgctgacaacacgaaacacactctcggcaaaccacccagcagccacacctcgtcatttacccactggaaatctcctgcccacacaaaaacctgcacccggatgttgatagcatctttcttcataattaccaaaacctggaagcgaccaagatgcccttcagtagataagtggaaaaataaaccgtggtgcatccatactggactattatccagtactgtgccacctggggaaccagggtgcccgattccggagctgtcagggctgctcatggggctgcaaaccacctcttcccgttgctcagtacggcaggtgtggtagacagggtgtgatggggcgggacgtgattcctcagcacccttcccgatgaagtaggtccttctcgcctccacccctgctaagcaggcactgtgcgttcttgtgtcttccagaaggcgccgctcctgctgcactgcagctggtgccacaactgtgaatgttggagttgtccagtcccacagcttcctctgccccacagcacagggcagattggcctgcagggcctcatcacccccattctcctcttttagcatcttcctcaggcggtccttacacacttctcttccagcttttgtgattctttcatatggaggtggagggttgtggctcatgctccgatgggttattgtggagtagagaaacccactggatgtggcacggactgaactcctcggctggtcctcagggttcctcaggggattttcttggatttacatgcagacgatcgtatcatcaacaaactactaaaccctgtctccaatattcatcctcgtgcc

SEQ ID NO: 136953 - DNA, 367 bp, Homo sapiens
agatcttccacctgtgatacaatgatgaaaaaagaatacctgacttataggtggcaataaggaataagaatcatccttgaagaatgtcaaggagccatagaaacaggaagaaggaaaggaggactgagcatgcccttgccgctggctcagctgcagatgatggggaggccactggaccacagcccgggctgaatacgtactcttggtcgtgcactgtgttcttatccaggcccatgctgccgggttgggagaagctggctgcaggctcctcagccctggcgcctggggcacaaaaggcccagagcaggccacacaggaagggggttctgagcagggatctcatggtcatcaatatctgtgagatggg

SEQ ID NO: 136954 - DNA, 383 bp, Homo sapiens
ggccttgtctatctctgtgtaatccttgagtgtggtctgccactgctggtgtttgtttttctgagctggaggaagtttaagatcttgaacttttcagagtccttaagatttcagcatgatcccagtatctgtcaattggcctgaacctgactgttgatttttaggcatatcatggagcatctagaaggtgtcatcaacaaaccagaggcggagatgtcgccacaagaattgcagctccattacttcaaaatgcatgattatgatggcaataatttgcttgatggcttagaactctccacagccatcactcatgtccataaggaggtaggtctggcagtggcttgggggactgtatcacagaaaggcttccctttgttaatttg

SEQ ID NO: 136955 - DNA, 4350 bp, Homo sapiens
  misc_feature (1)...(4350): n = a,t,c or g
gggcgaagccgaggaagagcgttttggggacgggggctggtgaggctcacgttggagggcttcgcgtctgcttcggagaccgtaaggatattgatgaccatgagatcccttgctcagaacccccttcctgtgtggcctgctctgggccttttgtgccccaggcgccagggctgaggagcctgcagccagcttctcccaacccggccagcatgggcctggataagaacacagtgcncgccccaagagcatatcatggagcatctagaaggtgtcatcaacaaacccagagggcggagatgtcgcccacaagaattgcagctccattaccttcaaaaatgcatggattatgatggcaataatttgcttgatggctttagaactctcccacagccatccactcatgtcccataaggaggaagggagtgaacaggcaccactaatgagtgaagatgaacttgattaacataatagatggtgttttgagagatgatgacaagaacaatgatggataccattgactatgctgaatttgcaaaatcactgcagtagatgttatttggccatctcctggttatatacaaatgtgacccgtgataatgtgattgaacactttagtaatgcaaaataactcatttccaactactgctgcagcattttggtaaaaacctgtagcgattcgttacactggggtgagaagaggataaggagaaatgaaagagaagagaaatgggacatctaatagtccctaagtgaatattaaataccttattggacaagggcttgcttcaagcatctgtattagtctgtattaatgctgctgataaagacgtacccgagactgggaagaaaaagaggtttacttggacttacagttccacatggctgggaggcctcaaatcatgccggaagttgaaaggcacttcttacatggcagcaagagaaaatgaggaagaagcaaaagtggaaacccctgataagccatcagatcttgtgaaacttattcactatcacaagaatagcatgggaaagactggcccatgattcaattacctccccttggtctctcccacaacacgtggaattctgtagatacaatttcaagttgagatttggtggacataccaacatatcatctacctggccccttccaaatttaatttcccaatttttaaaaccaattattccttcctaaaattccccaaagtcttaactcttttcagcattaacgaaaaatccacagtccaaagtctcatctgagacaaggcaagtcccttccacctatgagcctgtaaaatcaaaagcaagctagttacttcctagataccaacagggtacaggtattgattaaagacggctgttccaaatgggagaaattggccaaaataaaggggttacagggcccatgcaagtccgaaatccagcagggctgtcaaatttaaagttccagaataatctcctttgactccaggtctcacatccaggtcatactgatgcaagaagtgggttcccatcctcttgggcagctctgccctggctttgtagggtacagcctccctcctggctgctttcacggctgttgttcagtgcctgcgttttccaggtgcacggtgcaagctgtggatctaccattctggggtctggaggacgctggccctccttctcacagctccactaggcagtgcccagtagggactctgtgtgggggctcccacaccacatttcccttctgcactgccctagcagaggttctctcccctgccgctgagagggcctctcccctgcagcaaacttttgcctgggcattgaggcatttccatacatcttctgaaaactaggcggaggtttccaaatctcaattcttgacttctgtgcacctgcaggcttaacagcacatagaagctgccaaggcttgggggcttccactctgaagccacagcccgagctgtatgttggcccctttcagccatggctggagtggctggggacacaagacaccaagtccctaggctgcacacacatgtcaggggctgccctgacatggcctggagacattttccccatggtgttggggattaacattaggctccttgctacttatgcaaatttctgcagctggcttgaatttctccccagaaaatgggtttttcttttctattgcatagtcaggctgcaaatttccaaacttttatgctttgcttcccttatttataagggaatgcctttaaaagcacccaagtcacctgttgaacactttgctgcttagaaatttcttccgctagttaacctaaatcatctctctcaagttcaaagttccacaaatccctatggaaggggcaaaatgctgccagtctctttgctaaacactaacaacaggtcacctttactccagttcccaacaagttcctcatcttcatctgaggccacctcagcctggactttgttgtccatattgctatcaggcttttggtcaaagccattcaacaagtctctaggaagttccaaactttcccacatcttcctgtcttcttctgagtcctacaaactgttccaacctctgcctgttacccagttccaaagtcgcttccacattttcgggtatccttataagcagcaccccactctctgcagcaccaatttactatattagtctgttcttacactgctaaataagacatacctgagactgggaagaaaaagtcggtttaattggacttaaagttccacatggctggggaggcctcagaatcatggtgggaggcaaaagacacttcttacattgtggcaagaaaaaatgaggaagaagcaaaagcaagaaacccctgatacaactgatcagatcttctgataaaatctcagatctcatgagacttattcactgtcacgagaatagcacgggaaagactggcccccatgattcaattacctcccccgtgggtcgtgtcccacaacacgtgggaattctgggagatacaattcaagttgagatttgtggggggacacaaccaaaccatatcagcatcctttcaagaatattagataattggagctgagtactcaggaacttgactgtagtagaatactgctagtttcttaattttaattcacatcaccttgaaaagtaaaacaaccaggctttgccaagtgggatgcttttccagtaacagtgaagtggagtgaatacccaaatgtttgccctggtgggttcctatctccttcaggcaaacatggttcagtattcttgtaaagttcccctgggcctaaaatggattactttgctctggggcaagtgggatatttattagggctatttcaaaagccacagcattaaggaatgtcagcctaggccacagagtctggagattctgagtttcagcctaggccacagggtctaaggttctgttatcctctggacattttggggaaatggatacactactgggctttaagtggatggactctttcagattttcagtattttatacaactactgccacatccttatactttattgcttttctgtcttcttcaacctgggagagaccctgaatttgagtgtgttctctaatcaatagtggtttagctttcttttctaattcactccgtttccaggggttttttattttgcaggttaggaactattaggaatgtcaggactttatcagcaggggtaaaactaccacctggcctagcctaagtaggaagtgaaaagataattcaccaaacaatgattaatcagatagaagttctagtcaagagggatatttgttgaaagttaccctctttttagccctagataccatggattccttttccaaatccagggaaagattagaaaagggaacccccaaaaaacccccttaaccagtgtgaaccctttatagtattttgaaaatgaggaaggaaggcagccagattgtaatttgggtttatttgggatgttgatgggacgttctgtaatagaaaaccctgaaacgatgattgaatgggaaaaagagacctacaaaatttgtcgtaggatgtatacagaccttattttctttattacgagtattataagaaaacatatgtatttgtaaaaatggtttcctgtgtccaagtatttgtgcagtcagagctgactttgtaaacttattcttgtaatagcttcattattttgaaagatttatatatgatgaattctggatatacgaccattattgactgacgaagcaaacacggtaattgagttaggggggggcccttctaaggaatccaagctccggaacgaggtattggaagttttacgttctttattagggcaccttatatacatttcattggcccggggtttaacaacggtgggccggggag

SEQ ID NO: 136956 - DNA, 822 bp, Homo sapiens
atggctgctgaagacaaattactgctgccacagctccccgagctgtttgaaaccagcaaacagcttctggatgatgtagaagtagtgactgaacctgccggttcccggatagtccagaagaaggtgttcaagggcctggacctccttgagaaggctgccgaaatgttatcgcagcttgacttgtggcagagcttgagctgccgaaaaccaagaactcagctgaaaaatcacactgctaatttctccatggcttatcctagcctcattgctatggcatctcaaagacaggctaaaagagagagacacaagcagaaggagttggagcacaggttgtctgcaatcaaatctgctgtggaaactggtcaagcagatgatgagcgtgttcgtgaatattatcttcttcaccttcagagcttagaagagattgagagcattgaccaggaaataaagatcctgagagaaagagactcttcaagagaggcatcaacttctaattcatctcgccaggagaggcctccagtgaaacccttcattctcactcggaacatggcccaagtcaaagtatttggagctggttatccaagtctggcaactatgacggtgagtgactggtataagcaacattggaaatatggagcattaccagatcagggaatagccaaggcaacaccagaggaattcagaaaagcagctcagcaacaggaaggtcaagaagaaaaggaggaagaggatgatgaacaaacactctacagagttcgggagtgggatgactggaagggcatccatcctagggactatggcagccaacagagcatgggctga

SEQ ID NO: 136957 - DNA, 536 bp, Homo sapiens
  misc_feature (1)...(536): n = a,t,c or g
aggggttccgngncgaatttaaaacttgaaagcctgncgganccggcnccggaannnnccgggnncgacccacgcggtccgctnnccagtgaaaccctttcattctcacttcggaacatggcttcatagccaaagtanctttggagctggttattccaagggctggccaacttatngtacggtgagtgagctggtatgaagcaacatcnggaaatatggagcacttatccggatcagnggaatatgccaaggcagcaccagaggaattcagaaaagcagctcagcaacaggaagaacaagaagaaaaggaggaagaggatgatgaacaaacactccacagagcccgggagtgggatgactggaaggacacccatcctaggggctatgggaaccgacagaacatgggctgatcttcccacaacaccacaggactgcagggtgcacaactcccctgccaaggaaaaccatgcangcctcccctccctggtctcctgcttcagctctgtacaacgagggcaaagatgctaaatcttgct

SEQ ID NO: 136958 - DNA, 640 bp, Homo sapiens
gtggcagagcttgagctgccgaaaaccaagaactcagctgaaaaatcacactgctaatttctccatggcttatcctagcctcattgctatggcatctcaaagacaggctaaaagagagagacacaagcagaaggagttggagcacaggttgtctgcaatcaaatctgctgtggaaactggtcaagcagatgatgagcgtgttcgtgaatattatcttcttcaccttcagagcttagaagagattgagagcattgaccaggaaataaagatcctgagagaaagagactcttcaagagaggcatcaacttctaattcatctcgccaggagaggcctccagtgaaacccttcattctcactcggaacatggcccaagtcaaagtatttggagctggttatccaagtctggcaactatgacggtgagtgactggtataagcaacattggaaatatggagcattaccagatcagggaatagccaaggcaacaccagaggaattcagaaaagcagctcagcaacaggaaggtcaagaagaaaaggaggaagaggatgatgaacaaacactctacagagttcgggagtgggatgactggaagggcatccatcctagggactatggcagccaacagagcatgggctga

SEQ ID NO: 136959 - DNA, 1451 bp, Homo sapiens
ggagggggaattcccggctgcggtattcgcacgaggacgagttacagctgccgcggctccccgagctgttcggaaactggtagacagttactggacgaagtagaagtggcgacttgaccccgccggtttccgggatagtccaggagaagggtgttcaagggctttggacctccttgaggagggctgccgaaatgttattcccagtccaccttgttcggccgcgaatgtagattttggaaagatttgtcccccacgcacttgattaccttttggggtccaggcttttcaaggagcccctcccattgaaacaagtcaaccccagcaagcgtcttaggatcattttgcagcggggctcgagaacactttataaaactacttaacttcagtgccattggttatcatgtggggcagagttttgagcttgcccaaaaccattgaacaactctgctgaaaatcacactgccaattcctccatggcttatcctatgctcggtgctatgggcatctcaaagacaggctaaaatacagagatacaagcagaagaaggagttggagcataggttgtctgcaatgaaatctgctgtggaaagtggtcaagcagatgatgagcgtgttcgtgaatattatcttcttcaccttcagaggtggggttgatatcagcttagaagagattgagagcattgaccaggaaataaagatcctgagagaaagagactcttcaagagaggcatcaacttctaactcatctcgccaggagaggcctccagcgaaacccttcattctcactcggaacatggctcaagccaaagtatttggagctggttatccaagtctgcccaactatggacggtgagtgactggtatgagcaacatcggaaatatgggagcattaccggtttcaggggaatagccaagtcagcaccagagggaatttcaggaaaagcagctcagcaacaggaagaacaagaagaaaaggaggaagaggatgatgaaccaaacaacttccacagagcccgggagtggggatgactggaaggacaccccatccttaggggcttatgggaaccgacagaacatgggctgatcttcccacaacaccacaggactgcaggggtgcaccaacgtcccctgcccaaggaaaaccatgcagtcctcccctccctggtcttcctggcttcagctctgtacaaccgagggcaaagatgctaaatcttgctttgcattcagtaaagtgtcaagtgatttaagtgtgtaattgtacccctagatgatatgaaccagcagtcttgttttggcatcatccctcatcatgttgtattccagcttcttcgagtggaaggaaaagagtgttgagaaatggctttgtataatttatggctatccgaattttttgaaaaaataataaaagtcccctttattatatgggcctgtccagaaaaaaaaaaaaaaaa

SEQ ID NO: 136960 - DNA, 457 bp, Homo sapiens; identical to SEQ ID NO: 68090
  misc_feature (1)...(457): n = a,t,c or g

SEQ ID NO: 136961 - DNA, 1512 bp, Homo sapiens
atgcccacccattcccggcagcgtcctgccgcccccgccgcgccaccctgcctggccctgacggagcggacaccttggggtccttccgccgccgctgtgccggaccaatgctggacgtgggaagggcgcgctgccttgtgtttgtgtttttctcattgtggcagaagtttcaataaagcttactcctttgatgggcaagaaggatgccgccgtcccagcttaacgaccaaatcttgccttggctttaggttccgagtcttgtcacgtttaaggatttttaccaccagtactcaagagagggtggtcgaggacagatcagggtcaggccgccgggattgtgcgaaaggtccctatgctgaaaaaggggacctttaccaagagcaaactgttcgtcagctaaatgtggaaaatgaattgttccttgctccagagcaagcagatgtgcaaccagttgcctccgggatccacaagagatggctcatggaaattcagacaggatcccagattgggcaagaatgcatggactgcgacagttgcattgcttcagagtttggagttcgaggttatccaacaattaagctattaaaaggggacttggcatataattatagaggaccacgaacaaaagatgatattattgagtttgctcacagagtatctggggctctaattcggccacttccaagtcaacaaatgtttgaacatatgcagaagagacaccgtgtatttttcgtttatgtaggtggagaatcacctttgaaatatgtgacactaaaagagatgccagctgtgcttgttttcaaagatgaaacttactttgtttatgatgagtatgaagatggtgatctgtcatcatggatcaacagggaaaggtttcagaattaccttgctatggatggcttcctcttgtatgaacttggagacacagatctgaatgccagttctttacgagaacgtaaactgatattaccagaagatatacctttgtatgtgggaaagcttgtggctcttgcagttattgatgagaaaaatacatcagttgaacataccagtgaattgacagtcccaactgtagttgtactgaatacttcaaaccagcaatatttcttgctagatagacagattaagaatgttgaagacatggtccagtttattaataacattttggatggcacagtagaagcccaaggaggtgatagcattttgcagagattgaaaagaatagtatttgatgccaaatctactattgtgtctatattcaagagctcaccactgatgggctgctttctctttggcctgccactgggtgtcatcagtatcatgtgctatggaatctacacagccgacacagatggaggttatatagaagaacgatatgaagtgtctaaaagtgaaaatgaaaaccaagaacagatagaagagagcaaagaacagcaggagcccagcagtggaggatctgtagtgcctacagtgcaggagcccaaggatgtattagaaaagaagaaagattga

SEQ ID NO: 136962 - DNA, 546 bp, Homo sapiens
atgagtaaagctgtaagaaaaacagtggagccgaaacgactccccaacttaactccccataagctcattgaggacacagactttgttctcttcaccactgtttccccagcacttcgaacactacctggcacttgtatcagttctccctttccaacttggacgcggcagaacggctcctgcaaagaagggtggcgagaagcaaagggtcattctgccatcaatgaggtggtgatccaagaatacaccatcaacattcacaagcgcatccatggagtgcgcttcaagaagcgtgcccctcgggcactcagagagattccgaaatttgccatcaaagaggtggaaactctaagtgtgcgcattgatagcaggttcaacaaagctctctgcgccaaaggaataaggaatgtcccgtaccgaatccgtgtgcagttgtccagaaaacgtaatgaggatgaagattcaccaaataagcgctatactttggttacctatgtacctgttagcactttcaaaaatgtgcagacagtccatgtgcatgagaactaa

SEQ ID NO: 136963 - DNA, 546 bp, Homo sapiens
tgggattttttccaaataaatcaaaagaatacctaggatccaatgccaggcttacacttcgaacactacctggcacttggtaggagctcaacaaatatttactgaattggtaaaggaacaaatgaattaatgtatggcgagaagcaaagggtcattctgccatcaatgaggtggtgatccaagaatacaccatcaacattcacaagcgcatccatggagtgcgcttcaagaagcgtgcccctcgggcactcagagagattccgaaatttgccatcaaagaggtggaaactctaagtgtgcgcattgatagcaggttcaacaaagctctctgcgccaaaggaataaggaatgtcccgtaccgaatccgtgtgcagttgtccagaaaacgtaatgaggatgaagattcaccaaataagcgctatactttggttacctatgtacctgttagcactttcaaaaatgtgcagacagtccatgtgcatgagaactaattgctgatcctcaaatacatcaaataaaggtataaaactgcaaaaaaaaaagtct

SEQ ID NO: 136964 - DNA, 324 bp, Homo sapiens
atggagctctgcctagacgcgtttgcccaaaagggtggagtcccctacccctcgctatggatcggcctcccgtccatgttaatgtccctccctgggttcctcgacgactacaccagtctctacgcttgtgtgcagggcacggtgatttcagtatttggatgcgccttcggcccctccgggaatgtgccataccgaatccgtgtgcggctgtccagaaaacgtaatgaggatgaagattcaccaaataagctatatactttggttacctatgtacctgttaccactttcaaaaatctacagacagtcaatgtggatgagaactaa

SEQ ID NO: 136965 - DNA, 402 bp, Homo sapiens
cccacgcgtccgggacgctgcagaatggctcccgcaaagatagggtggcgagaagaaaaagggccgttctgccatcaacgaagtggtaacccgagaatacaccatcaacattcacaagcgcatccatggagtgggcttcaagaagcgtgcacctcgggcactcaaagagattcggaaatttgccatgaaggagatgggaactccagatgtgcgcattgacaccaggctcaacaaagctgtctgggccaaaggaataaggaatgtgccataccgaatccgtgtgcggctgtccagaaaacgtaatgaggatgaagattcaccaaataagctatatactttggttacctatgtacctgttaccactttcaaaaatctacagacagtcaatgtggatgagaacta

SEQ ID NO: 136966 - DNA, 3804 bp, Homo sapiens
atggaggcagctgggcccgcaggctgcaagaagccttcctcggacacgctctccaggctgggagacccgctccagggctggagccaagcagagaattcgcatccccattcggatggctgcgctgatggtgcagccctggagggaggaggcggtagctgccattcccaagggaagggacagaagatgagcctgtcggtcctggagggtatggggttccgtgtgggccaggctctaggcgagaggctgccccgggagacgctggccttcagggaggagctggatgtcctcaagttcttgtgcaaagacctgtgggtggcggtgttccagaagcagatggacagcctgcgcaccaatcaccaggggacctacgtcctgcaagacaacagcttccccctcctcctcccgatggcctctggcctgcagtatctggaggaagcacccaagttcctggccttcacctgcggcctcctgcgcggcgccctctataccctgggcattgagagcgtggtcaccgcctccgtggcagccctgcccgtctgtgagtcatggggggaccgagcaatgcataccacagaagcccgtgccgggcgcttccctggggccacatccgtggccctcatgctcctggttactcacacagctcagggatgcggccccgtgggcgggaggaaacagcccaacctagccactggggtgtcagtgcaggacgggggtgagcgcctaagagccgtccagagggatgctggcctccggcatgggcggccttactggcacctctgccaagtcaacaagtctggggctgccctctgcccggcgatgtgcacagaacggagcgtcttcctggggagcagggctgggagtgcccggagtgtaggccagagtggcccttatgctgccccctcccaccccgctcgcatctgtagcatctggggactcctgggcttcgccgcccgctgcctgacatggtgctgcccgcctggcccactccccaaacgcctgctccccctagtgtccagcagcctcctggccactgtgctcccagcccggggcaatctcgtcctgcggagacggctcatttacattgggccacgcttcatgatcgggccggggtccgggctggtgtggcagctgctcgtggggcaggcagctggggccgtgaggccaccgtcagaggctacgccaagcctgtgtgctccctcctgcctcaggagcaggcccccagcacccagctgcccggctgccatgcacaaacattacaaagtccacttcgccaaggatgcccagagccccaacgggcactacttctgggacccagagttggggcaccgaaaaggatgctgtcatcagtggcgccaggactcagcggccctccgagcccatgggccctgtcggccttccccccaatcacactggcagctggcctaccacagccaccaagtgggtggcagtggctggcgccggggcctcctgccctccgtcctgcagcagcagcggcagccccagtcccagccctcacctcccagccccctgcggcagcggctctgccccattcacgaagcccagaaggggctgcctgcaacctccactgtccccaaggaacctgccagcgcccctcaggcgcccaccttacccaccacggcaccagccatggccaggagtggcccagctctaccctccgcggctggcgtcctcctgaagcccagcgagcccactgatgcccggcccctgcccgccccagcggcctgtggctccttcactgcctacagctccgacatcctgacagaggatgacgtctactgcagctgcctggccaagacactctgccacgtgccggtccctgtgaccgtgggtttctatgcccctttcggctgccgcctgcacatgatgctggacaagatcacggcgctgatgcagcaggaggccgcgcagcgcgagagcgaggagctgcagcacgtgcagtggcggccgcgtgccgtgagcggctggggcgtcccgcagctactgtggtacctggtgttcctgcagcccatcatcaccgaggtgcacctgcggcgcaggaacgtgcagttccttttcatccgctttagcgcctggcagtacgcgggcaccgacaagctgtgggccggcctggtgaccacgttgtgcgagggcatccgccgccactatggcgcactgcccttcagcgtgtactcggtgctgggcaacaagccggccaccaggcaggactgctgccagagcgagtggcattgtcggcgccgcgtgtgcctggggctgctggcgctgctggcggcgctgggcctgggtgtggggctgctctacttgtcactgggcggccacgcgctgggccacggcagcccgagcggcagcctgctcaaggtgtttggcggcgcggccaccacactgtcgggctcggggctgctcatggccgtgtactcggtgggcaagcacctgttcgtaagccagcgcaagaagatcgagcggctggtgtcgcgtgaaaagttcggcagccagctgggtttcatgtgcgaggtgaagaaggaggtggagctgctcaccgacttcctgtgcttcctggagatctaccagcggcgcaggctgcgcgtggtgctggaggtcaccgggctggacacgtgctacccggagcgcgtggtgggcgtgctcaacgccatcaacacgctgctgtccgacagccacgcgcccttcatcttcatcctggtcgtggaccccagcatcctggccgcgtgcctagagagcgcgggcaacatgaagggcacggccgataacggctacctcttcctcaaccgcactgtcacgctgcccttctctgtgcccattatgggccgccgcaccaagctgcagttcctgcacgatgcggtgcagagccgcgacgacctgttgtaccgcgagatgacgcgcaagccgtggctgccgggggacgccgggggcgagagcgcgcagctgctggcggtgcaggcgcaggcggggacggagcgcgggcagggccgcatcgacgacgaggcggcgcggcgaatccaggaggcgctcttctgccttcacgacgagcgcgactgcctctacgagtacgtgcccgacaacgtggtgtccatgcggcgcatcgtcaacaccgtgcccatcaccgtgcgcctgctgcagcagcagcagcagcagggggactttgggggccccacgccgcgccaggcggtggcgtgggtggtgctcgccaaccagtggccgtgccgcctgagctgggcgctgcagtgcctggaggaccggcagcagaccgggggcgcgcccgagggccgcgcgcgcctctgggacgttttccgcgacaacagccgcgagctgcacaccatgaccaaggcgttgcagaacgtgctcgacctggacggcgaccccgagctcttcgagcgcttcctgggcgccgacttccccttcaccgtggccgaggcgcagagcctgctgcgctgcacggtcaacctggaccactccatccgccggcgcatgggtctcatccgagccgtcagcgcgctcaagccgcccagcccgcccaagtcccctacccgcgataccccccacgctgcccaccgggccaacagcgcctccagggcgcccccgtcgggccgtgcctcagggcaagccggcgaaggccaccacactggggacttggcccacaggggcaagctatggccggtggcctgtgcgctcttccgtccagggcaatccagcccagggtacctgccttacgagtcactccagggccactggttagtcactgacactgaagccactgcatcagccccctga

SEQ ID NO: 136967 - DNA, 843 bp, Homo sapiens
aggagggggcatggcggatactgtgttgtttgagtttcttcacacggagatggtggctgagctgtgggctcacgaccccgaccccggcccgggggtgagcgccgggctccgtggggaggaagcgggggccaccaagggacagaagatgagcctgtcggtcctggagggtatggggttccgtgtgggccaggctctaggcgagaggctgccccgggagacgctggccttcagggaggagctggatgtcctcaagttcttgtgcaaagacctgtgggtggcggtgttccagaagcagatggacagcctgcgcaccaatcaccaggggacctacgtccttgcaagacaacagcttccccctcctcctcccgatgggctctggcttgcaagtatcttggaggaagcacccaagttcctggccttcacatgcggcctcctgcgcagcgccctctataccctgggcattgagagcgtggtcaccgcctccgtggcagccctgcccgtctgtaagttccaggtggtgattccgaaatcctaaagcctgcctcgcacctgctgaaccgcactgatgcccctggccttcaccggcctcaggagacggtggggccgctgcatttcggggtggtcattttgggaatcccaggccctaggggtcacatttgctcaggaagtgggtatcaaattgaggtgggggtgtcagaggaggcaaaggggtcccagctgcggtcaggactgtggtgggattcccgcctcggcagcgtcactgcccaatagctgctcaataaaggctgtttttttggaaaaaaaaaaaaaaaaaaaaaaaaaaaaagttttgccttaaaggtc

SEQ ID NO: 136968 - DNA, 201 bp, Homo sapiens
ggggacctcccctgggagatcaatcccctgtcctcctgctctttgctccatgagaaagatccacctacgacctcaggtcctcagaccaccagcccaagaaacatcacaccaatttcaaatccggaccccactggaaatcggactgtccaactcacctggcagccactcccagagcccctggaactctggcccaaggctctc

SEQ ID NO: 136969 - DNA, 522 bp, Homo sapiens; identical to SEQ ID NO: 114701

SEQ ID NO: 136970 - DNA, 705 bp, Homo sapiens
atgactgatacacaagtaaacgagcagacaatagaaactgccaatccatctgaccttgcccctcctccccaggctgctcctcaccaggccaagccaggtcccaattcttcctcaacctccactctcccaccctataatgcttctatcacctcacctcttcacacccagtctggcttacagtttctttctacccagagggaccagaaggccatcttattctcaatatgtattttattacccaatccactcccaacattagaaaaagctccaaaaattagattccgccctcaaaccccacaacaggacttaattaaccttgccttcaaggtgtacaataatagagaagaggcagccaagcggcaatgtatttctggattgcaattacttgcctccgctctgagagaaaccccagccacatctccagcacacaagaacttcaaaacgcctaaaccacagtggccaggcattcctccaggacctcctcccccaggatcttgcttcaagtgccggaaatctggccactgggccaaggaatgcccgcagcccaggattcctcctaagccgtgtcctatctgtgcaggtccccactcgaaatcggactgtccagcttgcccaaaagccactcccagagcccctggaactctgccccaaggctctctgactgactccttcccagatcttcttggcttagtggctgaagactga

SEQ ID NO: 136971 - DNA, 462 bp, Homo sapiens; identical to SEQ ID NO: 124296

SEQ ID NO: 136972 - DNA, 505 bp, Homo sapiens
atggccttgggtgaacatagtcagaagtcagggagtggtgacaacagaccttgggcaagggccagcactgtgctggcttcaggtctgacccagcacagtgatagtggtggaggccacagggctgcttgtgtcactccatccccagctgtaggtggctcaggagagagagagagagagagagagagagagagatatgctcgatatgtttgggaaaaagcttccgaggcgatcgggcagtgtcactcttcagctgctaagccaagaagatctgggaaggagtcagagagccttgggccagagttccaggggctctgggagtggctgccgggcgagttggacagttcgatttccagtgggaaaatgaaaggaattgaaattaagagaatggagagattgaagtgtggcgccaagattgaaaggagaaagaggttgagggatagtgaggagaggttgagggatagtggagaagagaataaaaagaggccacttacgggatttaaaattg

SEQ ID NO: 136973 - DNA, 1156 bp, Homo sapiens
atgtggaaaggccccaaaggattagacatgtatggaaagagctcagtgagccctaagacatcagatatactggggagagacactctcctgctggccttgaaggtgcaaacagtggtgttgcaaactgcctgtggagagggccatgtggcaggaaactgtgggaggcctctagaaactgaaggcagtctccagctgacagctactaagaagctaagggactcagtcctgcaaccaaaaagtcctgaattctgccaacaatttacaagagcttggaataggacccaagttccagatgagactgaagccccagctggcacctatgcagcccaatcgggggacctcccttgggagatcaatcccctgtcctcctgttctttgctccatgagaaagatccacctacggcctcaggtcctcagaccgaccagcccaaggaacatctcaccaattttaaatcgggtttcagaggtgtcagaccacgcagggacgcctgccttggtccttcacccttagcggcaagtcccgcttttctggggaaggggcaagtaccccaaccccttctctctgtgtctctaccccttctccgcctttctggggggcaagaaacacccaaccccttctccttcaccctgagtggcaagtccgcttttctagaggagcaagtaccccaacctcgtatctctgtgccccagtcccttatttccacgccccgacctcttatctctgtggcccaatcccttatttctgcaccccaacctcttatatctctgtgccccaatcccttatttccatgccccgacctcttatctctgcaccccaaccccttatttccacgacccaacccctttcccgcttttctggaaggagcttgctacaagtgccagaaatctggccaccaggccaaggaatgcctgcagcccgggattcctcctaagctgcgtcccatctgtgcgggaccccactggaaatcggactgtccaactcacctggcagccactcccagagcccctggaactctggcccaaggctctctgactgcttcccagatcttcttggcttagcagctgaagactgacactgcccgatcgcctcggaagccccctacaagaccatcacggacgctgagcttcaggtacacatccagatggccggttcctg

SEQ ID NO: 136974 - DNA, 411 bp, Homo sapiens; identical to SEQ ID NO: 114508

SEQ ID NO: 136975 - DNA, 679 bp, Homo sapiens; identical to SEQ ID NO: 129189

SEQ ID NO: 136976 - DNA, 1021 bp, Homo sapiens
atgaaactcatggaaacacttaaccagtgcataaacgctggtcatgaaatgacgaaggctatcgccattgcacagtttaatgatgacagcccggaagcgaggaaaataacccggcgctggagaataggtgaagcagcggatttagttggggtttctctcaggctatcagagatgccgagaaagcagggcgactaccgcacccggatatggaaattcgaggacgggttgagcaacgtgttggttatacaattgaacaaattaatcatatgcgtgatgtgtttggatctggctctgaaggggctacgtgttttgctcgtggaaggtaacgacccccagggaacagcctcaatgtatcacggatgggtaccagatcttcatattcatgcagaagacactctcctgcctttctatcttggggaaaaggacgatgtcacttatgcaatatatttcacttgctggccggggcttgacattattccttcctgtctggctctgcaccgtattgaaactgagttaatgggcaaatttgatgaaggtaaactgcccaccgatccacacctgatgctccgactggccattgaaactgttgctcatgactatgatgtcatagttattgacagcgcgcctaacctgggtatcggcacgattaatgtcgtatgtgctgctgatgtgctgattgttcccacgcctgctgagttgtttgactacacctccgcactgcagtttttcgatatgcttcgtgatctgctcaagaacgttgatcttaaagggttcgagcctgatgaccccactggaaatcggactgttcaactcacctggcagccacttccacagcccctggaactctggcccaaggctctctgattgactccttcccagatcttcttggcttagcggctgaagactgatgttgccggatcgcctcggaagctgttgcaaggacagcaccaagccatgggggatctgctcccattacccaaacacctcccacaggccccacctgcagcactggggaccacat

SEQ ID NO: 136977 - DNA, 1124 bp, Homo sapiens
atgatacagctgctcaactggggcctgctctgttgccatttatcagcaaatcctcttggtaaaaagtggttgtatgcagcacaaatttcagaggtaaaatggattggattttcggatgcactgtatgggaaatatgagagaaagagacaaggaaaagttattgccaaggattttgatatagtgaagccaatagatcaggagacaattgcatttaaacgagagttaattattcacagttcccaagaggaggggaaaatgccataccatgcagagccacaatacagagaatactcaggtcagttgcaggcaggacatcagaacttcaggttctcagaccttcagactcagggatttacaccagtgcccccaactccaccttgcccccattctcaggtctttggccttggactgagagttacaccattggttcccttcagactgaattacaatactagctctccagtttctccagctttcagatggcagattgtgggactccttggcttccataattatggggcttccgaggcgatcgggcagcatcagtcttcagtcactaagccaagaagatctgggaaggagtcagtcagagagccttgggccagagttccaggggctctgggagtggctgcctggtgagttggacagtccgatttccagtgaagtcccacacagatggggcacagcttaggaggaatcctgggctgcaggcattccttggcccagtggccagatttctggcacttaaagcaagatcctgggaactgcctatagtcattgggatctatagagaactgctctaatgccttcctggagggatggctcttgaagcaggcagttatcagcgtgagattgggctgcagcaaaaactctttcccattcatcctgactatgccttcagttccagccaccgctctaagaggaaattgttgggcaggtgggggagggctagtctcagaatgaaactgtaagctgaaccaggtgtgcacaggggaggtgatagaaggattatagggtggaggagcagaggccaaggaagaatcggagcctgatttagcttggcggggagcgacctgaagaggagcagtcagatgcagatgcctagccttgatctttccagccat

SEQ ID NO: 136978 - DNA, 1290 bp, Homo sapiens
atgcctggcgataagtacggcgatggcattaccttaatcaagtacatcaagcgccatttcccaagcctgtcgatcattgttctgactatgaacaacaacccggcgattcttagtgcggtattggatctggatatcgaagggatcgtgctgaaacaaggtgcaccgaccgatctgccgaaagctctcgccgcgctgcagaaagggaagaaatttaccccggaaagcgtttctcgcctgttggaaaaaatcagtgctggtggttacggtgacaagcgtctctcgccaaaagagagtgaagttctgcgcctgtttgcggaaggcttcctggtgaccgagatcgctaaaaagctgaaccgcagtattaaaaccatcagtagccagaagaaatctgcgatgatgaagctgggtgtcgagaacgatatcgccctgctgaattatctctcttcagtgaccttaagccagataagacgcgttagtgtcttatctggcatttgcaccgattgccggatgcggcgtaaacgccttatccggcctacgattcccattatttcaacaaattacattaaagtaggccagataagacgcgtcagcgtcgcatctggcatttgcgctgaatgccggatgcggggtaaacgctttatcgtcctaggaattccgggatttctggacctctcggggtataacgcagcgtctgggaagcgccaaagcttgcatgcctgcagccgcgtaacctggcaaaatcggttacggttgaaacgttttccttcaattcatgggccttttaatgaagcttcacaagaagcggcgcgtcgtaagtcgattgagaaagagctggaatgggtacgtcaaggtactaaaggccgtcagtcgaaaggtaaagcacgtctggcgcgctttgaagaactgaacagcaccgaatatcagatcactgtattacacacaggaggaaaatcagagttaggaagggggcttccgaggcgatcgggcagtgtcagtcttcagccgctaagccgagaagatctgggaaggagtcagtcagagagccttgggccagagttccaggggctctgggagtggctgccagatgaatcctctgtctggccggccccaggttgtctgcttctttactgcacacatgttgacaaagaaaagggaagaaggagcctccatgttgaacatgccttgcttccagtgaaaggaagagatgatccaagcaaatttaggaccaatagcagactcttcacactgcctggggatagagggaccaccctgggctcctcttactcctgg

SEQ ID NO: 136979 - DNA, 726 bp, Homo sapiens
atgccttctgtccgcactggagacccaatcattctacatgctcatacactcaacccagcagtgtggctcgcatgggctgtggagggagagggttccctgacactcaacatctggatctgcccatggcagatcgagccactacggcatcttgcctataccccaggctctgatgccacctcactgactgtgccaacccgagtgattagccctctttgtgtggactcatggttgttcactgatcctcttatgaaaactcatgcaccagaaagaacatttctctctttccctgctgccgccaagcgccaagcccacctttgtgtgcttgcatccaactgtgataagcctatgtatgtcaagttggtgaaggcccattgtgctgaacaccaaatcaacctaatcaagggtgatgacaacaagaaactaggggaatgggaaggcccctgtacaattgacagagaggggaaaccctgtaaagtggttggttgcagttgtgcagtagttaaggactatggaaggagtctcaggccaaggatgtcatcgaacagtacttcaaatgcaagaaatgaagaactaaatctttgcctcacacatggaaagaaaagaaaaaagaaaaagagagagagaaagaaggaaagaaagaaaagaaagaaagaaagaagaaagaaagaaagaagaaagaaagaaagaaagaaagagaaagaaagaagaaagtcaacgtgtttctga

SEQ ID NO: 136980 - DNA, 869 bp, Homo sapiens
  misc_feature (1)...(869): n = a,t,c or g
cgccgagtcgcgcggaggcggaggcttgggtgcgttcaagattcaacttcacccgtaacccaccgccatggtcgaggaaggcattgctgctggaggtgtaatggacgtgaatactgctgtacaagaggttctgaagactgccctcatccacgatggcctagcacgtggaattcgcgaagctgccaaagccttagacaagtacgtgtatcagtctcaatactgtgggttcttgcaaccggaacaaaactgccacccaagggaagaaggcatggagttcatggtgttagcgcaaaagttctgaatggcatccgtcctaccggaaacctaggaaaaggcgccaagcccatctttgtgtgcttgcatccaactgtgatgagcctatgtatgtcaagttggtggaggccctttgtgctgaacaccaaatcaacctaattaaggttgatgacaacaagaaactaggagaatgggtaggccttttgtaaaattgacagagaggggaaaccccgtaaagtggttggttgcagttgtgtagtagttaaggactatggcaaggagtctcaggccaaggatgtcattgaagagtatttcaaatgcaagaaatgaagaaataaatctttggctcacnnnnnnnnnnnnnnnnnnnnggggggcccgtttaaaagaacccttggggggcccaaattttacccggcattgcaaggcataacttttttccttatggggggccattttaaaccttacttgggaattttggaaaagaacctttttttttggggggggacaaattgggacaacctccctccaaaatttaaaggttctagggaaaataaaaaattttaaggggaaaagggggtaaacctaccgccttt

SEQ ID NO: 136981 - DNA, 613 bp, Homo sapiens
  misc_feature (1)...(613): n = a,t,c or g
cgcgctgcaggaattcggcacgagccgagtcgcgcggaggcggaggcttgcggtgcgttcaagatttcaacttcaccccgtaacccccaccggcccatggcccgaggaagggcattgcctgcctggagggtgtaatgggaccgttaaatacctgcttttaccaggaggttcctgaagactggccccctcatccccacgatgggcctagccacgtgggaattccgcgaagcctgcccaaagcccttagacaaggcgccaagcccatcctttgtgtgcttgcatccaacctgtgatgagcctatgtatgtcaagttggtggaggccctttgtgctgaacacccaaatcagacctaattaaggttgatgacaacaaggaaactaggagtaatggttaggcctttgtttatattgacagagaggggaaacccccgtaaaagtggttggttgcaagttgtgtagtagttaaggactatggcaaggagtcttcaggccaaggatgtcattgttagagtatttcaaatggcaagaaatgaaagaaataaatctttggttcacnnnnnnnnnnnnnnnnnnnnngggggggctctttaaaggaacccaattatactaccct

SEQ ID NO: 136982 - DNA, 552 bp, Homo sapiens
ggctggccccttctgtaggatggtagcacacaaccaggtggcagccgacaatgcagtctccacagcagcagagccccgacggcggccagaaccttcctcctcttcctcctcctcgcccgcggcccccgcgcgcccgcggccgtgccccgcggtcccggccccggcccccggcgacacgcacttccgcacattccgttcgcacgccgattaccggcgcatcacgcgcgccagcgcgctcctggacgcctgcggattctactgggggcccctgagcgtgcacggggcgcacgagcggctgcgcgccgagcccgtgggcaccttcctggtgcgcgacagccgccagcggaactgctttttcgcccttaactgtatctggagccaggacctgaactcgcacctcctacctcttcatgtttacatatacccagtatctttgcacaaaccaggggttgggggagggtctctggctttatttttctgctgtgcagaatcctattttatattttttaaagtcagtttaggtaataaactttattatgaaagttttttttt

SEQ ID NO: 136983 - DNA, 1702 bp, Homo sapiens
ttttttttttttttctccaaattcctggggtaataaggacttgtttattttgaggaaaaaaggtcccaaacatcaggctgttcacaaaaataacccacagtatcaactttagaaaacaaatcttaagactataacactaattatttttctagaggatgcatttgacatgccaactctcattcacaaaaatacattgttacatttgtgttgaactgccccacacagcacactaatgtgagggtgtaacacacatacttctaactcaaagctgctttcaagagctactcaactaaatgagattgcctttgcagttagggaagcaactactgaacttatgtatgaatgaaaagaactgtactccctgcataacaagagattattttggagacagttgataaaaaccatacatcctttttattgttaagtcataaagaggtatcaaaattaaaagcaaaaattacagggtaagacttaacaaaactacgtaggagcgtcaaaggaagtgaaaattgggacttaggcgcggggccaatatgaatttaatgaacatgggaaggacaaggatggggagaacaagtgaagcatgtgctgaagatactaggggagaggatctggtgaaaaatttgaatcttagacaagcgcctaggtaaaggaaataatgggataagatttctaaaccccaactatgtgcttaaggagtcatcccctcccattggcgctggtctctgtcatcctctcctttcctcagccttctttttcatcatccttgatcaactccagctggtcatccccccgatcttcattatcatcatcatccagtaggtccccctcctcaggcagagtcaatctgcacccccctcagactccatcttcacattagtctcatctttcttcacggagctgctgctctgctcctcttctgacttatcattcttcatctctactgcttgtttgctctgttccttttccattttttccaggttttccaggagagaatccactttttgttttatctgggtcagctccttcttaatggcctgaaggtcatctcctttcaactttccagacttggaagatccccgctgtccactcttagaattgaagccacttttgccccttcgtgaagtgtttcctgatacacgctgacgtttcgagggcactacagcccgagcaataggaggaggaggaggtacacgtgctgggtaactgtacatcctatcataatagtcccgttgaaagtcatagtccaagtcaaaagaggagccgtacatctccgctgcagatcgtttcacacctgcttttcctcggttcacttttggctctgcagccaggttaatatctaaaacctggccagcaatcattctgccatcctctcctgctacagcagcccgggcatttctctcattaacatactgaacgaaggcaaagcccttatgaacagagcagcccacaattttgccatacttcgaaaagattgcctccacatcagatttcttgaccacaagagtgttgagattcccaatgaatacacgggagttcatggagcgaggatctgtcttgttggtaacgttgctggccatcgtgtttgatggtaaggtttctcacaaagccgaaaatgtagctgaagatcaaaaaaatctcacaagaaggggagggagaagagattcgattctgagtctcctactcccgggtttggaattcc

SEQ ID NO: 136984 - DNA, 1473 bp, Homo sapiens
  misc_feature (1)...(1473): n = a,t,c or g
atgtgcttaagagtcatcttcaccattggtgctgtctctgtcatcctctccttcctcagcctctttttcatcatccttgatcaactccagctggtcatcccccaatcttcattatcctcatcatccaacttggaagatccctatagtgagtcgtattatgcggccgcgcggaggccggactccgcctccaccgagcccccacccgccgggaagagctccgcggagtacagagcccattttctagctgtgtccactgaggctgaacggatccgcgcggacttggtgctccgtgctcgccccctagggccggcgcacccccggacgctatggcccacccctccggctggccccttctgtaggatggtagcacacaaccaggtggccagccgacaatgcagtctccacagcagcagagccccgacggcggccagaacctttccctcctcttcctcctcctcgcccgcggccaccgcgcgcccgcggccgtgccccgcggtcaccggccccggcccccggcgacacgcacttccgcacattccgttcgcacgccgattaccggcgcatcacgcgcgccagcgcgctcctggacgcccntcggattctactgggggcccctgagcgtgcacgggggcgcacgaaccgctgcgcgccgagcccgtgggcacctttccggtgcgcgacagcccgccagcggaactgctttttcgcccttagcgtgaagatggcctcgggacccacgagcatccgcgtgcactttcaggccggccgctttcacctggatgggcagccgcgagagcttcgactgcctcttcgagctgctggagcactaccgtggcggaagccgcgccgacctgctgggggcaacagctgcgccagcgccgcgtgcggccgctgcaagagctgtgccgccagcgcattcgtcggccacccgtgggcccgcgagaaccctggctcgcatccccctcaaccccgtcctccgcgactacactgagctccttccccttccagatttgaccggcagcgcccgccgtgcaccgcagcattaacctgggatgccgtgttattttgttattaccttgccttggaaaccatgttgggtacccctccccggcctgggttggagggagcggatggggtgtaggggccgagggcgcctcccgccctcggctggaagacgaggccgcagaccccttctcacctcttggagggggtccttccccctcctggttgcttcctctggggtcccccctggtttgtttgtaagcaagcttaactgtatctggagccaggacctgaactcgcacctcctacctcttcatgtttacatatacccagtatcttttgcacaaaccaggggtttgggggagggtctctggcttttaattttctgctgtgcaaaatcccattttataattttttaaagtcagtttagggaataaactttattatgaaagtttttttttttaaaaaaaa

SEQ ID NO: 136985 - DNA, 1552 bp, Homo sapiens
  misc_feature (1)...(1552): n = a,t,c or g
tcgaagactgagcggttgtggccgcgttgccgacctccagcagcagtcggcattctctaacgcagaaacccgggagtaggagactcagaatcgaatctcttctccctccccttcttgtgagatttttttgatcttcagctacattttcggctttgtgagaaaccttaccatcaaacacgatggccagcaacgttaccaacaagacagatcctcgctccatgaactcccgtgtattcattgggaatctcaacactcttgtggtcaagaaatctgatgtggaggcaatcttttcgaagtatggcaaaattgtgggctgctctgttcataagggctttgccttcgttcagtatgttaatgagagaaatgcccgggctgctgtagcaggagaggatggcagaatgattgctggccaggttttagatattaacctggctgcagagccaaaagtgaaccgaggaaaagcaggtgtgaaacgatctgcagcggagatgtacgggtcagtaacagaacacccttctccgtcccctctactcagctcctcttttgacttggactatgactttcaacgggactattatgataggatgtacagttacccagcacgtgtacctcctcctcctcctattgctcgggctgtagtgccctcgaaacgtcagcgtgtatcaggaaacacttccacgtagtggcccacgtggcttcaattctaaggagtggaacagcggggtatcttccaagttctggaaaaggtgaaagggagatgaccttcagggccattaagaaggagcatgacccagataaatcaaaaaggtggattctctcctggaaaacctggaaaaaattgaaaaagcgaccggggcaaacaagcagttagagatgaaggaatgattaagtcagaagaggagccagagcaccagctcccgtgaagaaagaatgagactaaatttgaagatggagtctgaaggggggtgcaaaagaactctgcctgaggaggggggaccctactgggatgatgatgatgaataatgaaagatcgggggggatgacccagctgggagttgatcaaaggatgatgaaaaaagaggcttgaggaaggagaggatgacagaggacagcgcccaatggcgagggatgactcttaaggcacatagtcgggcttaagaaatcctaatcccatttatttcttttaccttaggcgcttgtcctaagattcaaatttttcacccagatcctctcccctaagtatctttcagcacatgcttcactgttctccccatcccttgtccttccccatgttcattacattcatatttgccccgnggcctaagtcccattttcactcctttgggaggctccctagtagttttggttaagtcttaccctgtaattttctgcttttaattttgatacttctttatgacttaacttattataaaggatgtatggtttttaaaaaaaaaaaaaaaaaagggcggccgctcgcgatctagaactagagcggttgtggccgcgttgccgacctccagcagcagtcggcttctctacgcagaacccg

SEQ ID NO: 136986 - DNA, 348 bp, Homo sapiens; identical to SEQ ID NO: 114682

SEQ ID NO: 136987 - DNA, 3758 bp, Homo sapiens
atggtccaggatttcagaaggggcctgagcgccgtggtcagccaggctgagtgcagggagggagagctggccaggtggacccgctcgtccgagttgtgcgagacggtgagcagctggatggggcccctggacccggaggcttgtccctcctcacccgtggctgagtgtttgaggagctgtcaccaggaggctacctcggtggctgcagaggccttccccggggcaggggcaggggccaccacggcccacctggaggacagctctgcctgttcctctgagcccacccagaccctggccagccgccccaggaaacatccccagaagaaaatgataaagaaaacgcaaagtttcgagatacctcagcccgacagtggccccagggactcctgccagccagaccatactagtgtcttcagcaagggcctggaggtaaccagcactgtagccacagagaagaagctcccgctgtggcagcatgccaggagccccccggtcactcagagccggagtctgtcctccccctcggggctccaccctgctgaggaggatgggaggcagcaggtgggcagcagccgactgaggcacatcatggccgagatgatcgccacagagagggagtacattcggtgcttaggatacgtcattgacaactattttccagaaatggaaagaatggacttgccccagggccttcgagggaagcaccacgttattttcggcaacttggagaagctccacgacttccaccagcagcacttcctccgggagctggagcgctgccagcactgccccttggccgtgggccgcagtttcctgagacacctgataggccagaagcagttcccagaatcaccttccggggagaggccaggcctcacctcttcacacgccccctgcccctggatgccccattacctgccagagggaccagcctgtcccgttctgagaattccctgtgaggctttcaactggaagcacgttgaatgtacagacccagtggtctctcctcccaagcagtcgcctctgcttttccaggaagagcagtttgggatgtacgtgatctacagcaaaaacaagccgcagtcggatgccctgctcagcagccatggcaacgccttcttcaaggtcatccccctcggcccgccccccacagcctgcccggccctcagccaggccggagctgaccctctcacccggcccttgcaggacaagcagcgggagctaggtgacaaaatggacctggcctcctacctgctgcggcccgtgcagcgtgtggccaagtacgcgctgctactccaggacctgctcaaggaggccagctgtggcctggcccaggggcaggagctgggcgagctccgagccgccgaggtcgtggtctgcttccagctgcgtcacggcaatgacctgctggccatggacgccatccgcggctgtgacgtaagtgcctcagacgctggcagctcaggcaagctgggggaatttgaggctgctgctaacattaaggcggatttgccagattttatggcagtttggctgctgttccgtcttgtcacgaagctaacacatttagacggagacagtgacctgtgccaccacagacgccggattttcttggatgaaatccacctgtgtgttcctctgcaggtgaatttgaaggaacaggggcagctgagatgccgggatgagtttatcgtttgctgcgggaggaagaagtatctgaggcatgtgttcctctttgaagacctcatcctgtttagcaagacccagaaggtggagggcagccacgacgtctacctgtacaagcagtccttcaagcctggcggctgcgaacaccaccttcacagcaaccaccccccaccccagaccttctcccacactgagctccaactccagagtttgttgtctgtggaaggtatccgagtgaccggcggcaaatctgtacaggtctgcagcaacctcagttcttacctcctccgaagaaagaatttgactgagggatgttggacacgccgtttccaaggcctcatggcttcctttttcttggttactgcctcgggctccctgggagagatctctttggtgccgaaaaccggaatgggaagcctcagcaccctggccccccatgcccctcgtggggcaggaactcagaatccaagaaatggcatcatgggtataggcaaccagccattcatggatgtcaagcccagagaccggacccctgactgtgcagtgataagcgaccgggctcccaaatgtgcagtgatgagcgaccgagtccccgacagcatcgtcaagggcacagagtcacaaatgagagggtccacagcggtgtcctcctctgaccacgccgcccccttcaagcgaccacactccaccatctcagacagcagcacctcctcttctagcagccagtcctcctccatcctggggtcgctgggcctgcttgtgtcctccagcccagcccacccgggcctatggagccctgcccacagcccctggtcatctgatatcagagcctgcgtcgaggaagatgagccagagccagaactagagacgggcacccaggctgcagagccccctgccaggtgctctgaccacaggaaacaggagccctcagggccactgccagaggacggattctgctgccaaccagaggtcctggggctggcggcgctggtgtgcctgccctgggccttcagcagcccccataaggagaaagctccagcctcccgttcagagaaggctccatcctggggacacgcctctcccaagcctctgtctcatggccgtgaccctccaaagcccatggacacgtggtgccctgtagtgatgtgtgcagtgatgtgtgcagcgatgtgtgctgaccctgccctgagtggcagtgtcacggggagagaagctctggtgtcccacccccaggtggcccggcagagcctggacagcgtggcccacaacctctacccactcctgttcaaagccagctacctgctggagcaggcggaggtgacgcgcgcggtgctggggcgctggcccctggaggagttccggctgggagcgctgctgggtcctggtgccgaccacccccaggacctgcgcgacagaacctgcagggcctgcctggaggcgctggtgcgcggcctcgcggaccacgtgctgcaggaccggagccgccggcggctgcgggtggctgacctcacgggcatccgagatgtgcaggtgcagcggtgcccgtgcgggagggcgctgggcaggtggggccgcacccagctgctggccaggacctgctgtgagctgcaggcagagcccctcgcagccgggcgccccgtcgaggtcctcgccgacctcttcgtcactgagggcaacttcgaggcggtggtgcaggctctgaggccagcgggcccggcccctctgcgggtgcactgcccctcgttccgggcggacagcctgagccccagccagctcctgcacgtgctgcgtctggctggcccgggtgccctgcgcaagctggaggtggtgcacaacgtgcggctgcatgcgggccacgtgcagcagcttctggcccaggtgggcttcccccggctggcctcgctcaccctgcccaccaaggcctttgatgcaccccccacctacgcctccactcccgacggcgaggaccccctcctcgcctccatcgcccgggagctcagcaagatggcgcagctcactgagctcagtgtggccttctccacgctgaccgggaagatcccgacgctgcttgg

SEQ ID NO: 136988 - DNA, 574 bp, Homo sapiens
  misc_feature (1)...(574): n = a,t,c or g
ctgaagctgcagaacttgatgctatgtgcactgcaacccgtcaatggagcagagctgggcaaggagtcacggggcgcccatgccagggaagacttccaaggtgcggattgaggagtacgattactcccaagcccattccagggggccaccggaagaagccccttttaggagcactggaggaagcacaccctgtcctatgtggaacgttggcactgggaaggtcactctggaatatagacccgtgatcgacaaaactttgaacggaggctgactgtgccaccatcccgccagccattcgctcctactgatgagacaagatgtggtgatgacagaatcagcttttgtaattatgtataatagctcatgcatgtgtccatgtcataactgtcttcatacgcttctgcactctgggggaagaaggagtacattgaagggagattgggcacctagtgggctggggagcttgccaggggacccagtgggccagggagcgtnggcacttacctttgtcccttgcttcattcttgtgagatgataaaactgggcacagctcttaaataaaatataaatgaac

SEQ ID NO: 136989 - DNA, 5769 bp, Homo sapiens
ctgtgcaggcaagcacatagttaaaactgaaggaaaaatttcttgaataaaagtagttaacgtttttattctttacttcaaggtatatctccatggaataacctaaatgatcccccaaattgggaatatccgggcctaattccggggcggatgggtgggtgatgggaagcaggtgggaattatggccctgttgggttccaatgctggggattgggctgcttttcgttggatttggtctaggggagtcccagaaagaagtagaaaaagagagagaagcctaccgtcgggagaactgctgcttttcaacaggatctggtaagccaagttaccacggccatgattcttaagaaaatcggcgtgctgtcgctcagttgtccttggaactcgaaaaggaacaaaacagaactgctagttaccgaggaagcccttatctctcagggacgcaagttggtagaagaaaagaagcttctggaacaggaacgggcccaggacaagtgtaccttgagagctgctgccgccgcctggatgtttgctgggtgagctccagattcacgggagccctttgtgccagcatggccgccccaaccccatggggaaagcagatctccctcacctgggaatctggcagagacctcaggcagtgccccatctttcatgacctgcctggtccagacgccggatgtgtggccacagacgccatgcgacccaggactggagtcacaagattgggcgaggacaaagacccagcgaatggtgaacggccatgcaggatggggccgatcagttcagtaggagcaaggcaacagaagaagccctttgaggagcactggaggaagcacaccctgtcctatgtggacgttggcactgggaaggtcagtgtggagctcgttctcaccacagcccagcacccacacggccccgcccaggcctgcgggctggccttgctgatggtgaacggggaagagcaggccagatttaaatcaactcccgacagattcgaggcaccgctgaaaaaggcactccgacagcagtcgggcttcgggctggaaacagaatccagttcctgcagcattactgtgagctccgcctcccgacagcattaccgtgtgagctccgcccccgttagagcattactgtgtgagctccaccccctgccagagcattactggatggtggtctctgctgtagctttgtcccctggtgacgggactcaggcagcaacccccatcattggcaatacccccacctctgagaatgtggagaggacttgtgaagacaatgttgtcccaagcagcacagcccagggcagggcggttggactccggagcatgggcccagggcccggagcggtttctaagcgggtcgcgccgtttggcataggccaagtaactgggcctattttccgggtaaaggcccggttgctgggcctcgtgactccaagggccttctgcctgtgccctgcttctcggtggaagccacagactttcctgtcgtcctcggggctctggaatctgagggttgcccagcaatcctgccagaaaggactacagctggcgaaggagaacccgcaacgtacagaggaaatggtccaggatttcagaaggggcctgagcgccgtggtcagccaggctgagtgcagggagggagagctggccaggtggacccgctcgtccgagttgtgcgagacggtgagcagctggatggggcccctggacccggaggcttgtccctcctcacccgtggctgagtgtttgaggagctgtcaccaggaggctacctcggtggctgcagaggccttccccggggcagacctggccagccgccccaggaaacatccccagaagaaaatgataaagaaaacgcaaagtttcgagatacctcagcccgacagtggccccagggactcctgccagccagaccatactagtgtcttcagcaagggcctggaggtaaccagcactgtagccacagagaagaagctcccgctgtggcagcatgccaggagccccccggtcactcagagccggagtctgtcctccccctcggggctccaccctgctgaggaggatgggaggcagcaggtgggcagcagccgactgaggcacatcatggccgagatgatcgccacagagagggagtacattcggtgcttaggatacgtcattgacaactattttccagaaatggaaagaatggacttgccccagggccttcgagggaagcaccacgttattttcggcaacttggagaagctccacgacttccaccagcagcacttcctccgggagctggagcgctgccagcactgccccttggccgtgggccgcagtttcctgagacacctgataggccagaagcagttcccagaatcaccttccggggagaggccaggcctcacctcttcacacgccccctgcccctggatgccccattacctgccagagggaccagcctgtcccgttctgagaattccctgtgaggctttcaactggaagcacgttgaatgtacagacccagtggtctctcctcccaagcagtcgcctctgcttttccaggaagagcagtttgggatgtacgtgatctacagcaaaaacaagccgcagtcggatgccctgctcagcagccatggcaacgccttcttcaaggacaagcagcgggagctaggtgacaaaatggacctggcctcctacctgctgcggcccgtgcagcgtgtggccaagtacgcgctgctactccaggacctgctcaaggaggccagctgtggcctggcccaggggcaggagctgggcgagctccgagccgccgaggctcgtgctaacattaaggcggatttgccagattttatggcagtttggctgctgttccgtcttgtcacgaagctaacacatttagacggagacagtgacctgtgccaccacagacgccggattttcttggatgaaatccacctgtgtgttcctctgcaggtgaatttgaaggaacaggggcagctgagatgccgggatgagtttatcgtttgctgcgggaggaagaagtatctgaggcatgtgttcctctttgaagacctcatcctgtttagcaagacccagaaggtggagggcagccacgacgtctacctgtacaagcagtccttcaagagtttgttgtctgtggaaggtatccgagtgaccggcggcaaatctgtacaggtctgcagcaacctcagttcttacctcctccgaagaaagaatttgactgagggatgttggacacgccgtttccaaggcctcatggcttcctttttcttggttactgcctcgggctccctgggagagatctctttggtgccgaaaaccggaatgggaagcctcagcaccctggccccccatgcccctcgtggggcaggagtgcaccaggcctgtcgtcaaggacacgggtacggtggcctcggccccgccctcactcatcctgcagagggcactgggccagtggccgacatggagccccctgccaggtgctctgaccacaggaaacaggagccctcagggccactgccagaggacggattctgctgccaaccagaggtcctggggctggcggcgctggtgtgcctgccctgggccttcagcagcccccataaggagaaagctccagcctcccgttcagagaaggctccatcctggggacacgcctctcccaagcctctgtctcatggccgtgaccctccaaagcccatggacacgtggtgccctgtagtgatgtgtgcagtgatgtgtgcagcgatgtgtgctgaccctgccctgagtggcagtgtcacggggagagaagctctggtgtcccacccccaggtggcccggcagagcctggacagcgtggcccacaacctctacccactcctgttcaaagccagctacctgctggagcaggcggaggtgacgcgcgcggtgctggggcgctggcccctggaggagttccggctgggagcgctgctgggtcctggtgccgaccacccccaggacctgcgcgacagaacctgcagggcctgcctggaggcgctggtgcgcggcctcgcggaccacgtgctgcaggaccggagccgccggcggctgcgggtggctgacctcacgggcatccgagatgtgcaggtgcagcggtgcccgtgcgggagggcgctgggcaggtggggccgcacccagctgctggccaggacctgctgtgagctgcaggcagagcccctcgcagccgggcgccccgtcgaggtcctcgccgacctcttcgtcactgagggcaacttcgaggcggtggtgcaggctctgaggccagcgggcccggcccctctgcgggtgcactgcccctcgttccgggcggacagcctgagccccagccagctcctgcacgtgctgcgtctggctggcccgggtgccctgcgcaagctggaggtggtgcacaacgtgcggctgcatgcgggccacgtgcagcagcttctggcccaggtgggcttcccccggctggcctcgctcaccctgcccaccaaggcctttgatgcaccccccacctacgcctccactcccgacggcgaggaccccctcctcgcctccatcgcccgggagctcagcaagatggcgcagctcactgagctcagtgtggccttctccacgctgaccgggaagatcccgacgctgcttggccccctacagaccccgctgcgagtactggacctggccaactgtgccctgaaccacacggacatggccttcttggcagactgtgcccacgctgcccacctggaggtgctggacctcagtggacacaacctggtcagcctgtacccctcgaccttcttcaggctgctcagccaggcttcccggacgctgaggatcctgacactggaggagtgtggcatcgtagacagccacgttggcatgctgatcctgggcctgagcccctgccaccggctgcgccagctcaagttcctcgggaacccgctgtcggcccgcgccctccggcgcctcttcaccgcactctgtgagctccccgagctgcgctgcattgagttcccggtgcccaaggactgctaccccgagggtgccgcctacccacaggacgagctggccatgtccaagttcaaccagcagaaatacgacgagatcgccgaggagctgcgtgccgtgctgctgcgggctgaccgagaggacatccaagtctccacacctctctttggaagttttgacccagacattcaagaaacaagcaatgagcttggtgctttcttgctgcaagctttcaaaactgctctagaaaacttctccagagcactcaaacaaatagagtagttcctccactcgcaccagtgacaggtcttgcatttcagcctgcaggtgccccgggctttagtcctggatctgaggcttgggcccggcattcatccccaccaccaccaccaccaaaagcagttcttagtgaaaattgtaggcgagcctgttaagcgttgtagaagaggaagccttccaggagaggtgccatgcggtgccctttagtggcagcacggcaaggttctggagggcggggaagccaccaagagacagtgacagggtcagcgggggcagacgccacatggcaaagagcagagaagcccgggaggtgtgaggagtggccgacctggcctcagcgcatctgggcactgggcgcaagatgaagcttcagggggcagatgtgactgggctccacagcagggagggggaggggaagagagaacacatcacagaaactgcacaaaataagcagcccatg

SEQ ID NO: 136990 - DNA, 508 bp, Homo sapiens
ggcacgagaaagtaactaaacaggagcccacaagacggtctgccagattgtcagcgaaacctgctccaccaaaacctgaacccaaaccaagaaaaacatctgctaagaaagaacctggagcaaagattagcagaggtgctaaagggaagaaggaggaaaagcaggaagctggaaaggaaggtactgcaccatctgaaaatggtgaaactaaagctgaagagatccacatctctcgctcaactgttaatgtctcaacctccagaggcaccccacccagcacactgcacagaaaactgaatctgtagataacgagggagaatgaattgtcatgaaaaattggggttgattttatggatctcttgggaccaccttttaaaagctatttttaccaagtattttgtaaatgctaattttttaggactctactagttggcatacgaaaatatataaggatggacattttatcgtctcatagtcatgctttttggaaattacatcatcctcaagt

SEQ ID NO: 136991 - DNA, 631 bp, Homo sapiens
agctgcagcggcagaggcagcatccagcggcggcgccagcagttccagtccgttgctttactttttgcttcaccgacatagtcattatgccgaagagaaagtctccagagaatacagagggcaaagatggatccaaagtaactaaacaggagcccacaagacggtctgccagattgtcagcgaaacctgctccaccaaaacctgaacccaaaccaagaaaaacatctgctaagaaagaacctggagcaaagattagcagaggtgctaaagggaagaaggaggaaaagcaggaagctggaaaggaaggtactgcaccatctgaaaatggtgaaacttaaagctgaagagatccacatctctcgctcaactgttaatgtctcaacctccagaggcaccccacccagcacactgtcagtaaaggggcagattgaaacagtgagagttaagggcacagaaaactgaatctgtagataacgagggagaatgaattgtcatgaaaaattggggttgattttatgtatctcttgggacaacttttaaaagctatttttaccaagtattttgtaaatgctaattttttaggactctactagttggcatatgaaaatatataaggatggacatttaaaaa

SEQ ID NO: 136992 - DNA, 473 bp, Homo sapiens
cttcgtcgtgccctgcgcgtgagcagctgcagcggcagaggcagcatccagcggcggcgccagcagttccagtccgttgctttactttttgcttcaccgacatagtcattatgccgaagagaaagtctccagagaatacagagggcaaagatggatccaaagtaactaaacaggagcccacaagacggtctgccagattgtcagcgtatttgtgtaatttaaattatctttgcagaaacctgctccaccaaaacctgaacccaaaccaagaaaaacatctgcttaaggtaaggaagtgctgtttcccacttttggctttttaaacaatgaataaattattaattcccttaccttcaggaattcattccaaaggaaagggccgtatttaatgatccaaactgaaaccattaccactgttacgggcttgcttaaaggcataaagcacagttttctgcgttaataggagtgtgttt

SEQ ID NO: 136993 - DNA, 671 bp, Homo sapiens
gcgcccacgcgtccgccagcggcggcgccagcagttccagtcctttgctttactttttgcttcaccgacatagtcattatgccgaagagaaagtctccagagaatacagagggcaaagatggatccaaagtaactaaacaggagcccacaagacggtctgccagattgtcagcgaaacctgctccaccaaaacctgaacccaaaccaagaaaaacatctgctaagaaagaacctggagcaaagattagcagaggtgctaaagggaagaaggaggaaaagcaggaagctggaaaggaaggtactgcaccatctgaaaatggtgaaactaaagctgaagaggtactttccataaatacctcccacttgattgaatcagtgtctttaaagaaatttctcaaatccttcagccggtgatagcacgttcttaatgtctctttttattgcctgtaatgttattgcagatccacatctctcgctcaactggtaatgtctcaacctccagaggcaccccacccagcacactgtcagtaaaggggcagaatgaaacagtgacagttaagggtacagtaaaacaatctgcatgtttgccgcgactcgaatcacaaactaactggggccgctctttctctcctctcctcttcacacatccgagacctctccacgggcggacc

SEQ ID NO: 136994 - DNA, 894 bp, Homo sapiens
cgcggaggtgcaggtcgaagaggccgggctacgtcgtgccctgcgcgtgagcagctgcagcggcagaggcagcatccagcggcggttttatgcagttccagtccgttgctttactttttgcttcaccgacatagtcattatgccgaagagaaagtctccagagaatacagagggcatagatggatcccaaagtaactaaacaggagcccacaagacggtctgccagattgtcagcgaaacctgctccaccaaaccctgaaccccaaccaagaaaaacatctgctaagaaagaacctgggagcaaagattagcagaggtgctaaagggaagaaggaggaaaagcaggaagctggaaagggaaggtactgcaccagctgaaaatgatgaaactaaagctgaagaggcacagaaaactgaatctgtagataacgaggggagaatgaattgtccatgaaaaatttggggttgattttatgtatctcttgggacaacttttaaaagctatttttaccaagtattttggtaaatggctaatttttttaggactctactagttgggcatacgaaaatatataagggtgggacttttatcgtctcatagtcatgctttttggaaatttacatcatcctcaagtaaaataaatattcagtaaaatatgggaagctgtgtgtaagattgattcagcattccatgcacttgctttaaaatttagtcctgtgcatactgtggtgtttttactgtgcatatttgaatttttcatgcagtttttctagagcaataatcagtggtgcttttgtacctaggttttatgtgattttaatgaaacatggatagttgtggccacctgctgactatttgtggtttaaaataaaaggtaaaaatgtctgcagaaa

SEQ ID NO: 136995 - DNA, 232 bp, Homo sapiens
gaccttgtgattgaggctgtgtatgctgacgtgcttcgtggctccctggaccagcgcaaccagcggctcgaggttgactacagcatcgggcgggacagtcagcgccaggacctcagtgccattgcccgaaccctgcaggaatggtgtgtgggctgtgaggtcgtgctgtcaggcattgaggagcaggtgaggttgccaaccttaaaaaaaccattaaagttacgacggcagc

SEQ ID NO: 136996 - DNA, 397 bp, Homo sapiens
ggggagagctgtgggagcgtcgtcagggtggacaccatgcgacacccatttctcctttgcatcctgtgtcttgggctctggacatcctgagcccaagtcccccacactcagtgcagtgatgagtgcggaagtgaaggtgacagggcaaaaccaggagcaatttctgctcctagccaagtcggccaagggggcagcgctggccacactcatccatcaggtgctggaggcccctggtgtctacgtgtttggagaactgctggacatgcccaatgttagagagctggctgagagtgactttgcctctacctttcggctgctcacagtgtttgcttatgggacatacgctgactacttagctgaagcccggaatcttcctccactaacagaggctcagaaa

SEQ ID NO: 136997 - DNA, 555 bp, Homo sapiens
  misc_feature (1)...(555): n = a,t,c or g
tccacctgtttgttctggtggaggagacgttagtactagaaagaggaacaaaagtacaagagaaaaaggcgtagaacaaaagaagaggtgaaatgaggacacagcggacctggctgagagtgactttgcctctaccttccggcgtgctcacagtgtttgcttatgggacatacgctgactacttagcatgaagcccggaatcttcctccactaacagaggctcagnagaataagcttcgacacctctcagttgtcaccctggctgctaaagtaaagctggaagaccttgtgattgaggctgtgtatgcttgaccgtgcttcgtggctccctggaccagcgcaaccagcggctcgaggttgactacagcatcgggcgggacatccagcgccaggacctcagtgccattgcccgaaccctgcaggaatggtgtgtgggctgtgaagtcgtgctgtcaggcattgaggagcaggtnagccgtgcaaccaacacaaggagcagcagctgggccttgaacagcagattgagantaagtttncacctttaaaaaaacccct

SEQ ID NO: 136998 - DNA, 496 bp, Homo sapiens
gccacatctcaggaccctgagcaacacctgactgagctgagggaaccagctcctggcaccaaccagcgccagcccagcaagaaagcctcaaagggcaaggggctccgagggagcgccaagatttggtccaagtcgaattgaaagaactgtcgtttcctccctggggatgtggggtcccagctgcctgcctgcctcttaggagtcctcagagagccttctgtgccccttgggtcctgggaatgctgctgcttcaaccccagagcctaagaatggcagccgtttcttaacatgttgagagatgattctttcttggccctggccatctcgggaagcttgatggcaatcctggaagggtttaatctccttttgtgagtttggtggggaagggaagggtatatagattgtattaaaaaaaaaaaggtatatatgcatagtatctatatataatataacgcaaccataaaccaatgagaaatctatcttccacttccctgaa

SEQ ID NO: 136999 - DNA, 510 bp, Homo sapiens
atgcctttgctgtaccacctgtcacgctgtgcctatgtccaacaatgcaattttgctaatcctgttgtatcggctttgtgcacctgtctggtcaagccagtggtggaaaaatgtaccccatatgcagtgttgctggaggctcttgccctgcgtaatgtgcggcagctggaagaccttgtgattgaggctgtgtatgctgacgtgcttcgtggatccatggaccagcgcaaccagcggctcgaggttgactacagcatcgggcgggacatccagcgccaggacctcagtgccattgcccgaaccctgcaggaatggggattcatcagcacttactctcacttcgcagtgccgcaagccaaaggcaacaatgtggttatcacaagctacatgacaaacagaggcttcttcgaggataaaaaggcaacatttgcgccaagcttcttaatgaacatcaaaggcaataaaacatccgttgtcaaaaacagcatcctggagcaaggacagctgaca

SEQ ID NO: 137000 - DNA, 571 bp, Homo sapiens
accatgcttacgccatgcttggcacgagggcagagctgagggagcgtctgcagggtggacaccatgttacacttttttctcctttgcatcctggggcttggggttcggtggggtgcacgtgatggggcttggagttaggcccacgggagggggtgggtgtggcagccttgccaagaggctgactttaggattcctagatcacaattttagaccgctccatgtctgattcctcaccgcagaaccgacttagtgcctttacaatccagtccctcaggcttgggcttcccatccgaccagccatcggggacctctagcttcacatcctctttccttgcagctctggacatcctgagcccaagtcccccacactcaatgcattgatgagtgcggaagtgaaggtgacagggcagaaccaggagcaatttctgctcctagccaagtcggccaagggggcagcgctggccacactcatccatcaggtgctggaggcccctggtgtctacgtgtttggagaactgctggacatgcccaatgttagagagctgaagcccggaatcttcctccactaaca

SEQ ID NO: 137001 - DNA, 2837 bp, Homo sapiens
tttttttttagttgtttttgtttttattaaagtatcatattgaagtagaaagatggttttgagtttgaaaagctccagataaatccttggatttttatgagcctcaatttccttttctgtaaaatgagaaccacatagggttttttcctccccaagaaattaagagtccatgtactgaaagcatcattctacaagtattaatacatatgtagtaatcatggtagagggtgtcctgaagtcacaggggaatatttgtgaggattcaacggaataaaattttaaaagatgtctgaccaatagtaagcactcaatacatgttagctttattctctcttttatttttctcgcttcttttctcctgctcttcaaaaaagtgagtggttgaaccacctaggtgatctctgctgctaaacttctattattgatttttgtttgcttcctctctgccccttgtttcctcatcccgtttttttccctcttcttcactccttccgttacagcttttctcttgcctcaggtacccagtgcagtcctgatctccagctctccagcggcttagaacagacacagaatgggccgggaccagggacccaccagagacgtctgtagttaatagctggcgctcttccactaataaagttttattgaaataaagcatttaaaaaggcgcccgtcattcttcccccagcgaccaatcgaagagtagaatgcctgcgtccctcactggagcttcagcggtcggaacgcgggggtggggcatgtcctgccgaaatttgcgtccttagagcggaagtacggccggaagcccgccatagagtttagtggccagagcgactcttcagggaggtggcaggaaaggcttggaacatgctgccggaggtgacggagcggcgggcccgcccggtgcgctggaggtcgaagcttccaggtagcggcccgcagagcctgacccaggctctggacatcctgagcccaagtcccccacactcagtgcagtgatgagtgcggaagtgaaggtgacagggcggaaccaggagcaatttctgctcctagccaagtcggctcaagggggcagtgctggccacactcatccatcaggtgctggagggcgcctggggtctacgtgtttggagaactgctggacatgcccaatgttagagagctggctgagagtgactttgcctctaccttccggctgctcacagtgtttgcttatgggacatacgctgactacttagctgaagcccggaatcttcctccactaacagaggcttcagaagaataagctttcggacaccttttcagttgttcaccctggctgctaaagtaaagtgtatcccatatgcagtgttgctggaggctcttgcccttgcgtatatgtgcggcagctggaagaccttgtgattgaggctgtgtatgctgacgtgcttcgtggctccctggaccagcgcaacaagcggcttcgaggtttgactacagcatcgggcgggacatccagcgccaggacctcagtgccattgcccgaaccctgcaggaatggtgtgtgggctgtgaggtcgtgctgtcaggcattgaggagcaggtgagccgtgccaaccaacacaaggagcagcagctgtggcctgaagcatcagattgagagtgaggttgccaaccttaaaaaaaccattaaagttacgacggcagcagcaggccgcagccacatctcaagaccctgagcaacacctgactgagctgagggaaccagctcctgggcaccaaccagcgccagcccaggcaagaaagcctcaaagggcaaggggctccgagggagcgccaagatttgggtccaagtcgaattgaaaggacttgtcgtttcctccctggggcatgtggggtcccagctgcctgcctgcctcttaggagtcctcaagagagccttcttgtgccccctggccagttgataatcctaggttcaatgaccctttcacctcccctaaccccaaacatagatcacaccttctctagggaggagtcaaatgtaggtcatgttttttgtttggtactttctgtttttttgtgacttcaatgtgttccattgctccccgcttgccatgcttctctcccttgtttccttaagagctcagcatcttgtccctgtttcattacatgtcatttgagtaggtgggtagccccgatgggggtcgctctgtctgggagcataacccacaggcgtttttttctgccacccgattccgtgccatgcctgaatccccagttcctatacccctaccccctgaccctattgagcagccctctgaaagagccatagggcccccccacctttactcacaccctgaggaattctgggagcccagtctggcccatgccccaggagtcactgggacatgttccatccctagaatccctgtcacacctacagtcatttccttttccctctctctgggcccttggggtcctggggaatgctgctgcttcaacccccagagcctaagaatggcagccgtttcttaaacatgttgaagagaatgaattctttcttgggccctggcaatctcgggaagcttgatggcaacccctggaagggtttaatctccttttgtgagtttggtggggaagggaagggtatatagattgtattaaaaaaaaaaaaggtatatatcgcatatatctatatataatatgaaagcagaaataaatctatgagaaatctaaaaaaaaaaaaaaagggggggcccttttaaagaacccagttttatgtccgcgggctgggaaggtaaaattttttttttggggccccctaaattaaatcccggggcgggggtttaacacggggg

SEQ ID NO: 137002 - DNA, 1319 bp, Homo sapiens
atgaagccgtccgttatcctctacaaagccttacctgatgatttactgcaacgcctgcaagagcatttcaccgttcaccaggtggcaaacctcagcccacaaaccgtcgaacaaaatgcagcaatttttgccgaagctgaaggtttactgggttcaaacgagaatgtaaatgccgcattgctggaaaaaatgccgaaactgcgtgccacatcaacgatctccgtcggctatgacaattttgatgtcgatgcgcttaccgcccgaaaaattctgctgatgcacacgccaaccgtattaacagaaaccgtcgccgatacgctgatggcgctggtgttgtctaccgctcgtcgggttgtggaggtagcagaacgggtaaaagcaggcgaatggaccgcgagcataggcccggactggtacggcactgacgttcaccataaaacactgggcattgtcgggatgggacggatcggcatggcgctggcacaacgtgcgcactttggcttcaacatgcccatcctctataacgcgcgccgccaccataaagaagcagaagaacgcttcaacgcccgctactgcgatttggatactctgttacaagagtcagatttcgtttgcctgatcctgccgttaactgatgagacgcatcatctgtttggcgcagaacaattcgcggaccgagtcttggtctgtctccaggctggaacacgcgtgtgtcgttgtgcgctttttttgggtgaaaggagtaagaaaatggcgacaggaaagtcctgctctcgctggtttgcgcctcttgcggcgttattaatggtagttagcctgagtgggtgttttgataaagaaggcgatcagcgtaaagcgtttatcgacttcctgcagaatacagtgatgcgtagcggtgaacgtctaccaaccctgactgccgatcagaaaaaacagtttggtccttttgtctctgattacgcgattctgtatggttattctcagcaggtgaatcaggcgatggattccggtctgcgcccggttgtagacagcgttaacgcaattcgcgtaccgcaggattacgttacgcaaagcggtccgctgcgtgaaatgaacggttcgctgggtgtgctggcgcaacaactgcaaaatgcgaagttgcaggccgatgctgcgcactctgcgctaaaacagagcgatgatttgaaaccggtctttgatcaggcattcaccaaagtggtaacgacgccagctgatgcattgcaaacgttgattccgggcgggccaaattttccgccacacttttggtggctggcgctcctttgtctgccagggctcgg

SEQ ID NO: 137003 - DNA, 1728 bp, Homo sapiens
atgggggagagggattgtgctgttgtggaagaaataagcattgggggcaggctcctggcaaagcctgtccgtaagcagggaccgcaggagaccagccatcatggtggaggagaccacatgagtgatcttctgaccgctggaacggacaccctttgcttggatttccatagtgatccattgtctgctataaatgcctgcttcgaaggtgacactgttattgtttgtcctggccattatgtggtacatggcactttctccattgctgactccattgagttggaaagacccccatctactgggcccggcgagcaaagggtgagtcaggaccgctgtgggggaaggccaagccctacggatggtttgaagagctgggggcggagccccttggagattcacaggaaccttcgccacagtggccccggagacagcggctgatttatctttgcatcgacatctgctttccaggacaacatctgcctgggggactgcgtgtataaccgtcccgattgagcccccgacctggcccacctgggccgtgccaattcaatggggtggtagtgcaacctgcatccaggaagacaaattacggcaggggattctgtatggttattctcagcaggtgaatcaggcgatggattccggtctgcgccccggttgtagacagcgttaacgcaattcgcgtaccgcaggattacgttacgcaaagcgtcccgctgcgtgaaatgaacggttcgctgggtgtgctggcgcaacaactgcaaaatgcgaagttgcaggccgatgctgcgcactctgcgctaaaacagagcgatgatttgaaaccggtctttgatcaggcattcaccaaagtggtaacgacgccagctgatgcattgcaaccgttgattccggcggcacaaactttcacgcaacaactggtgatggttggagactacattgctcagcaaggtactcaggaatgtggaaagacttttagtcgagcctcgtaccttgtacaacatagcagaatccatattggtaagaagccctatgagtgtaaggagtgtggcaaggccttcagttctggctcataccttgttcagcatcaaagaattcatactggggagaaaccctatgaatgtaacaaatgtgggaaagcctttactgtttatggacaacttattggacatcagagtgttcacactggtgagaaaccttttgaatgtaaggaatgcgggaaggcctttagacttaattcattccttactgaacatcagcgggtacacactggtgagaaaccctttaaatgcaaaaaatgtgggaagacctttagatacagttcagccccttaaagtgcacctgagaaaacatatgcagtgttatacccctaagagtcctgaggagtgtgggaagtgccttcgtgtgtggctcaaacattgttgaacatcggggaatttatgctggtaggaaactttcaaatgtgaagaatattggcaggtctattctcatcttataattcataatataactcagaaaacataagaatattcctttgtcatttataggtttgtaataccaatatttatactggtgggccattcagaaaaagtgggaaacattattacttaatggttacagcactgacagcatgaacttttatatgatgcattttttttaatgtgattgtatgaccaagtgaataaaaacccttggccctcctaaaaaaaaaaaaaaaaaaaaaagaaaaaa

SEQ ID NO: 137004 - DNA, 657 bp, Homo sapiens
cggaggaggccaaggtgcaacttccttcggtcgtcccgaatccgggttcatccgacaccagccgcctccaccatgccgccgaagttcgaccccaacgagatcaaagttgtataccttgaggtgcacccgagtaaaggtcggtgcccacttctgcccctggcccccaagatcggccccctgggtctgtctccaaaaaaagttggtgatgacattgcaaaggcaaccggggtgacttgaaagggcctgaggattacagtgaaactgcccattcagaacaaacaggcccaaattgaggtggtgccttttgcctttgccctgatcatcaaagccctcaaggaacccccaagagacagaaagaaacagaaaaacctttaacccagtgggaatatcccttttgatgaaattgtcaacattggtcgacaaatgcggccccgatcccttaccagaggaactctttggaaccattaaaaagatcctggggactgcccagtcagtgggctgtaatgttgatggcccccatcctcatgacatcatcgatgacatcaacagtggtgctgtggaatgcccacccagttaagcccaaaggaaaacatttcaataaaggatcatttgacaactggtggaaaaaaaaaaaaaaaaaaaaaaaaaaaaaaaaaa

SEQ ID NO: 137005 - DNA, 1102 bp, Homo sapiens
  misc_feature (1)...(1102): n = a,t,c or g
ttttttccaaaaaccaaaagagggtatttatagccccccataagagnnnnnnnnnntttttcccctccgcgggagattggggcccccccagggaattattaaaaagggcccccccttaaaatataattttttattttannnnnnnnnnattatatttaaaaattttatttttttgtcaaatgatccctttattgaaaatgttttccttttgtgcttaactggcgtgggcatttccacagcacccactgttgaatgtcatcgatgaatgtcatgaggaatggcggcccatcaaacattaccagcccaactgacttgggcagtcccccaggaatctctttaagtggggttccaagagagtttctctgggctaagggatcggtgcccgcatctgtcgaagcaatgttgaacaaatctcattcaaaaaagtgaatattcccaactggtgtttaaatgttttttcctgtttcctttcctgtcctcttgggtggttcccttaagggcctttgaatgaatcaggggcagaaggcagaaaggcaaccacctcaaatctggggcctgtcctgttcttgaatggggtcagtttcacttggtaatcctcaaggccctttccagttcacccggttgcctttggcaaatgtcattcacccaacttttttttgggagacaggacccaggggggccgattctttgggggccaagggcagaaagtggcaaccgactttcacctcccggtgcaacctcaaggtatacctagggcgtgcgggctcccaagccgccacaggtggtccaagtccttccctcccaaacctacacgtgaagaagctaaggcccagaaaggctgaggcttggccggggcggcgcaacaccgggaaggtctctgggaggcagcggctttaagagccccatacggggaaagctttgcacgcgcggcagggccgagggatgctccatcccgcagccccggccacaaccagagcacgcaccgactttgatctcgttggggtcgaacttcggcggcatggtggaggagagctggtgtcggatgaacccggattcgggacgaccgaaggaagttgcaccttggcctcctccgagcacgaaa

SEQ ID NO: 137006 - DNA, 607 bp, Homo sapiens
atgggcccacattggaaagacttcaaggaaattgatgtgaaaaagtacattgacgctctcagcatccacacatacacacacacgcacacgcacacgcacgctgacatcacagatggagaccatgggggtggggctcttctggagctggagattaactcacacctcaaggttcagttcagggagctgaatattacagcagccaaggaaactgaagatggtggtggtgggaaagctatcataatttttgttccctttcctcaactgaaatctttccagaaaatccaagtctggctaaggagaattctgcctaagccaacccgaaaaagctgtacatcagaatatgcattggcctccaaggagccgtaccctgaaagccatgcgtgactcaatccccgaggacttggtcttcgccaagtgaaattatgtgcatgcgaatccacgtgaaactggatggcagccgtctcataaaggctcatttggacaaagcgcagcaataccatgtggaacgcaacgctgaaactttttctggtgtctacatgaagctcacaggcaaggatataaatgttgaattcccagagtttcaactctaaactgaaatgactaatta

SEQ ID NO: 137007 - DNA, 508 bp, Homo sapiens
cgcccccccctttgaattgccccgcgctgcaggaattcggcacgagggcaagttctcccaggagaaagccatgttcagttcgagcgccaagatcgtgaagcccaatggcgagaagccggacgagttcgagtccggcatctcccaggctcttctggagctggagatgaactcggacctcaaggctcagctcagggagctgaatattacggcagctaaggaaattgaagttggtggtggtcggaaagctatcataatctttgttcccgttcctcaactgaaatctttccagaaaatccaagtccggctagtacgcgaattggagaaaaagttcagcgggaagcatgtcgtctttatcgctcacaggagaattctgcctaagccaactcgaaaaagccgcacaaaaaataagcaaaagccgtcccaggagccgtactctgacagctgtgcacgatgccatccctgaggacttggtcttcccaagcgaaattgtgggcaagagaaatcgcgt

SEQ ID NO: 137008 - DNA, 416 bp, Homo sapiens
  misc_feature (1)...(416): n = a,t,c or g
cctgagagagacctgaggaggggacagagcccagcccctctcctgtggctgagcaggcctctgtgtccatgacacctgtcttccgggcctgggggctgtgggtgtatgtcctccntactggcttccccggcccctgctgcatgatgctcttggaactcttctccaaggagtcagtcccccaggcctatcaggggatccttttgtatctgcactttgggttttagtttcaaagctccactagctcagcactgcatttcccgagatgattcccaagacagctggtgcctcctggctttcctgtgccaggccaaggggcaccacagaggaccctggatcctttgcctcttcttggttgaaggatctctatgtatgtgtgtatataaatatagtttttnatctaaaaaaaaaaaaaaaaa

SEQ ID NO: 137009 - DNA, 755 bp, Homo sapiens; identical to SEQ ID NO: 130526

SEQ ID NO: 137010 - DNA, 732 bp, Homo sapiens
ctagaggaagcagagcactttgccatgatggtgatcagcctcggagaggaagccggggagttcctccccaagggctacctggctctgggtctcacctatagcctgcaggccaccgacgccaccctgaagtccaagcaagatgaattgcaccggaaggcactgcagacgctggagagggctcagcagctggcgcccagtgacccccaggtcatcctctatgtctcgctgcagctggccctcgtccgacagacctggtcacagcctttctacagggtgcagaacctcaagctaagggcactgctcagtgaagcagcagtgtgtgggggagaggattccctgcatcctggggaatcaggccagatctccagtgccatggagcagctgcaggaggccctgaaggtacgcaaggatgatgcccacgccctccacctgctggcactgctcttctctgcccagaagcaccaccagcatgccctggatgttgtcaacatggccatcaccgagcaccctgagaacttcaaacgacagcacatagttctgcttgtggcctttgccagcgtgccgagcactgctgttgatggcttccttctccccaaagctaaagaaaggcttgcaaggagcttcctggagagcagtgtctgcaggcaggaacctctgccgtgggaacaactcacccatgcagacatcgcagagcgactgcaagggcttcaggagctgtggaggggagggtaa

SEQ ID NO: 137011 - DNA, 1161 bp, Homo sapiens
atggagagtttcaggaacgccctgcagcttcacttccttggagctgcttggatcctgggaatacccacagtgttccaggccttggatcctggagtgaaagatcagaccagagtgactggtggagcacttgccccagcccagaaaggatgtggtcgggttgagaaaatccgctctgggccactcatgctaatggaatgtcagcagctgcaaagcctgatgttcaccaaggtgaagctggagcaggtgctgaaaggcccagaggaagccctcgtgacctgcagacaagtgctgaggctgtggcagaccctgtacagcttctcccagctgggtgatgttggtgacttcagctctgtctttgggcctgaacccacagccccagagcctgcctggagctcccggcgggcttcgtccatcgccgcctcccggctggaggaggccatgtcagagctgactatgccctcttcggtcctgaagcagggccccatgcagctgtggaccacgctggaacagatctggctgcaggctgggggggagttggagaagaaaccgaaagttgatgatctcttactgggacatggggatttgcctccttccaattccagtccagtgcgagaagctgatgaatggtacccacttgagagacggctgcagggcaatgcctcttgggcagcggctgagctgttcatggagcagcagcacctcaaggaagcaggtttctgcatccaggaggcggcgggcctcttccccacttctcactcagtactctatatgcggggccggctggctgaggtgaagggcaacctggaggaggccaagcagctgtacaaggaggcgctcacggtgaacccagatggcgtgcgcatcatgcatagcctgttgccttcagctcaaaacaatccttacgcccaagtgacatattttggggtggcatgttctgctatccttcagcagcccctgaagaaggtcctagccctggccacagagccacccactctccctgccctcagcttggctaaggagagtgtggacactttggtgcagcttgtctgcactgcaagagacaacttggacaccctcaagcatgagtggacaagcgaggttctcacccatgaagatgatgcaatggcaattgcccaaaggcttattactacagagttttaa

SEQ ID NO: 137012 - DNA, 4551 bp, Homo sapiens
  misc_feature (1)...(4551): n = a,t,c or g
atggcccatcttcggtcatgctgcagttccctctatcaacctggacaccttctacctcctcacaaccccattcaggaccaccctcttacagcaccatccctaactcatctcaccaggagagcctattttacagatgagaagactaagggaggccagtcagcctacgctgtgtccctgctgcgggagtgtgtgaagttgcggccctcggaccccaccgtgcccctgatggccgcgaaggtctgcatcgggtcccttcgctggatggcggccaagcacctggcgggggtcctgctgcactccctgagtgaggagtgctactggagccccctgtcccaccctctgcctgagttcatgggcaaggaggagagttctttcgccactcaggccctgcggaaacctcacctctatgaaggagacaacctctactgccccaaggacaacatcgaggaagccctcctgctcctcctcatcagcgaatccatgctggcgaacaagttgctgctgttagaaatggaaagggtacagagccctggtgttgagagtggggtggataggcagctgagtccctatagtgacacaaatgtaaatgctcaaaatgcccaaatcgtgccagtagcggccaagtctgcacagaatgaagtcccaggatacccagaagagacagaaaaaagtcgggtacagtccaacttgctcacccagtttcaagacctccgcctcctcctggctgcaccagagtgtctgccccctcggatgagcccaccttcggcccatggggagggcctggagtcagggggcccgagcaggacaggcctctctctggaacgcctacccaactccatcgcctcccgcttccgcctgacagagagggaggaggaagtgatcacctgttttgagagggcctcctggatcgctcaggtgttcctgcaggaattggagaagaccacaaataacagcacgtcgaggcatctgaaaggctgtcacccgcttgactatgagctcacctacttcctggaagctgccctccagagcgcctatgtgaaaaacctgaagaaggggaacatcgtgaagggcatgagagagctccgggaagtgctgcggactgtggagaccaaagcaactcagaacttcaaagtgatggcggccaagcacctggcgggggtcctgctgcactccctgagtgaggagtgctactggagccccctgtcccaccctctgcctgagttcatgggcaaggaggagagttctttcgccactcaggccctgcggaaacctcacctctatgaaggagacaacctctactgccccaaggacaacatcgaggaagccctcctgctcctcctcatcagcgaatccatggcaactcgagatgtggtgctgagccgggtgccggagcaggaggaggaccggacagtgagcttgcagaatgccgcagccatctatgacctcctgagcatcacgttgggcagaaggggacagtacgtcatgctctcggagtgcctggagcgagccatgaagtttgcgtttggagaatttcacctttggtaccaggtggccctctccatggtggcttgtgggaagtcagcctacgctgtgtccctgctgcgggagtgtgtgaagttgcggccctcggaccccaccgtgcccctgatggccgcgaaggtctgcatcgggtcccttcgctggctagaggaagcagagcactttgccatgatggtgatcagcctcggagaggaagccggggagttcctccccaagggctacctggctctgggtctcacctatagcctgcaggccaccgacgccaccctgaagtccaagcaagatgaattgcaccggaaggcactgcagacgctggagagggctcagcagctggcgcccagtgacccccaggtcatcctctatgtctcgctgcagctggccctcgtccgacagatctccagtgccatggagcagctgcaggaggccctgaaggtacgcaaggatgatgcccacgccctccacctgctggcactgctcttctctgcccagaagcaccaccagcatgccctggatgttgtcaacatggccatcaccgagcaccctgagaacttcaacctgatcttcaccaaggtgaagctggagcaggtgctgaaaggcccagaggaagccctcgtgacctgcagacaagtgctgaggctgtggcagaccctgtacagcttctcccagctgggaggcctagaaaaggatggcagcttcggtgagggcctcaccatgaagaagcagagtggcatgcacctgactttgcctgatgcccatgatgcagactctggctcccggcgggcttcgtccatcgccgcctcccggctggaggaggccatgtcagagctgactatgccctcttcggtcctgaagcagggccccatgcagctgtggaccacgctggaacagatctggctgcaggctgctgagctgttcatggagcagcagcacctcaaggaagcaggtttctgcatccaggaggcggcgggcctcttccccacttctcactcagtactctatatgcggggccggctggctgaggtgaagggcaacctggaggaggccaagcagctgtacaaggaggcgctcacggtgaacccagatggcgtgcgcatcatgcatagcctgggtctgatgctgagtcggctgggccacaagagcttggcccagaaggtgcttcgtgatgccgtggagaggcagagtacgtgccacgaggcgtggcagggcctgggcgaggtgctgcaggcccagggccagaacgaggctgccgttgactgcttcctcaccgcccttgagctggaggccagcagccctgttctggcccttttccatcatccccagagagctctgacgacgctgcagccgcagggagggaggggctggccagagggagaggcagcagggaacgtgggtcagggtggggcaacagtggcatcaggtgcggggcctcagggaaatacatctttagtgaacgcctctgcagctgcagccctcgttctcttggctgggccaagagggccttcctggatttctttgttggtgccttgggaaacagtctgacttgaaccctaagtgcctttggagagttttgtggtgaccagacttgctccccaagagctgggcagcggggagcctcacagctgtccttcaccctcacccatgcctctggcttggggtctgggtggggggttctcactccccactctcagcacagtacatgacttctggatatctctcaggtcttgcccagggcggtcacaatgtgaagaaactgcgggcaagtgggaagactatgagatttctgggttcccttctcagacttggagttagtagatgattcctgcattgcccctgcttgccctctgagaccagctgggccccaccttgctctttccccctgctaccaagtgcctttggggcctctggggtctgaccaggggtactaaataaaccggccctaacacttccatctcctacccaccccatctccctggcgatgtgctccagcccaagcagcctccgtaggctttagatcctgtggttgccagatccagtcctttctaataccctgagtcaacacattactcctgcaggtcttaggctacaatgcaggtcccttgagggccaccaacatggaggtaggcagtttctaggactgtccccagtacatctcaccacccacagccctttttttgccttgattcgagcctcaccctggccttttggcttcccctgcctgagagagacctgaaggaggggacagagcccagcccctctcctgtggctgagcaggcctctgtgtccaatgnacacctgtccttccgggccctgggggctgtgggtgtatgtcctccctactggcttccccggcccctgctgcatgaatgctctttggaactcttccccaagtgagtcagtcccccaggcctatcaggggatccttttgtatctgcactttgggttttagtttcaaagctccatcaggtacagcttgcatttcaagaatggggggaaagctcggttaaaggctgccctggttcatcatagctccaaccttcctcggaaggagtgggctgttggagaccccccatccatggcacactagctcagcactgcatttcccgagatgattcccaagacagctggtgcctcctgggttttcctgtgcccaggccaaggggcacccacagaggaccctgggatccttttgcctcttcttgggttgaaggatctctatgtattgtgtgtatataaatatagttttttatctatatatataaaatagagatctattttttttctggaattctgttagaaaagtaaagaaaaagccaaatgctgttggtttagtctcagggtgcccaaagtggttatagtcaatttttggtactaggaaaggtacccaatgcatttcctgacttttaagcatttccttgttggaagcagcagagggccaggccaagttgctgacagtgactttgcaggttgaataaagaaacccttggaggggaagcaggcttgtttgaaaaaaaa

SEQ ID NO: 137013 - DNA, 606 bp, Homo sapiens
  misc_feature (1)...(606): n = a,t,c or g
tttttacatttcctgttttcattttattgggaacttcaaagaaaagaaagagagacggattggttcccaagacaagccgtgacgtagactcccaacaagctggggaattctggacagcgaaggggtggacagtgagactcagcacagcccaaagtcaaaggcattagggttgttctgaaaatagagattcaagaagccctggaaaatgctcttatccatgagaagagcacagactgtggggtcccacttcatggctgatatccagagccgcagggctggcgtgtggctcacacagtccagtatcccatacacatccagccgctcaaaccagggccagaggaggtaatcaatcatggatatacaggttccaccaaagaaggtggtgttctgatactcaagaatcttacaaaatagctccaataacatcttttggcgagctcgttcataagggtcatatggaaacagcttccttcctggataagcatcatccaggtactcacaagcaataacagattcatagatcagttgacattggctggtctccaggacaggaatgtggccaaaagggtgctttgtatagtaccattcangcttgtttctcaggtt

SEQ ID NO: 137014 - DNA, 973 bp, Homo sapiens
cccacgcgtccgcccacgcgtccggggcaagtgagcgagctccttcctcaccgggctgactagcctctcctttccctgtccccctccatcgctgctctgcaggaagccagcccccagggccagtcccggaggggctgatccgcatctacagcatgaggttctgcccctattctcacaggacccgcctcgtcctcaaggccaaagacatcagacatgaagtggtcaacattaacctgagaaacaagcctgaatggtactatacaaagcacccttttgggccacatccctgtcttgaagacaagcaaatgtcaactgatctatgaatctgtaattgcttgtgagtacctggatgatgcttatcccaggaaggaagctgttcccatatgacccttatgaacgagttcgccaaaagatgttattggagctatttggtaaggtcccacatttgcccaaggaattccctggtagcgttgaagatgtgggagagaatgcacctaatctgaaggcagccctgcgtccaggaattcagcaacctggaagagattcttgagtatcagaacaccaccttctttgggtggaacctgtatatccatgattgattacctccctctgggccctggtttgagcgggctggatgtgtatgggatactggaactgtgtgagccacacgcacagccctgcggctctggatatcagccatgaagtgggatcccacagtctgtggctcttctcatggataaggagcattttccagggcttcttgaatccctattttcagaacaaccctaatgcctttgactttgggctgtgctgagtctcactgtccaccccttcgctgtccagaattccccagcttgttgggagtctacgtcacggcttgtcttgggaaccaatccgtctctctttcttttctttgaagttcccaataaaatgaaaacaggaaatgtaaaaaaaaaaaaaaaaaaaaaagggc

SEQ ID NO: 137015 - DNA, 313 bp, Homo sapiens
catcctgctggatttcaagccttgggacgatgagactgacatggcccagctggaggcctgtgtgtgctccatccagctggaagagctggtctagggggcctccaagctggtgcccatgggctacggtatccggaagctacagattcagtgtgtggtggaggacgacaaggtggggacagacttgctggaggagatcaccaagtttgaggagcacgtgcagagtgtcgatatcgcagctttcaacaagatctgaatcctgagtgtgtgtgtgtgcgcccgtgaatccctgccaggattaaagactgagaccggc

SEQ ID NO: 137016 - DNA, 1074 bp, Homo sapiens
atgaaacacagctgccatttgtgtcgtgtgcctgacgctgccttcatggtcctctcctcagaagctgatttcaccttctaccgtcttacagacccaggcacaggggcacttgcagaagtaaagctcttccacatgagagagaagggcctaagtgaaccctctctgcagggaagcagatctgaaaatcgggcacagactgctaacgtagaggagcttcaccccattgccaccaccaccccaggccacaaggagtactgccagactatctccaatattcccttaaaacccaagggctctaagtcagcttgtggtgaatgctgccttgcctgggacttatccttcagggcagtgagcacctctgtggcccagggcagaaaggaaattctacaagcagatgaatgggcctgtggccagcgcctcccgccagagctcggccccagggaagaccacagcgagctcgtcctccagatcgccagcctggaagtggagaaccagagcctgcgcggcgtggtgcaggagctgcagcaggcggtctccaacctggaggcctggctgaacatgccggagaagagagaagagctcgcctggccatggtccacagtcccgcagacacagcacgtgtctcccatgcgccaagtggagcgcccctcccctcgccccccttactacgaccccggccaagaagcagaggataacgaggacgatgacattgatctcgacaataaggaggaagacaaggaggcaaggcggctgcgggaggagcggctgcggctgtacgccaagaaggccaagaatccctcgctggtggccaagtcctccatcctgctggacatcaagccttgggacaataagacggacatgacccagctggaggcatgtgtgcgctctatccagctggatgggctagtgagcggggcctccaagctggcgtccgtgggctatggtatccggaagatgcagattcagtgtgtggtggaggacgacaaagtggggacagacttgctggaggaggagatcaccaagtttgaggagcatgtgcagagtgtcgacatcgcagctttgaacaagatctga

SEQ ID NO: 137017 - DNA, 598 bp, Homo sapiens
tcccatgggcaaatgaggccccagccaagaaacagccacaccagcagagggaatgcgagggatgatgacattgacctgttttggcagtgacaatgaggagggaggacaagcaggcgggccacagctgcggggaggagcggcctacggtcattacgcgggagaagaaggcccaagaaagcctgcacttggtggcccaagtccctcccatccttgctggatgtcaaagccttgggatgatgacgacggaccatggcccagcttggaggcctgtgtgcgcttctatccagctggacgggctggtctgggggggctttccaagcttggtgcccgtgggctaacggtatccggaaagctacaagattcagtgtgtggttggaggacgacaaggtggggacagactttccttggaggagggagatcacccaagtttgaggaagcacgtgcaagaagtgtcgatatcgcaagcttttcaacaagatcctgaagccttgaagtgtgtgtacgttgcgcacgtgcgtgaaggcccgtgcacacgatctaaagacttgagaccggcaaaaaaaaaaaaagtcgagcggccgcgaatttagtagtagta

SEQ ID NO: 137018 - DNA, 2838 bp, Homo sapiens; identical to SEQ ID NO: 133982

SEQ ID NO: 137019 - DNA, 1760 bp, Homo sapiens
tttcttcgctgcctacggaggtggcagccatctccttctcggtaagtgttaatccgtggcaatccgcattcctgcgggattcatctggccccgtcgcccagtggtgcggaggcctccccttcagcgcggtagtgtctgtgggtattgttattgtcagcttactggagcgtgtacaggaacagaacgaagccgccgagttgatagggctttgcgtcccagagcctcctgccctccgcctgtattcagagctgcgggctgcttgtttgttccttggcggtggagggtgctagttgaggccagacttcggggtcttctggtggccgtgggacgaccatgtgtggtccaccttgacagctttcagctgggatctgtggatcccagcgctcaccaatgtcggcccacgtgtattcgttcatgccatggccggcttcttccgctgcagtctctggcccgagggctgctgctgcgggaccgccaaggaaagacgagctgtaggtcggctggtccagctgcaggcagaaattctggtagtatctctgggaatatgaagatgcaactgcccccaccttgccttcgaggatatcatgggccagaaggcagagtcgttttgaatacgtggttcattgagtacccactctgggccagttgatggctgcgaagagagcagaaggggtgctgcttgaagaaatcaatggctcggaagaccacactgaggaaggtgtgagttgatactggaagatctccagggttgaggcatcttcagaggcatcatggcccgcccttcagacccccttgtgaagccccaaagatcgttcaaaaaggagaacccaagaagcttcatcccggcacccagtcagaccgaatatgtcaaaatttaagcgttaactgggcggaaaaccccagagggcatttgaccaaccagggtttcgtagaagattccaagggccaagaatcttgatgcccaaccattggtttatggaagcccacaaacacacaacagcacactgcctgcccaagtggcttccgggaagttccctgggtccacaaacgtgcaagggagctgggaagtgcttgcttgatgttgcaacaaacaaattctttacttgttgccgagattcgcttcacaatgttttccttcccaaggaaccggcaaagcccatccgtgggaaagaagcttgcccaacttggccattcaggagttcaccaaccccaattgccagggttgcgcagttgaaagaaaattgagttagggcagcttcatgtgcagtatttacatttatttaaacagaaaaacgggcccatgggagctgcctactcatttttcttcactgcgcacgctgggcattggggttggtgactctgatggccagttgggcagctctttccacgatggctttgcggttcttggaggaaacattgtgagcgatctcggcacagtaagatctgcaagagaatcaagtagggtaagggagcaaggacagcccttcaacacacttgggaaaattccattgggagagggcaatgaggtccaccaccaacctaaaagagggctgcttggttaaatggctgtggaatgacacctacatgcccccaaatcctgactatgggttccctgggtgggtgacaagaatgctttcattaaaaagtaccctcattgtcccctctcatccttatagcagccttgtaatccaggggattacctccatttttacagataaaggaaacccaaggcccacagcaagcaatggacagggatccgg

SEQ ID NO: 137020 - DNA, 492 bp, Homo sapiens
atgtgttctcaaagtggaggtcacttggcaagcgttcacaaccaaaatggccagctctttctggaagatattgtaaaacgtgatggatttccactatgggttgggctctcaagtcatgatggaagtgaatcaagttttgaatggtctgatggtagtacatttgactatatcccatggaaaggccaaacatctcctggaaattgtgttctcttggatccaaaaggaacttggaaacatgaaaaatgcaactctgttaaggatggtgctatttgttataaacctacaaaatataaccacattttaatatcagcattggtgattgctagcacggtaattttgacagttttgggagcaatcatttggttcctgtacaaaaaacattctgattctcgtttcaccacagttttttcaaccgcaccccaatcaccttataatgaagactgtgttttggtagttggagaagaaaatgaatatcctgttcaatttgactaa

SEQ ID NO: 137021 - DNA, 621 bp, Homo sapiens
atgagatgggtggtcaggaccttggcagggtgtaaaggcagacgttcacagacctctagcacacaacagaatctagtgaatgaagaagcttctctccccaacaagtgtgaaaacagtgatgatgaactcaactttggttggtcagatgggaaacgtcttcattttagtcgctgggctgaaactaatgggcaactcgaagactgtgtagtattagacactgatggattctggaaaacagttgattgcaatgacaatcaaccaggtgctatttgctactattcaggaaatccaaaatcacatattctgagtattcgagatgaaaaggagaataactttgttcttgagcaactgctgtacttcaattatatggcttcatgggtcatgttaggaataacttatagaagctttacagaaagcatggctgggcagcctcaggaaacttacaatcatgtcagaggcgaatgggaaacaagcaggttttactatggtggagcaggagagagagtgaaggaggaggtgctacacacttttgaacaaccagaactcattagaactcactcactatcacgagaacagcaagggggaaaatcacctcccaccaggcccctcctccaagactga

SEQ ID NO: 137022 - DNA, 5228 bp, Homo sapiens
tttcgtggagccgcgtgcgcccgaggacccggccggaaggcttgcgccagctcaagatgaggacaggctgggcgacccctcgccgcccggcggggctcctcatgctgctcttctggttcttcgatctcgcggagccctctggccgcgcagttaatgagccccttgaccatcttccatggaaatacgggcaagtgcatcaagccggggtatggttggatagtagcagaccactgtgatgaaactgaggacaagttatggaagtgggtgccccagcatcggctctttcatttgcactcccaaaagtgccttggcctcgatattaccaaatcggtaaatgagctgagaatgttcagctgtgactccagtgccatgctgtggtggaaatgtgagcaccactctctgtacggagctgcccggtaccggctggctctgaaggatggacatggcacagcaatctcaaatgcatctgatgtctggaagaaaggaggctcagaggaaagcctttgtgaccagccttatcatgagatctataccagagatgggaactcttatgggagaccttgtgaatttccattcttaattgatgggacctggcatcatgattgcattcttgatgaagatcataacgggccatggtgtgccaccaccttaaattatgaatatgaccgaaagtggggcatctgcttaaagcctgaaaacggatgtgaagataattgggaaaagaacgagcagtttggacgatgctaccaatttaatactcagacggctctttctttggaagaagcctatgtttcatgtcagaatcaaggagctgatttactgagcaatcaacagtgctggtgaattaacttactttaagaaacaagaaaggacttgctaagattttctggattggtttaaatcagctatactctgctagaggctgggaatggtcagaccacaaaccattaaactttctcaactgggatccagacaggcccagtgcacctactataggtggctccagctgtgcaagaatggatgctgagtctggtctgtggcagagcttttcctgtgaagctcaactgccctatgtctgcaggaaaccattaaataatacagtggagttaacagatgtctggacatactcagatacccgctgtgatgcaggctggctgccaaataatggattttgctatctgctggtaaatgaaagtaattcctgggataaggcacatgcgaaatgcaaagccttcagtagtgacctaatcagcattcattctctagcagatgtggaggtggttgtcacaaaactccataatgaggatatcaaagaagaagtgtggataggccttaagaacataaacataccaactttatttcagtggtcagatggtactgaagttactctaacatattgggatgagaatgagccaaatgttccctacaataagacgcccaactgtgtttcctacttaggagagctaggtcagtggaaagtccaatcatgtgaggagaaactaaaatatgtatgcaagagaaagggagaaaaactgaatgacgcaagttctgataagatgtgtcctccagatgagggctggaagagacatggagaaacctgttacaagatttatgaggatgaggtcccttttggaacaaactgcaatctgactatcactagcagatttgagcaagaatacctaaatgatttgatgaaaaagtatgataaatctctaagaaaatacttctggactggcctgagagatgtagattcttgtggagagtataactgggcaactgttggtggaagaaggcgggctgtaaccttttccaactggaattttcttgagccagcttccccgggcggctgcgtggctatgtctactggaaagtctgttggaaagtgggaggtgaaggactgcagaagcttcaaagcactttcaatttgcaagaaaatgagtggaccccttgggcctgaagaagcatcccctaagcctgatgacccctgtcctgaaggctggcagagtttccccgcaagtctttcttgttataaggtattccatgcagaaagaattgtaagaaagaggaactgggaagaagctgaacgattctgccaagcccttggagcacacctttctagcttcagccatgtggatgaaataaaggaatttcttcactttttaacggaccagttcagtggccagcattggctgtggattggtttgaataaaaggagcccagatttacaaggatcctggcaatggagtgatcgtacaccagtgtctactattatcatgccaaatgagtttcagcaggattatgacatcagagactgtgctgctgtcaaggtatttcataggccatggcgaagaggctggcatttctatgatgatagagaatttatttatttgaggccttttgcttgtgatacaaaacttgaatgggtgtgccaaattccaaaaggccgtactccaaaaacaccagactggtacaatccagaccgtgctggaattcatggacctccacttataattgaaggaagtgaatattggtttgttgctgatcttcacctaaactatgaagaagccgtcctgtactgtgccagcaatcacagctttcttgcgactataacatcttttgtgggactaaaagccatcaaaaacaaaatagcaaatatatctggtgatggacagaagtggtggataagaattagcgagtggccaatagatgatcattttacatactcacgatatccatggcaccgctttcctgtgacatttggagaggaatgcttgtacatgtctgccaagacttggcttatcgacttaggtaaaccaacagactgtagtaccaagttgcccttcatctgtgaaaaatataatgtttcttcgttagagaaatacagcccagattctgcagctaaagtgcaatgttctgagcaatggattccttttcagaataagtgttttctaaagatcaaacccgtgtctctcacattttctcaagcaagcgatacctgtcactcctatggtggcacccttccttcagtgttgagccagattgaacaagactttattacatccttgcttccggatatggaagctactttatggattggtttgcgctggactgcctatgaaaagataaacaaatggacagataacagagagctgacgtacagtaactttcacccattattggttagtgggaggctgagaataccagaaaatttttttgaggaagagtctcgctaccactgtgccctaatactcaacctccaaaaatcaccgtttactgggacgtggaattttacatcctgcagtgaacgccactttgtgtctctctgtcagaaatattcagaagttaaaagcagacagacgttgcagaatgcttcagaaactgtaaagtatctaaataatctgtacaaaataatcccaaagactctgacttggcacagtgctaaaagggagtgtctgaaaagtaacatgcagctggtgagcatcacggacccttaccagcaggcattcctcagtgtgcaggcgctccttcacaactcttccttatggatcggactcttcagtcaagatgatgaactcaactttggttggtcagatgggaaacgtcttcattttagtcgctgggctgaaactaatgggcaactcgaagactgtgtagtattagacactgatggattctggaaaacagttgattgcaatgacaatcaaccaggtgctatttgctactattcaggaaatgagactgaaaaagaggtcaaaccagttgacagtgttaaatgtccatctcctgttctaaatactccgtggataccatttcagaactgttgctacaatttcataataacaaagaataggcatatggcaacaacacaggatgaagttcatactaaatgccagaaactgaatccaaaatcacatattctgagtattcgagatgaaaaggagaataactttgttcttgagcaactgctgtacttcaattatatggcttcatgggtcatgttaggaataacttatagaaataattctcttatgtggtttgataagaccccactgtcatatacacattggagagcaggaagaccaactataaaaaatgagaagtttttggctggtttaagtactgacggcttctgggatattcaaacctttaaagttattgaagaagcagtttattttcaccagcacagcattcttgcttgtaaaattgaaatggttgactacaaagaagaacataatactacactgccacagtttatgccatatgaagatggtatttacagtgttattcaaaaaaaggtaacatggtatgaagcattaaacatgtgttctcaaagtggaggtcacttggcaagcgttcacaaccaaaatggccagctctttctggaagatattgtaaaacgtgatggatttccactatgggttgggctctcaagtcatgatggaagtgaatcaagttttgaatggtctgatggtagtacatttgactatatcccatggaaaggccaaacatctcctggaaattgtgttctcttggatccaaaaggaacttggaaacatgaaaaatgcaactctgttaaggatggtgctatttgttataaacctacaaaatctaaaaagctgtcccgtcttacatattcatcaagatgtccagcagcaaaagagaatgggtcacggtggatccagtacaagggtcactgttacaagtctgatcaggcattgcacagtttttcagaggccaaaaaattgtgttcaaaacatgatcactctgcaactatcgtttccataaaagatgaagatgagaataaatttgtgagcagactgatgagggaaaataataacattaccatgagagtttggcttggattatctcaacattctgttgaccagtcttggagttggttagatggatcagaagtgacatttgtcaaatgggaaaataaaagtaagagtggtgttggaagatgtagcatgttgatagcttcaaatgaaacttggaaaaaagttgaatgtgaacatggttttggaagagttgtctgcaaagtgcctctgggccctgattacacagcaatagctatcatagttgccacactaagtatcttagttctcatgggcggactgatttggttcctcttccaaaggcaccgtttgcacctggcgggtttctcatcagttcgatatgcacaaggagtgaatgaagatgagattatgcttccttctttccatgactaa

SEQ ID NO: 137023 - DNA, 453 bp, Homo sapiens
caggccagtcccctattttggtcatctatcatgaaaccaagcggccttcggggatctctgagcgattctctggctccacctctgggaacacagccactctgaccatcaccgggacccaggctatggatgaggctgactattactgtcaggcgggcagagacttcggcggggggaccaaactgaccgtcctaggtcagcccaaggctgccccctcggtcactctgttcccgccctcctctgaggagcttcaagccaacaaggccacactggtgtgtctcataagtgacttctacccgggagccgtgacagtggcctggaaggcacatagcaaccccgtcaaggcgggagtggagaccaccacaccctccaaacaaagcaacaacaagtacgcggccagcagctacctgagcctgacgcctgagcagtagaagtcccacagaagctacagctgcg

SEQ ID NO: 137024 - DNA, 354 bp, Homo sapiens
tcggttctctgcttccagcgagggctcctccaactctggctccctcaccatctctggactgaagactgaggacgaggctgattactactggcagtcttatgatagcagcatttgggtgttcggcggagggaccaagctgaccgtcctaggagccgtgacagtggcctggaaggcagatagcagccccgtcaaggcgggagtggagaccaccacaccctccaaacaaagcaacaacaagtacgcggccagcagctgcctgagcctgacgcctgagcagtggaagtcccacaaaagctacagctgccaggtcacgcatgaagggagcaccgtggagaagacagtggcccctacaga

SEQ ID NO: 137025 - DNA, 315 bp, Homo sapiens
cagcctgtgctgactcagccatcttcccattctgcatcttctggagcatcagtcagactcacctgcatgctgagcagtggcttcagtgttggggacttctggataaggtggtaccaacaaaagccagggaaccctccccggtatctcctgtactaccactcagactccaataagggccaaggctctggagttcccagccgcttctctggatccaacgatgcatcagccaatgcagggattctgcgtatctctgggctccagcctgaggatgaggctgactattactgtggtacatggcacagcaactctaagact

SEQ ID NO: 137026 - DNA, 866 bp, Homo sapiens
atggcctggactctgctattcctcaccctcctcactcagggcacagggtcctgggcccagtctgccctgactcagcctgcctccgtgtctgggtctcctggacagtcgatcaccatctcctgcattggcaccagcagtgacattggtgcttattattttgtctcctggtaccagcaatatccaggcaaagcccccaaactcttgatttttgatgtcagtggtcggccctcagggatttctagtcgcttctctggctccaagtctggcaacacggcctccctgaccatctctgggctccaggctgaggacgaggctgattattattgcgcttcatatgcaagaagtagcacggtagtcttcggcggagggaccagcgtgaccgtccttggtcagcccaaggctgccccatcggtcactctggttcccgccctcctctgaggagcttcaagccaacaaggccacactggtgtgcctgatcagtgacttctacccgggagctgtgaaagtggcctggaaggcagatggcagccccgtcaacgcgggagtggagaccaccacaccctccaaacagagcaacaacaagtacgcggccagcagctagctacctgagcctgacgcctgagcagtggaagtcccacagaagctacagctgccaggtcacgcatgaagggagcaccgtggagaagacagtggcccctacagaatgttcataggttctcaaccctcaccccccaccacgggagactagagctgcaggttcccaggggagggggtctctctccccatcccaagtcatccagcccttcttcctacactcaataaaccctcaataaatatcctcagtcaaccagaaaaaaaaaaaaaaa

SEQ ID NO: 137027 - DNA, 1920 bp, Homo sapiens
atggcatggatccctctcttcctcggcgtccttgcttactgcacaggttccgtggcctcctatgagctgactcagccaccctcagtgtccgtgtccccaggacagacagccagcatcacctgctctggagataaattgggggataaatatgcttgctggtatcagcagaagccaggccagtcccctgtgctggtcatctatcaagatagcaagcggccctcagggatccctgagcgattctctggctccaactctgggaacacagccactctgaccatcagcgggacccaggctatggatgaggctgactattactgtcaggcgtgggacagcagcactgcacacagtgacacaggcagatgcggaatagtgggaagaccccctgtcaggcagtgctggcccctgctgctgctgggtctggccatggtcgcccatggcctgctgcgcccaatggttgcaccgcaaagcggggacccagaccctggagcctcagttggaagcagccgatccagcctgcggagcctgtggggcaggctcctgctccagcccagcccccagagagcagaccccaggtgctggccccgggggttttggtctgagcctcagtcactgtgttatgtcttcggaactgggaccaaggtcaccgtcctaggtcagcccaaggccaaccccactgtcactctgttcccgccctcctctgaggagctccaagccaacaaggccacactagtgtgtctgatcagtgacttctacccgggagctgtgacagtggcctggaaggcagatggcagccccgtcaaggcgggagtggagaccaccaaaccctccaaacagagcaacaacaagtacgcggccagcagctacctgagcctgacgcccgagcagtggaagtcccacagaagctacagctgccagctgcagtgggggctggggctaggggcatcccagggagggtttttgtatgagcctgtgtcacagtgtgtggtattcggcggagggaccaagctgaccgtcctaggtcagcccaaggctgccccctcggtcactctgttcccgccctcctctgaggagcttcaagccaacaaggccacactggtgtgtctcataagtgacttctacccgggagccgtgacagtggcctggaaggcagatagcagccccgtcaaggcgggagtggagaccaccacaccctccaaacaaagcaacaacaagtacgcggccagcagctacctgagcctgacgcctgagcagtggaagtcccacagaagctacagctgccagaaacctaaccacgcatcacacggcacttctcgcatgccttctgtgtctgctccagtctctgggctaaagagttgctggtccgggacaggggataggtccgctcttggtcagatgccaggtccctgccatggcatccctgaccctatgcaacaagccagtgactctggtcagcccaaggctgccccctcggtcactctgttcccgccctcctctgaggagcttcaagccaacaaggccacactggtgtgtctcataagtgacttctacccgggagccgtgacagtggcctggaaggcagatagcagccccgtcaaggcgggagtggagaccaccacaccctccaaacaaagcaacaacaagtacgcggccagcagctacctgagcctgacgcctgagcagtggaagtcccacaaaagctacagctgccaggtcacgcatgaaggggagcaccgtggagaagacagtggcccctacagaatgttcataggttcccaactctaaccccacccacgggagcctggagctgcaggatcccaggggagggggtctctctccccatcccaagtcatgccggcccttctccctgcactcctgaaaccccaataaatatcctcattgacaaccaggtcgacgcggccg

SEQ ID NO: 137028 - DNA, 2067 bp, Homo sapiens
ggaggcagagctctgggaatctcaccatggcctggacccctctcctgctccccctcctcactttctgcacagtctctgaggcctcctatgagttgacacagccaccctcggtgtcagtgtccccaggacaaacggccacgatcacctgctctggagatgcattgccaaaaaaaacatccttattggtaccagcagaagtcaggccaggcccctgtactggtcatctatgaggacaacaaacgaccctccgggatccctgcagagattctctgcctccagctcagggacaatggccaccttgactatcagtggggcccaggtggaggatgaagcggactactactgctactcaacagacagcagtggtaatcataggggggtgttcggtggagggaccaggctgaccgtcctcagtcagcccaaggctgccccctcggtcactctgttcccaccctcctctgaggagcttcaagccaacaaggccacactggtgtgtctcataagtgacttctacccgggagccgtgacagtggcctggaaggcagatagcagccccgtcaaggcgggagtggagaccaccacacccggcaaacaaagcaacaacaagtacgcggccagcagctacctgagcgctgacgcctgagcagtggaagtcccacaaaagctacagctgccaggtcacgcatgaaggggagcaccgtggaggagacaggtgcccctacagaatatttattgagggtttattgagtgcagggagaagggtcttgatgcccttggggtgggaggagaagacccctctcccctggggattcctgcaggttctagttcttcccgtggggggggagtgaggggttgagaaacctatggaacattcgtgtagggggcccctgtcttctcccacggtgctccccttcaatgccgtgaccctggcaagctgtagctttctgtggaactttccacctggtcagggcgtcaggctcagatagcctgctgggccgcgtacttcgttgttgctttgttttggagggagtggatggtctccatctcccgccattgacgggggctgctatgctgccttcccaggccactgtacacggcttcccgggtaagaagtcacttatggagacacaccaagtggtggcccttgttgggcttgaaagctccctcagcagggagggctgggaacaagagtgacccgaggggagcagcctttgggtgtaccatagggacgggtcagctttggtcccctccgccgaacacagcacacagtgacacagccccacacacaaacccctcctgacacacccgacccgttccccgctgcagcagcttgggcgcccaggtccagtggccctgggtccagagggtcagggtccagtctgtgcctgcttcagagatagatgtgggggtagagggcagggtcttgttgttgctctgtttggagggtgtggtggtctccactcccgcgttgacggggctgccatctgccttccaggccacttttacagctcccgggtagaagtcactgatcaggcacaccagtgtggccttgttggcttgaagctcctcagaggagggcgggaacagagtgaccgagggggcagccttgggctgaccgaggacggtcaccttggtgccactgccgaacacattacactgtgatataaccagggcagcaggaagcacaacagagacgtgggtaagaatgaagatgtctggttccttctgaagactatttccttgttctggaacattctggcagctgtagcttctgtgggacttccactgctcgggcgtcaggctcaggtagctgctggccgcatagttgttgttgctctgtgtggagggtgtggttgtctctatgcccttggtgactagggtgccattttccttcagcatggccttgttggcttggagctcctcagaggagggcgggaacagagtgaccaagggggtggccttgagcggacctgtgagtttccattcccagacctttccacaagttcctggtgatggcaccaccatggacttctcacccgataaactgggcacctggattttcctcat

SEQ ID NO: 137029 - DNA, 2004 bp, Homo sapiens
atggtgctggactcaaacggcatctgtatgcacctgggcctgtgcaaatcccggcagccagagccagagcaggagccagggatgtcagaccccctgcccaaacctctgcgggaccctctgccagaccctctgctggacaagctcgtcctccctgtgctgcccggggccctccaggcgaggcctgggcctcacacacaggatctctccgagcagcaattccccattcctctcccctattgctggctctgcagggctctgatcaagcgaatccaagccatgattcccaagggtgcgctagctgtggcagtggcccaggtgtgccgcgtggtacctctggtggcgggcggcatctgccagtgcctggctgagcgctactccgtcatcctgctcgacacgctgctgggccgcatgctgccccagctggtctgccgcctcgtcctccggtgctccatggatgacagcgctggcccaaggtcgccgacaggagaatggctgccgcgagactctgagtgccacctctgcatgtccgtgaccacccaggccgggaacagcagcgagcaggccataccacaggcaatgctccaggcctgtgttggctcctggctggacagggaaaaggaatgtgccctcctcgatgaacgcctcgtggaagccgttgagctgtccgttcatgttggtgtcggtgtgcggaagtggccttacgaaggagcagcggcgaggcggcagcggctgcgaaatgcgcaagctgcggacagcgttctactcgtagcaggcgggcggcgcggagcgaacgaagcagcgggcggttttgactacaagacttgtaacgtgctggtagccttggagcaacagtcaccagatattgctcaaggtgttcatcttgacagaaatgaagaagacattggtgctggagaccagggcttaatgtttggctatgccactgatgaaactgaggagtgtatgcctttaaccattgtcttggcacacaagctaaatgccaaactggcagaactacgccgtaatggcactttgccttggttacgccctgattctaaaactcaagttactgtgcagtatatgcaggatcgaggtgctgtgcttcccatcagagtccacacaattgttatatctgttcagcatgatgaagaggtttgtcttgatgaaatgagggatgccctaaaggagaaagtcatcaaagcagttgtgcctgcgaaataccttgatgaggatacaatctaccacctacagccaagtggcagatttgttattggtgggcctcagggtgatgctggtttgactggacgcaaaatcattgtggacacttatggcggttggggtgctcatggaggaggtgccttttcaggaaaggattataccaaggtcgaccgttcagctgcttatgctgctcgttgggtggcaaaatcccttgttaaaggaggtctgtgccggagggttcttgttcagtctgagcacttcaagacgacatcgcagaaggtggctcgaaaattctggtggaagaacgtgaagatgattgtccttatctgcgtgattggttttatcatcatcctcttcattgtgctctttgccactgagaatgctgctcggtcctcctacccctcttcccgaggccctgctgccatgttgtatgccccagaaggccggggtttgaagtctcacgcctacattcacagtgtccagtttagccaccatgttttcctcaacctccacaccctcaagttttactgccttccagacaactatgagatcatcgattcctcattggaggatatcacgagctcaaccttcaacaagactacacagaacctggcccagaagaagtgctgggagaacatccgttaccggatctgcgtggggctggtggtggttggtgtcctgctcatcatcctgattgtgctgctggtcgtctttctccctcagagcagtgacagcagtagtgccccacggacccaggatgcaggcattgcctcagggcctgggaactga

SEQ ID NO: 137030 - DNA, 1588 bp, Homo sapiens
  misc_feature (1)...(1588): n = a,t,c or g
gcggccgcgcagtgtggttcagcccggactccgcggggcgagctgcccttcctcccccgacccccgcgcaagtggtgcattggcgcgcggcgccgaggggcggggcccgagccgggcgcgcgcgggcgctgctctataaataccgggccgcaccgcccgctgcttcgttcgctccgcgccgcccgcctgctacgagtagaacgctgtccgcagcttgcgcatttcgcagccgctgccgcctcgccgcctgctccttcgtaaggccacttccgcacaccgacaccaacatgaaccggacagctcaacggcttccacgaggcgttcatcgaggagggcacattccttttcacctcagagtcggtcggggaaggccacccacgataagattttgtgaccaaatcagtggatgctgtccttgatgcccaccttcagcaggatcctgatgccaaagtagcttcgtgaaactgttgctaaaactggaatgatccttctttgctggggaaattacatccagagctgctgtttgacttacccagaaaagtggttcgtgaaagctgtttaaacacattggaatatgatgattcttccaaaggtttttgactacaaagacttgtaaacgtgctggtagccttggagcaacagtcaccagatattgctcaaggtgttcatcttgacagaaatgaagaagacattggtgctggagaccagggcttaatgtttggctatgccactgatgaaactgaggagtgtatgcctttaaccattgtcttggcacacaagctaaatgccaaactggcagaactacgccgtaatggcactttgccttggttacgccctgattctaaaactcaagttactgtgcagtatatgcaggatcgaggtgctgtgcttcccatcagagtccacacaattgttatatctgttcagcatgatgaagaggtttgtcttgatgaaatgagggatgccctaaaggagaaagtcatcaaagcagttgtgcctgcgaaataccttgatgaggatacaatctaccacctacagccaagtggcaganttttgttattggtgggcctcagggtgatgctggtttgacctggacggaaaatcatttgtggacacttatggcggttggggtgctcatggaggaaggtgccttttcaggaaaggattataccaaggtcgaccgttcagctgcttatgctgctcgttgggtggcaaaatcccttgttaaaggaggtctgtgccggagggttcttgttcaggtctcttatgctattggagtttctcatccattatctatctccattttccattatggtacctctcagaagagtgagagagagctattatagattgtgaagaagaatttcgatctccgccctggggtcattgtcagggatctggatctgaagaagccaatttatcagaggactgcagcctatggccactttggtagggacagcttcccatgggaagtgcccaaaaagcttatatattgaaagtgttagccttttttccccagacttgttggcgtaggctacagagaagccttcaagctctgagggaaagggccctccttcctaaattttcg

SEQ ID NO: 137031 - DNA, 1801 bp, Homo sapiens
gcctgctacgagtaaaacgctgtgcgcagtttgcgcatttctcaggcgctgtcgcctcgccgttgattcttcgtaaggtcactttcgcacaccgacaccaacatgaacggacagctcaacgggttccacgaggcgttgatcgaggagggcacattccttttcacctcaaaggccgacggggaaggccacccagataagatttgtgaccaaatcagtgaagctgtccttgatgcccaccttcatcaggatcctgatgccaaagtagcttgtgaaactgttgctaaaactggaatgatccttcttgctggggaaattacatccagagctgctgttgactaccagaaagtggttcgtgaagctgttaaacacattggatatgatgattcttccaaaggttttgacgtacaagacttgtaacgtgctggtagccttggagcaacagtcaccagatattgctcaaggtgttcatcttgacagaaatgaagaagacattggtgctggagaccagggcttaatgtttggctatgccactgatgaaactgaggagtgtatgcctttaaccattgtcttggcacacaagctaaatgccaaactggcagaactacgccgtaatggcactttgccttggttacgccctgattctaaaactcaagttactgtgcagtatatgcaggatcgaggtgctgtgcttcccatcagagtccacacaattgttatatctgttcagcatgatgaagaggtttgtcttgatgaaatgagggatgccctaaaggagaaagtcatcaaagcagttgtgcctgcgaaataccttgatgaggatacaatctaccacctacagccaagtggcagtatttgttattggtgggcctcagggtgatgctggtttgactggtcgcataatcattgtggacccttatgacggttggggtgctcatgaagaaggtgccttttcaggaaaggattataccaaggtcaggccgttcagctgcatatggtgctcgttgggtggcaagatcccttgttaaaggaggtctgtgccggagggttcttgttcaggtgccaggccctccaaagaaacctgatgaggacctctacttggaatgtgagccggatccagtcctggctttgactcagactctcagcttccaagtcctgatgccctcaggccctctgcccaggacatcagtggtgcccagggaacagcagatgctgcctctaaaggacagtgatctgctgactcagccttggtactcggggaactgtgaccgctatgctgttgagagtgccctgctccacttacaaaaggatggggcctataccgtgcgccccagctcagggcctcatggctcccagcccttcaccctggcagtgcttctccgaggccgggtcttcaacattcccatccggcggctggatggcggacgccactatgccctgggccgggagggcaggaaccgtgaggagctcttctcctccgtggcggccatggtccagcacttcatgtggcaccctctgccccttgtggacagacacagcggcagccgggaactcacctgcctgctcttccccaccaagccttgaggccacagcgaagaatgcaggtgtctgcccagttcactaggtcctggatgaaggaaccgtggtggcctagaccagtcaggggacagcacaggcactgctggaacagcaaaggatcctctcacatgtacttgtgggcctagggcaccctgagagggactggcctaccttgcacaagttcacagtcaataaacatttgttgattgaaaaaaaaaaaaaaaaa

SEQ ID NO: 137032 - DNA, 341 bp, Homo sapiens
tcatgctgaggtgccacagctggaaggacaagcctctggtcaaggtcacattcttccagaatggaaaatcccagaaattctcccgtttggatcccaccttctccatcccacaagcaaaccacagtcacagtggtgattaccactgcacaggaaacataggctacacgctgttctcatccaagcctgtgaccatcactgtccaagccaattccactgatcctgtgaaggctgcccaatttgagccacctggacgtcaaatgattgccatcagaaagagacaacttgaagaaaccaacaatgactatgaaacagctgacggcggctgaccatcggagcggccg

SEQ ID NO: 137033 - DNA, 1489 bp, Homo sapiens
gccctctagggtagaatcgccaagctttgagagaaggctgtgactgctgtgctctgggcgccagctcgctccagggagtgatgggaatcctgtcattcttacctgtccttgccactgagagtgactgggctgactgcaagtccccccagccttggggtcatatgcttctgtggacagctgtgctattcctggctcctgttgctgggacacctgcagctcccccaaaggctgtgctgaaactcgagccccagtggatcaacgtgctccaggaggactctgtgactctgacatgccgggggactcacagccctgagagcgactccattcagtggttccacaatgggaatctcattcccacccacacgcagcccagctacaggttcaaggccaacaacaatgacagcggggagtacacgtgccagactggccagaccagcctcagcgaccctgtgcatctgactgtgctttctgagtggctggtgctccagacccctcacctggagttccaggagggagaaaccatcgtgctgaggtgccacagctggaaggacaagcctctggtcaaggtcacattcttccagaatggaaaatccaagaaattttcccgttcggatcccaacttctccatcccacaagcaaaccacagtcacagtggtgattaccactgcacaggaaacataggctacacgctgttctcatccaagcctgtgaccatcactgtccaagctcccagctcttcaccgatggggatcattgtggctgtggtcactgggattgctgtagcggccattgttgctgctgtagtggccttgatctactgcaggaaaaagcggatttcagctctcccaggataccctgagtgcagggaaatgggagagaccctccctgagaaaccagccaatcccactaatcctgatgaggctgacaaagttggggctgagaacacaatcacctattcacttctcatgcacccggatgctctggaagagcctgatgaccagaaccgtatttagtctccattgtcttgcattgggatttgagaagaaaatcagagagggaagatctggtatttcctggcctaaattccccttggggaggacagggagatgctcgagttccaaaagagaaggtttcttccagagtcatctacctgagtcctgaagctccctgtcctgaaagccacagacaatatggtcccaaataaccgactgcacctgctgtcttcagctcttcttgacatcaaggctcttccgttccacatccacacagccaatccaattaatcaaaccactgttattaacagataatagcaacttgggaaatgcttatgttacaggttaccgttgagaacaatcatctaaatctatatgatttcagaaatgttaaaatagactaacctctaccagcacattaaaagtgattgtttctgggtgatttattgatgatttttattttctttatttttctataaagatcatatattactttt

SEQ ID NO: 137034 - DNA, 2407 bp, Homo sapiens
ctgtgactgctgtgctctgggcgccactcgctccagggagtgatgggaatcctgtcattcttacctgtccttgccactgagagtgactgggctgactgcaagtccccccagccttggggtcatatgcttctgtggacagctgtgctatccctggctcctgttgctgggacacctgcagctcccccaaaggctgtgctgaaactcgagccccagtggatcaacgtgctccaggaggactctgtgactctgacatgccgggggactcacagccctgagagcgactccattcagtggttccacaatgggaatctcattcccacccacacgcagcccagctacaggttcaaggccaacaacaatgacagcggggagtacacgtgccagactggccagaccagcctcagcgaccctgtgcatctgactgtgctttctggtcagtggaggaaggccccagggtggacctgggagggccaggacggatgaaatctgctttcaggcagaggtttgcaggaaaggggggtggcctgcttactgggaagtatcgctgtgagttgcctcagcacatatcagtggttgtttttgcctcagttctgattgaacagaagaaggtttcaaggccaaaaacaggcagccaagtgtgagagaagcagaaggaaatccctactgcataaaacccatttccattttaatggcagaattgaaaagcacagaccacaactgaatcctagccctggaaatgactcactatacaacatgatgaattcatttaacccttgagtttccatttcttcacctgctccgtggggcactaacgcctccctcagaggcttctggtgagaatcagtgtttccctgcccccgccccgccctccatgccccttctccacgttctcactgtgctaggtgctcttctctgtctttctcttccaccagcctgtgggaaacctgagatgaaagtcgtgtcttacccatctttgtatttccagcatctgaaactgggcagagcttaataaatattttgctggagaggttgatgatcttacaaagctcccattgaaaggtggctctctgtaaagcaaagttacaatgagattgtgatgaacattgtccttgtggcttttcacttagtcccctcccttcacctgaagagcaaattttcctcaaaagtacacagcaaacgaatgacccactggtgacactgttgcctttagaccctgctggaaagaagctccacatttattaacattcccgaagtaaatttatcaggtagcattcatcaggtaacatttgttgcacattcatgacttttctactgtccacaaaggcatatgtccttatcatatgcggactcctcggtcacactggattcttccttccctcctcgacatggaagagatggcatcttagggtctcttgtgttcttcctgcagaggcctgtcgggcaggaaaaggctgcagctgccttcctgggagaaggaggagatgagtgtatcctgaacacctattatgtgctaggggctattgtagatacatgacactatcatgctcattttcacgaatgaggaaactgaggctcagaagacttaaattatttgcccaagagttataaatgacagagccagcattagagtccaggactgtctgatttcagacctaagctgttccctctgcacatcgtgtcccaccagtaaggaagatctgggtctcagagctgagccaagacctcccgggtcctctgcggttttttgtgtctttcagagtggctggtgctccagacccctcacctggagttccaggagggagaaaccatcgtgctgaggtgccacagctggaaggacaagcctctggtcaaggtcacattcttccagaatggaaaatccaagaaattttcccgttcggatcccaacttctccatcccacaagcaaaccacagtcacagtggtgattaccactgcacaggaaacataggctacacgctgtactcatccaagcctgtgaccatcactgtccaagtgcccagcatgggcagctcttcaccaatggggatcattgtggctgtggtcattgcgactgctgtagcagccattgttgctgctgtagtggccttgatctactgcaggaaaaagcggatttcagccaattccactgatcctgtgaaggctgcccaatttgagatgctttcctgcagccacctggacgtcaaatgattgccatcagaaagagacaacctgaagaaaccaacaatgactatgaaacagctgacggcggctacatgactctgaaccccagggcacctactgacgatgataaaaacatctacctgactcttcctcccaacgaccatgtcaacagtaataactaaagagtaacgttatgccatgtggtcatactctcagcttgctgagtgg

SEQ ID NO: 137035 - DNA, 1644 bp, Homo sapiens
  misc_feature (1)...(1644): n = a,t,c or g
ggcacgaggggtagaatccgccaagctttgagagaaggctgtgactgctgtgctctgggcgccagctcggctccagggagtgatgggaatcctgtcattcttacctgtccttgccactgagagtgactgggctgactgcaagtccccccagccttggggtcatatggcttctgtgggacagctgtgctattcctggctcctgttgctgggacacctgcagctcccccaaaggctgtgctgaaacttcgagccccagtgggatcaacggtggctccagggaggactctgtgactctggacatgccngggggactcacagccctggagagcgactccattcagtggttccacaatggggaatcttcattcccacccacacgcagcccagcttacaggtttcaagggccaacaacaatggacagcggggagttacacgtgccagactggccagaccagcctcagcgaccctgtgcatctgaactgtgctttctgagtggctggtgctccagacccctcacctggagttccaggagggagaaacacatcgtgctgaggtgccacagcctggagggacaagccctctggtcaaggtcacatttttttcacaatggaaaatccaagaaattttcccgttcggatcccaacttctccatcccacaagcaaaccacagtcacagtggtgattaccacttgcacagggaaacatagggttacacgctgttattcattccaaggctgttgaccatcactgtccaagctcccagctcttcaccgatggggatcattgtggctgtggtcactgggactgctgtagcggccattgttgctgctgtagtggccttgatctactgcaggaaaaagcggatttcagccaatcccactaatcctgatgaggctgacaaagttgggggctgaggaacacaatcacctatttcacttctcaatggcacccgggatggctctgggaagagcctgatgaccagaaccgtattttagtctccattgtcttggcattggggatttggagaagaaactcagagagggaagatctggtatttcctggcctaaaattcccccttggggaggacacggggagatgctgccagttcccaaaagagaaggttttccttccgggagtcatcctaccctgagtccctgaagctcccctgtccctgaaaaggcccacagacaatatgggtccccaaatgacccgacctggacccttcctgtgccttcagctccttccttgacatcaaggctccttcccgttcccacatcccacacagcccaatcccaattaatcaaaccacttgttattaacagataatagccaacctggggaaatgcttatgttacaggttaccgttgagaacaatcatctaaatctatatgatttcagaaatgttaaaatagactaacctctaccagcacattaaaagtgattgtttctgggtgataaaattattgatgatttttattttctttatttttctataaaggtcatatattacttttataattaaaacattataaaaacaacattctgtttaccttttcaaggctgtattggttggagtgtagactgaactgcctggggtctgtttctcttcagtgatgagactcttaggaaggcaggaatggatag

SEQ ID NO: 137036 - DNA, 474 bp, Homo sapiens
atgaagtcttccttccaaggacataacaaagaaaaaagagaaaaaaaaggcccctctctcttcagtgctgcctacggaggtggcagctgtctcctcctcagcatcatggccgccctcagacccctcgtgaagcccaagatcgtcaaaaagagaaccaaggagttcatctggcaccagtcagaccaacatgtcaaaattaagtgtaactggaggaaacccagagggccagatcttgatgcccaacactggtcatgggagcaacaaaaaacaaagcacatgctgcccagtggcttccggaagttcctggtccccagcgtcaaggagctggaagtgctgatgtgcaacaaatctccctgtgctgagatcgctcacagtgtttcctccaagaaacaaaaccatcgtggaaagggccgcccagctgccgtcagagtcaccaaccccaatgccaggctgcgcagtgaagaaaatgagtag

SEQ ID NO: 137037 - DNA, 859 bp, Homo sapiens
gctgcgagaagacgaagaaggggtgctgctgtaggaaatcaatggctcggaagaccacactgaggaaggtgtgagttgatactggaagatctccaggtttgaggcatcttcagaggcatcatggccgccctcagaccccttgtgaagcccaagatcgtcaaaaagagaaccaagaagttcatccggcaccagtcagaccgatatgtcaaaattaagcgtaactggcggaaacccagaggcattgacaacagggttcgtagaagattcaagggccagatctttgatgcccaacattggttatgggaagcaacaaaaaaacaaaggcacatgctgcccaagtggctttccgggaagttcctggggtcccaccaacgttcaagggagctgggaagttgcttgcttgatgttgcaacaaattctttacttgttgcccgagattcgtttcacattgtttttccttccaaggaaccggcaaaggccttcgtggggaaaggagcttgcccaactgggccttcagagtcaccaaccccaatgccaggctgcgcagtgaagaaaatgagtaggcagctcatgtgcacgttttctgtttaaataaatgtaaaaactgccatctggcatcttccttccttgattttaagccttcagcttcttggccaacttagtttgccacagagattgttcttttgcttaagcccctttggaatctcccatttggaggggatttgtaaaggacactcagtccttgaacaggggaatgtggcctcaagtgcacagactagccttagtcatctccagttgaggctgggtatgaggggtacagacttggccctcacaccaggtaggttctgagacactggaa

SEQ ID NO: 137038 - DNA, 484 bp, Homo sapiens
gaaggggtgtggaattcctgggggggtctttaattctggctccttccttcctcagaatgcttagaaggttcccagacacagagcccagatgtcccccaccaccggtcaggacctccttgaggtgcacaagcacggtctcctctgagttcaccccagcccacccccgcacccactaattctgcttttcctgccccttgctccgtaaaagtatcaaatactttctccttggtatctcaaggaggtttctgagataggtagaagtcttgagacggaggctggccatccattcagccctgagcgtgctgagttctgtgtttctctgaatagaggtgtggaacctgaggggccagcaggcctctctgaaggcctccatggagcaaacggagccacctcgggaaagagtttaatggaatatttttgtacccgatgtttacagatgctgttgggaagttatcaataaaaagacaccattactaaaaaggga

SEQ ID NO: 137039 - DNA, 1517 bp, Homo sapiens
  misc_feature (1)...(1517): n = a,t,c or g
ggcacgaggacgcacgcaagcggctccagggtacgtccccgccacgcgcgctcgcaggatcggtgcgtggtgacgtttcgccggcgcgggcgccatcccggaagcgcgagcaaggccgccagatgtgcaggcagcggaggaggagaaagagatggacctcccggactcggcctcgagggtcttctgggggacgcatcctcgaacatgggtgaacaccgaatgaatgtcaacgccatcatcctgtgcccagaagaacatgctggaccagctttgagaagaccaaatgagatgctgctcaacttcaacaacctgtccagtgcccgccttgcaagcagattgagcgaacgcttcctgcaccacacgaggaccctagtagagatgaaacgggacctgggacagcatcttccgccgtatcaggacgctgaaagggaaactggccaggcagcacccagaggccttcagccatatcccagaggcatccttcctggaggaagaggattgaagaccccattcccacccaggcaccaacgaccaccattgccacctcagaacatgagcactgggctcatgttgacaccagccccgacaccgtcttcgccctcccttgagcccctggcttctgaggacctgtcccatgtccaagccttggcttccccagccattcaacgggccgcagccagatcagattgacgaggagatgacgggtcgaatagccctgcctgcccggtgcctttgagggggtctcagggcagcagcattacaaggtggcagcgggtaacccctgccttgttctgtcatccagggctcctttgctgccccgtactgtacacccagggctcctagggggacaaggctctctcccgaggggtgtggaattcctgggggggtctttaattctgggctccttccttcctcagaacatctctattctgcaagaccccttctgccatgccagggcacgcccacttccagctggagtcgtggggcttgggcacagggggaatttttccagcagcctgcagcctgacggtctgctctgcaagaatgcttagaaggtttccccagacacccagagcccagatgtcccccccaccaccgggtcaggaccttccttgaggttgcacaagccacggtctcctctggagtttcacccccagccccacccccgcacccacgtaattctgcttttcctgccccttgctcccgtaaaaagtactcaaatacgtttcttcctttggtatctcaaggaggtttctgagataggtagaagtcttgagacggaggctgggccatccgattcagccctgagcgtgctgagttctggtgtttctctgaataagaggtgtggaacctgaggggccagcagctcntctctgaaggcctccatggagcaaacggagccacctgccgggaaagagtttaatgggaatatttttttgtaccccgatgtttacagatgctgttgggaagttatcaataaaaagacaccgattactaaaaagggaaaagtacaccta

SEQ ID NO: 137040 - DNA, 461 bp, Homo sapiens
aaatgcgcacagttgctgaaaaggttgatgccgtcagaattgttcacattcattctgtcatacatcttacgacgttctgataagaggaaggaccgagtagaaatttctccagagcagctgtctgcagcttcaacagaggcagagaggttggctgaactgacaggccgccccatgagagttgtgggctggtatcattcccatcctcatataactgtttggccttcacatgttggtaagtatcatggggttgcaatgtttattgttttcagaaattaatatcatgtttccttttccattacatagggtatggttattttaaaccaaaatttgactgtcctttagcagatgtcattattttgatttattttattatgtattaaaagtaatgatttatgtcatattgattgtttttaataagtctgtcagttgatataaaaaaattaaactgttaactgaaaaaa

SEQ ID NO: 137041 - DNA, 1563 bp, Homo sapiens
  misc_feature (1)...(1563): n = a,t,c or g
gccaagatggcggtgcaggtggtgcaggcggtgcaggcggttcatctcgagtctgacgctttcctcgtttgtctcaaccacgctctgagcacagagaaggaggaagtaatggggctgtgcataggggagttgaacgatgatacaaggagtgactccaaatttgcatatactggaactgaaatgcgcacagttgctgaaaaggttgatgccgtcagaattgttcacattcattctgtcatcatcttacgacgttctgataagaggaaggaccgagtagaaatttctccagagcagctgtctgcagcttcaacagaggcagagaggttggctgaactgacaggccgccccatgagagttgtgggctggtatcattcccatcctcatataactgtttggccttcacatgttgatgttcgcacacaagccatgtaccagatgatggatcaaggctttgtaggacttattttttcctgtttcatagaagataagaacacaaagactggccgggtactctacacttgcttccaatccatacaggcccaaaagagttcagagtatgagagaatcgaaatccccaatccatattgtacctcatgtcactatcgggaaagtgtgccttgaatcagcagtagagctgcccaagatcctgtgcccanggaggagcaggatgcgtataggaggatccacagccttacacatctggactcagtaaccaagatccataatggctcagtgtttaccaagaatctgtgcagtcagatgtcggcagtcagcgggcctctcctacagtggttggaggacagactggagcaaaaccaacagcatttgcaggaattaccaccaggaaaaggaggagcttatgcaagaactttcttctctagaataaatcaggagacaaaatggggaaagatgaaaatatccagtgtaaagttacttaagctaaatcaatttcaaagaagaaaaacttggaggactcattttacctgacttcaagacttactataaagctatagtaatcaagatagatggtattggcagaggaacagacacatacgtcaatggaacagatgagagaacccagaaataaacccatataaatatgctcagctgattttgaaaaagtgaaaaagcaattcaatggaggaagaatagcctttctgacaaattatgctagagcaattagacacccatggcgaggagaaaaaagaacctctacttaaacctcacatcttatataaaatttaactcaaaatgtataacggacttaaatgtgatacataaaactagataactttgaaaaaagccacaggagaaaaatcttcaggatccttgggctaggtgacaagttcttggactttgccccgaaagcacatccataaaagacaaaatctgatatattggacttcttcaaaatttaaaaacttgtgatttaagaagaggaaaagataagctacagattgagatgaatttgcaaaccatatatctgatcaatttggaatatataaagtgtactaaaaactcaactgaagtcaggcatggtagctcatgcttggtaatctcacc

SEQ ID NO: 137042 - DNA, 1389 bp, Homo sapiens
  misc_feature (1)...(1389): n = a,t,c or g
atttagtaattaaaagcaatgagctgggccaagatggcagtgcaggtggtgcaggcggtgcaggcggttcatctcgagtctgacgctttcctcgtttgtctcaaccacgctctgagcacagagaaggaggaagtaatggggctgtgcataggggagttgaacgatgatacaagtaggagtgactccaaatttgcatatactggaactgaaatgcgcacagttgctgaaaaggttgatgccgtcagaattgttcacattcattctgtcatcatcttaacgacgttctgataagaggaaggaccaagtagaaatttcaccagggcagctgtctgcagcttcaacagaggcagagaagttggctgaactgacaggccaccccatgagagttgtgggctggtatcattcccatcctcatataactgtttggccttcacatgttgatgttcgcacccaagccatgtaccagatgatggatcaaggctttgtaggacttattttttcctgtttcatagaagataagaacacaagggctggccgggtactctacacttgcttccaatccatacaggcccaaaagagttcagagtcccttcatggtccacaagacttctggagctccagccagcacatctccattgagggccagaaggaagaggaaaggtatgagagaatcgaaatcccaatccatattgtacctcatgtcactatcgggaaagcgtgccttgaatcagcagtagagctgcccaagatcctgtgccaggaggagcaggatgcatattggaggatccacagccttacacatctggactcagtaaccaagatccataatggctcagtgtttaccaagaatctgtgcagtcagatgtcggcagtcagcgggcctctcctacagtggttggaggacagactggagcaaaaccaacagcatttgcaggaattacaacaagaaaaggaagagcttatgcaagaactttcttctctagaataaatcaggagacaaaatggggaaagatgaaaatatccagtgtaaagttacttaagctaaatcaatttcaaagaagaaaaacttggaggactcatttnnnnnnnnnnnnnnnnnnnnnnnnnnnnnnnnnnnnnnnnnnnnnnnnnnnnnnnnnnnnnnnnnnnnnnnnnnnnnnnnnnnnnnnnnnnnnnnnnnnnnnnnnnnacccatataaatatgctcagctgattttgaaaaagtgaaaaagcaattcaatggaggaagaatagcctttctgacaaattatgctagagcaattagacacccatggcgaggagaaaaaagaacctctacttanacctcacatcttatataaaatttaactcanaatgtataacggacttaaatgtgatacataagactag

SEQ ID NO: 137043 - DNA, 1365 bp, Homo sapiens
atggagaagtcacttctctttccctcgctgaccacttctgccgggaacgaccgggacagtcgcagccgaagcggcgggggcgagtcctcgggggagaccgggtcggagtcggggccccgtgctcccggagggccaatgacgccgccttccccagcccgaggctcgctcctttctcccgccctcacttgcctccccttcccaacccctaggcgaatccaggttcaagacgtagaaaagccgatgctgggtcagcagcgccagggactaccggccggcagaagccccacagtggcagccgccattttggagctggagactagcggcggagacgaggaggaaccagggcgagaccatctccggggggtgggcacggtgctgtcggaaggcgacggcggtcacgcctgcacgcctcgtctgtctggagcgaaattttattcagaaattattgctatcatggtgaacttacttcagattgtgcgggaccactgggttcatgttcttgtccctatgggatttgtcattggatgttatttagacagaaagagtgatgaacggctaactgccttccggaacaagagtatgttatttaaaagagatggctcctctggcagcagagagttccagttagcaagacaggatgcctgccagtgggcatacagctgggtaggaggaagcctgaggggcaagagaactgagcagcatccacagtggcaagaaggctcactttgtgctcaacattgcctgaataacttattgcaaggagaatattttagccctgtggaattatcctcaattgcacatcagctggatgaggaggagaggatgagaatggcagaaggaggagttactagtgaagattatcgcacgtttttacagtggtttaacttgaattctctcttgacgggtccagaattaatatcagatacatatcttgcacttttcttggctcaattacaacaggaaggttattctatatttgtcgttaagggtgatctgccagattgcgaagctgaccaactcctgcagatgattagggtccaacagatgcatcgaccaaaacttattggagaagaattagcacaactaaaagagcaaagagtccataaaacagacctggaacgagtgttagaagcaaatgatggctcaggaatgttagacgaagatgaggaggatttgcagagggctctggcactaagtcgccaagaaattgacatggaagatgaggaagcagatctccgcagggctattcagctaagtatgcaaggtagttccagaaacatatctcaagatatgacacagacatcaggtacaaatcttacttcagaagagcttcggaagagacgagaagcctactttgaaaagtaa

SEQ ID NO: 137044 - DNA, 704 bp, Homo sapiens
  misc_feature (1)...(704): n = a,t,c or g
tgcattgtgagaggttctaaatatgttttacacaagtaaaagtcctaaatgagagccaggtgcagtggtgtatgcctgtggtctcagcctctccagtagctgggataacagacgcgcaccaccacacccggctaatttttgtgcttttagtagaaatggggttttgccatgttgggcaggctggtccgaaattcctaatttcaaagttattggcccacctcagcatcccaaagtgctaggattacaggcatgaaccaccgcacctggcccagatgcaatttaaaagctatttcaaaaaaaaaacaaaaaaagcagttgtatttctgataattttttttttcttttagctatcatggtgaacttacttcagattgtgcgggaccactggggttcatgattcttgtccctatgggatttgtcattggatgttatttagacagaaagagtgatgaacggctaactgccttccggaacaagagtatgttatttaaaagctttccacacagggaattgcaacccagtgaagaagttacctggaagtaaagactggctagattatcgaatgttcacattttaaagttccgaagagaaataatatacatgaagaatctgnnnnnnnnnnnnnnnnnnnnggggggcccgttttaaagaatccttgggggggccaaattttacgcgggcttgcaaggttttatttttttcct

SEQ ID NO: 137045 - DNA, 5549 bp, Homo sapiens
ctcctgcacggcgagtgctggagcacgagctaccgctcgctcggtcagggcgccccctccgcccgcctcctgcttcctcctccgctgcctgccgccgccgcctccaccattgtataatgctcggggcgcgcaggcagagaacggcggagtcttagcttcagcctcgcctgctgcccgctccccggcgccaccctcgggcccctggagcggggcactccgcatggagcgggagtagctgaggagtgggcggaaacccctcctgatgcgttagttcccaggtggagctgcatgtgatatatgttgggtaaaggaggaaaacggaagtttgatgagcatgaagatgggctggaaggcaaaatcgtgtctccctgtgacggtccatccaaggtgtcttacaccttacagcgccagactatcttcaacatttcccttatgaaactctataaccacaggcccctgacagagcccagcttgcaaaagaccgttttaattaacaacatgttgaggcggatccaggaggaactcaaacaggaaggcagcctgaggcccatgttcaccccctcctcccagcccaccaccgagcccagcgacagctaccgagaggccccgccggccttcagccacctggcgtccccgtcctcccacccctgcgacctcggaagcactacgcccctggaggcctgcctcaccccggcctcactgctcgaggacgacgatgacacgttttgcacctcccaggccatgcagcccacggctcccaccaaactgtcacctccagccctcttgccagaaaaggacagtttctcctctgccttggacgagatcgaggagctctgtcccacatctacctccacagaggcggccacggctgcgactgacagtgtgaaagggacctccagcgaggctggcacccagaaactcgacggtcctcaagagagccgcgcagatgactcaaaactgatggactctctgcctgggaattttgaaataacgacgtccacgggtttcctgacagacttgaccctggatgacatcctgtttgctgacattgatacgtccatgtatgattttgacccctgcacttcctcatcagggacagcctcaaaaatggcccctgtgtctgccgacgacctcctcaaaactctggctccttacagcagtcagcctgtcaccccaagtcagcctttcaaaatggacctcacagagctggaccacatcatggaggtgcttgttgggtcctaagacccagggacccagcgactatgcccacccagaccccagagcgttcccataaccctgacagttctccacactgtgcatgcacccttgcttgcctttttcagagaaaaagaaaattttacaacaggatcacactagtttttgctttgagcagagttggagtgccttcatccaagtatgaccacttttaatacacttttttgagtggttcctcagagacctactaccctggtataggaaagaatccatttgaagacaatgttgcaatgttgaatgacaaaaataaacagttcaagtgaagcacaaggattaagttggaaaagctgtaaattgcatgtgcatatttgtctattttttctataagttttattgcaagaggtaaagaagaaaactatatatatatatcttatttagataatctcagtaccttttctggcatttttgccctgtataggttgacttggcaattcggcctttttagaggcattaactactcctcgtaagtgttgcatttacatggctgtttagaaaactgctgcccaaatttattttatatttttgtacagattctgcagtttatgatattgtttttctaaaaacaaatgctgtttatacatatgagatagctattttgataggatttgctcacatagttcctgcaaacttcagatgtacaagttgcacttgtacttttatagagttgtaatgttttatatgtgtatggtgcaagagaaaattggatcaaatcaatctgcagttgatgtccccaaatgcaaacacaggcacacacatgcacacacccataaacacacacacagtgctttaagaaagggccaggtgatatcacacccaaatttcacaagcactgaccccctggcaccaacacccgccagtactgtgacttccaaagccagagccacatgtgctcatcaaacttgcattaagcagttggcgggagatggctgtggagctgggggtttaagtgatggttctcttttgctccctcttttgagggtaaagctactgtctttcttaagagtgtatttatgccaagtttgcgcttttaattgtttttattttgttttttaatgaaaacccagatctttcctttttggcataatttttatgatgacctgaaattttacatccgaacaaaattttacatccgaaaagcaaccaacttcttcatggaactcagccctgttgcaatgcttagggcccttaaagaagaaaatctccccagaaggcatccatcatgttgcttaattgtcttctgcagcttcctttccctagagctttccctgtgttgctaagagctgaaaatggcatcttcgtgatcaccacagtgagcttggctcgcctcggccggcccgggatgcactcttacaacatgtgtgactcttgaacctggagttcatcacattacgtcacagcttcccatctggttgctttcctgagtcagctacttcacacttgtcaaggctgttttaccccaaaactcagacaggactttctatgcatgttttccctcctccccccaattccccccccatcaccttatctcccaggacacacttgagaagtagctttttattcctagtggtgtacatttaattttaaaaaggttgcaatgtatcatgcttgttgccgaaactgtttatggccttcttgtttcagttttttcttttcttccaatggtactttagctgttgagtgcaggttacaacctatattgttatgcagatggcttctttaggaataacttttatatttatttaaaaatttttaaattatgggatgttttgttgttgttgttgtctttgttgttggtcatttgtcaatattcagtcaccaattctgctcacttcttgccatggataaaattgggtctttctggctaattaaaaaagacaactttataaaatggcactttaagcaagccatagttagttttatttttgtaatgcacatggcaaagcaaagacgtttgtgatgaaggaactgctcatctaagcaaaagatttgagtatgatatgataaaggctttctacattctaatttactttttccccccacttgaatgtgttttaaaggctaattatcagctcagtagagcagtgagaaactgatcaaattgcacttgttctcctacaagcaacctccacgcagacacctcgtactgctacaggtgtgtcatttcctttaatacggaccacgggaccatgtaactgacggtgagggttgtagtagatgcttccaatgtcagaatgcctggtaattttaaaaccttccctttcttgcaaaaaacaagtctgcccaaattccatgctttctataactgggaggacctggcaaacctggccgcatgctgcacacatctacctacgtacacatatacaatagtattgatgattctgaacaataacagggtaaaacagttggtttgccattgttaaaaactgatttacagtaacttacaacaactgtacttttgttggattagcaaatcatgtgtttaaacaaatcccatatgttgggcaacagttcaaataagcacggagaagtgttgcccaaacttggttctctgactcttatgtatttgtaaggctgggcttcaaaatcaaaacaaaaaccccaaaaacagcaggcaaatgctttttaactctgacaccgttgccataaatccctgatactcaaagtctaacaagaaagacatggaaaattagcagcccattttcagaaagatcaaaatgatctagggttctaattgcttttgcatcctattcttacaaagtgatgtcccaacagggaacagtaggagctggagtgggatctccaagtcccagtttgagtgtgggatgtgcttccagcagtgccttccctttatgaaagacatcacatggcatccagggccaggcaggcagcttgaggtgcctttacgagaaaaccgagctggggctgggagaggacagttattgacactgatgtgcaatgaagtgacaagatgagagcagaatcgtaagagctttgaatttgaagtgagtttttttccccccataagttatttattccttttttctgtgtaaatatatttattttactgtggagcgctaacatctggatcgtaacatgtgcagaatgtatggtaggaatgtattctcttgtaggaatgtaaatctgtattaaaagggggtccaagccaggcccccaggtcttctcattgtatgcacagtccgcattcatttttactcttctctaatatgggtctatttgaaatatgcaaaaggtatgaggaatgttttaatacctccaaatttttaagaaaagcatcaaagggttgatattttttaaagtttttttagtagcactttctctggatgacagaaggggcaaccacatgggcacccttgttcataccaaagggtgagcagtggccagagcctcctctgcacctctcgagtgtctttaccaattgagctttttatcgccatagccccttggagtgccccagctgccctgaggtcaatcaaggaaaatttcttaatgaaataagctccaaagagccaaagtatcaacttacagatcgtttttaaagcttaaatttatgaaccacctttgtggtaaacaatgaattatgaataccgcagggcagccttcttaaatgacaaatgtaaaaaaaaaaaaaaaagactctacttcgtgcagcaattgctactctatacgaattgtcttaatttgaaaaccttgctgttacaaattggacctttatacattttctgaaaacaatgaaaagagtatatttaaccttttctggctgtaaatggttaccttcctgtaactgccccgcacctggaggcatggagttgtgtgcatcctgcttatgtacaattgttttcagtgtttctaagaatgagtctgaatggttcttgaaaattagccaggatcaaatgctattgcagacaaagccaataaaaagttggacttcttttggggataacaagttttggaagagaaatgcaggccatatgtgcgcatgaccgagattttgaaaaaagatgtacatagtgacatgtttggtgcatggtttttgaggagggcttttgtcaaaaaggaggtataacctttcccccacagacctgagagctgtgccttttctatgcaatattacagacgttacatcggaacccagatggctgtattcacatgtaggtttgggctgtaatctaaacaattggacagattaaatgtacatggaaatgagcagtcttacttttgtagttttatattatacaataaacagttaaaagatg

SEQ ID NO: 137046 - DNA, 3237 bp, Homo sapiens
atggagctcaagtgtgtgtgcctgaaaaaccgctccccgagtgctgaggagcagccaagcctccttccagagccctcagcccaggagagtcacgggggtcacccaaggagtgccttgtatggtagagagagattaacagggcagcctcccagcagtccccaccccaaccctgctccctgggccagctgtcccgctgtcattgacccggtccctatttacagttcagtagcagaggcctatgactcagggacagagggaattcccacggtgccaggcctcaggccatgtggagagtggctcattaagagccacggcacagcgattacctccagagaggcgtgtgagcagaggacaaccgccccgccgccccggcagcctccgaggcgccctctccgcgcttcactctcggccgctcccccggagccacgcgagccggtcgtggcggctggacccgagcctgggagcctgcagcggcccgcgcggactgcgctgccgaaccgcccggagccgcaagccgcatccccggggaccttggtagaaaaatatgcggctcctgtagccacccaagatcttctggatgagaacccctgcaccagcagactgggtgtcgtggacctccaagcggttttgacgctgcggaagcttgagaacctccgctctggagcccagaccccgctggagggtggacagagcgggagggtgggaccccacgccctgaggtggaacagaggtgaagaggaaggggagcggctcctgtgcattttaatagaaatgaattcaagtaagtgtgagaatgtcataaatccctcaagagggctagaggtggtggaggagcccctgtatccccaggtgcagagctctctggtcagcgcagcagtgggcctgccacccagacacacagaggtggctcagcaacagtcagaggccctcagacaacatcgggaacagaagtggctgtatgagcttctaaaaagccccatctggaagctggagaagctgggcccatttcctaactcagaggaggccacagtccctggggcaggaactggcccctcctattcttcccttgccctccagagtggggttgcctgggaccaggtcctcagaaactgtgatgggaggagggcacctttacaacagcaggtggagcacctcatctggagtgaaaggcaagctgagctgctgtcaggccctgagaaacaggtatttttattccggggagtggccccttttcgggactcagaccctgggaattcaggaggatggggaatgttcctggaggagctggggcttaatctgagctccaaaggatggacagaggggaaagaaggggacttctttgcagcgactccaggaggggtcagtggggcaggagagagcagggccttgaaggttgcctgtgccttggctcgggacaggatagggcaaggaggtcaggccactgatcccagggcagacaggggagccctgaagagctgtgggacagcaagcaggaggccaccctccaggtcctggggccctcttgtggtgactctgaggaccccagacctcaatgaacctgagccctggagctacccaaccccaccagacctgcctcaaagcccagaagttggagcccagcacgtcagacccagaaaacccagacctcaagagggcagggggctggccgtgttatccaggtcccaaggcccctcacgtccacgggagctctccaggcccagggagtgcattccactcagagcatgggctggactgacaggagcagcctctttcaaacgcacttggccacctggcactacttgcaggccatcagctgggaaggcaatgctgtgcacgtgccaggagaaatccacaccccatgaagaagagaggtccaaggttcagggaagttatagaggtaacgatcggattcgaacaccttgctcagcttcgaggctgaagacaagacatgtgctggaaggtgttctaagagtcagagaggcccaatcccagctctacccacttgccagctgtgtgacctttggcaagctgcttaacctctctgagccggctgccacttctgtaaagactcccctgacgcctgtaccgtattcatctttccaggggtgtgtgtccccagtctatgtagccctgagcctatcccatctatggtcagacgctgttctcagtattgggagagttgcaaagatcaggatttggcaaactttttctgtaaagggccaaatagcaaatagttcagactttgagggccatgtggtctttttgcaactactcaactctgccatcgtagtaagacagcagacagggcaacacacagatacacgagcgtggccaggttccagcaatgcttttcttacaaaagcaggcagtggacaggatctggcctataaacaacacagggttgctgctcttaaggatacagggagtacagagacaacaaactgcacagctaatccgaagacgcggcaggacttgctaagtgcatttgcggaggcatggagctctgggaaagcccagaagaggaaaaggctggttttgactccaggcatgcagaggtttcatggacaggcatttgagtttggccttggaatgatgggcagaatttccacaagcagaaggggcagggtgcaagggtgggcaactgagccaagcgtggagcagagtgctgaagacaacgagcccacagaagaatcagcccccaggggaaacgagagctctttagacgcgctgagagtgagggagcaaatcttggtagatactgaagtctggagctcaggagagaggcaggggctggagaccagttttgagagtcctgagtggattagatcaccttgggaaagcaagaggcagcaggaatggaggctcagtgaagtgcagtcatgggccaaaccctggaaaagacaatgttttaaagagagctggggcacagatgtgagaaaaaggaggtccagaagggtccaagaagcaggaggagaaccaggagagaagggtagatgtgtgcagcatgcggcaggtttgccaggtcctccagttatagaaagcatggaatctgggcagacttgttctctgcaagaaagggaagctcttaaaattaacaggcatactgacactggaagcatctactacaaccctcacctcagttacatggtccctggtcctattaaaggaaatgacacacctgtagcagtacgaggtgtctgcgtggaggttgcttgtaggagaacaagtgcaatttga

SEQ ID NO: 137047 - DNA, 2932 bp, Homo sapiens
gctccgcgccgagggctggaggatgcgttccctggggtccggacttatgaaaatatgcatcagtttaatactgtcttggaattcatgagatggaagcataggtcaaagctgtttggagaaaatcagaagtacagttttatctagccacatcttggaggagtcgtaagaaagcagtgggagttgaagtcattgtcaagtgcttgcgatcttttacaagaaaatctcactgaatgatagtcatttaaattggtgaagtagcaagaccaattattaaaggtgacagtacacaggaaacattacaattgaacaatgactcagctatacatttacatcagattattgggagcctatttgttcatcatttctcgtgttcaaggacagaatctggatagtatgcttcatggcactgggatgaaatcagactccgaccagaaaaagtcagaaaatggagtaaccttagcaccagaggataccttgccttttttaaagtgctattgctcagggcactgtccagatgatgctattaataacacatgcataactaatggacattgctttgccatcatagaagaagatgaccagggagaaaccacattagcttcagggtgtatgaaatatgaaggatctgattttcagtgcaaagattctccaaaagcccagctacgccggacaatagaatgttgtcggaccaatttatgtaaccagtatttgcaacccacactgccccctgttgtcataggtccgttttttgatggcagcattcgatggctggttttgctcatttctatggctgtctgcataattgctatgatcatcttctccagctgcttttgttacaaacattattgcaagagcatctcaagcagacgtcgttacaatcgtgatttggaacaggatgaagcatttattccagttggagaatcactaaaagaccttattgaccagtcacaaagttctggtagtgggtctggactacctttattggttcagcgaactattgccaaacagattcagatggtccggcaagttggtaaaggccgatatggagaagtatggatgggcaaatggcgtggcgaaaaagtggcggtgaaagtattctttaccactgaagaagccagctggtttcgagaaacagaaatctaccaaactgtgctaatgcgccatgaaaacatacttggtttcatagcggcagacattaaaggtacaggttcctggactcagctctatttgattactgattaccatgaaaatggatctctctatgacttcctgaaatgtgctacactggacaccagagccctgcttaaattggcttattcagctgcctgtggtctgtgccacctgcacacagaaatttatggcacccaaggaaagcccgcaattgctcatcgagacctaaagagcaaaaacatcctcatcaagaaaaatgggagttgctgcattgctgacctgggccttgctgttaaattcaacagtgacacaaatgaagttgatgtgcccttgaataccagggtgggcaccaaacgctacatggctcccgaagtgctggacgaaagcctgaacaaaaaccacttccagccctacatcatggctgacatctacagcttcggcctaatcatttgggagatggctcgtcgttgtatcacaggagggatcgtggaagaataccaattgccatattacaacatggtaccgagtgatccgtcatacgaagatatgcgtgaggttgtgtgtgtcaaacgtttgcggccaattgtgtctaatcggtggaacagtgatgaatgtctacgagcagttttgaagctaatgtcagaatgctgggcccacaatccagcctccagactcacagcattgagaattaagaagacgcttgccaagatggttgaatcccaagatgtaaaaatctgatggttaaaccatcggaggagaaactctagactgcaagaactgtttttacccatggcatgggtggaattagagtggaataaggatgttaacttggttctcagactctttcttcactacgtgttcacaggctgctaatattaaacctttcagtactcttattaggatacaagctgggaacttctaaacacttcattctttatatatggacagctttattttaaatgtggtttttgatgcctttttttaagtgggtttttatgaactgcatcaagacttcaatcctgattagtgtctccagtcaagctctgggtactgaattgcctgttcataaaacggtgctttctgtgaaagccttaagaagataaatgagcgcagcagagatggagaaatagactttgccttttacctgagacattcagttcgtttgtattctacctttgtaaaacagcctatagatgatgatgtgtttgggatactgcttattttatgatagtttgtcctgtgtccttagtgatgtgtgtgtgtctccatgcacatgcacgccgggattcctctgctgccatttgaattagaagaaaataatttatatgcatgcacaggaagatattggtggccggtggttttgtgctttaaaaatgcaatatctgaccaagattcgccaatctcatacaagccatttactttgcaagtgagatagcttccccaccagctttattttttaacatgaaagctgatgccaaggccaaaagaagtttaaagcatctgtaaatttggactgttttccttcaaccaccattttttttgtggttattatttttgtcacggaaagcatcctctccaaagttggagcttctattgccatgaaccatgcttacaaagaaagcacttcttattgaagtgaattcctgcatttgatagcaatgtaagtgcctataaccatgttctatattctttattctcagtaacttttaaaagggaagttatttatattttgtgtataatgtgctttatttgcaaatcaccc

SEQ ID NO: 137048 - DNA, 1755 bp, Homo sapiens; identical to SEQ ID NO: 119697

SEQ ID NO: 137049 - DNA, 807 bp, Homo sapiens
ttaagaatatacagagtcctcctttttcagcagtaagtcaaggcctcggcggttttggaggacaactgcagctaaagagtcaacttgggcctggaggactgataaagtttgtgatacgtctgtgatgctagcagagaagtcattagagaggctacggaaggtcgtgacagaggttgaaatgcctgctattccagtaccgagagcaatagtgaaggcagaaagtcttaaactgacaagcaagggaattagtggaataactcttttttgtcgtgtcggtgtcatgaggggaacagggagctcttcggtcctatttgcaaattgaattttgggagtaaggaaaactagtgtgcatgtgcctgtccaattagcaggtagacacatgtaggtagaggatacacagaggaagaagacaccttgtgcgaggcaaaactggagatgcaaagtaaaaagatgagaaggagtgctgaaaggggtgtcttgtacccagactcctagggatccagctagggccacagccatcagaggttgtaatggggactgatgaggtaactgcacagaggaggaggttcgattttcatggtgtatgagaaaacgttgagtatctacgagcaacctttcactgttatttacagggccccatccccacccctgggtccataaaatggccagagccttttgttcgggctcccgtacgtaggtggtgagataattccccgccccactcccccgtgtgcactgatacattggaccttcacccagtgcccttcgaccaagagcatttaagtgttcccttttctcctcatccat

SEQ ID NO: 137050 - DNA, 3504 bp, Homo sapiens; identical to SEQ ID NO: 127068

SEQ ID NO: 137051 - DNA, 591 bp, Homo sapiens
atgcagaaagtatgtcatcaggcaactgccgacccctcagaagaggaagaaaacagcagcctgcaggcaagattggaaagaaggccacttgtccaggacactgataaccccatctcttcatccccagccagagtgaaactaactgactcttggtctgccatggactccccttcacagagggattttgccgatttcggaaccaccatcaaacaggattttcgcctgctggggcaaaccagcgtggaccgcttgctgcaactctctcagggccaggcggtgaagggcaatcagctgttgcccgtctcactgcgaactattgccaaacagattcagatggtccggcaagttggtaaaggccgatatggagaagtatggatgggcaaatggcgtggcgaaaaagtggcggtgaaagtattctttaccactgaagaaaacagctggtttcgagaaacagaaatctaccaaactgtgctaatgcgccatgaaaacatacttggtttcatagcagcagacattaaagtcccgcaagccaaaggcaacattgtggttatcacaaagctacatgacaaacagaggttttttcgaggataa

SEQ ID NO: 137052 - DNA, 1103 bp, Homo sapiens
atgctggcagcccttgcagcccttgcttgctctcagcgcctcttcggccttggcgcccactctggccgagcccttcagcctgccactgcactgtgggagcccctttctgggctggccaaggccgaagctggctccctcagcttgcggggaggtgtggagggagaggcgcagacaggaacggggctgcatatggcgcttgtgggccagcatgagttctgggtgggcgtgggcttggtggaccccaccctcagagcagccggccagctccaccagccctgggcagtggctgaagctaaagtcatagtcaaggttaatgctcctctttctttatctgacctctcccaaaatcagttagcatttaggctctttttcatcgaatataaaaacccagcccagttcatggtttgtttggcagcaaccctgacacgatttacagccctagaccctgaaagatcctctacctacatgtgtctacctgctaattggacaggcacatgcacactagttttccttactcccaaaattcaaattgcaaataggaccgaagagctccctgttcccctcatgacaccgacacgacaaaaaagagttattccactaattcccttgcttgtcggtttaggactttctgcctccactattgctctcagtactggaatagcaggcatttcgacttctgtcacgaccttccgtagcctttctaatgacttctctgctagcatcacagacatatcacaaactttatcagtcctccaggcccaagttgactctttagctgcagttgtcctccaaaaccgccgagaccttgacttactcactgctgtctggtctgcagatctcgaagcacaaaggtccttattacttatatttcttcttgtgccattattcacttttagatctccagtgtcctcatactgagtggcatttgaacaacttcctttttggcattttagcaatactccctgagaaaccaacaggatcaaggagatcaaagtcaaagtgagaataccattcacggttccagatattcccagtaagattttataccagtgcaacgtcactgaataatcctccaccttcaagtaggctccggtgtctgtcat

SEQ ID NO: 137053 - DNA, 1695 bp, Homo sapiens
atggaggccctcaacgacgcagacaaaaatggcctgaggaatgcaaactgtggtggacaagagaataagaatcaggcaagggattctccaaaagcccagctacgccggacaatagaatgttgtcggaccaatttatgtaaccagtatttgcaacccacactgccccctgttgtcataggtccgttttttgatggcagcattcgatggctggttttgctcatttctatggctgtctgcataattgctatgatcatcttctccagctgcttttgttacaaaggtcatctgctgttgcgtgttattcacattagaggacagttggaaagtgaggggggcgtgcctgttgtccttaggatcctatgcccacaaggagagaggaaggtgtcatcttctcctcttcctcagcatcagaggatcttagcctggtcagagcacagggagcatttcctctacatccccaagaggcagagggactttgctgcttctcctccctccaaagtaatggatctttgcctgtgctctggggcagggggaagaggacattattgcaagagcatctcaagcagacgtcgttacaatcgtgatttggaacaggatgaagcatttattccagttggagaatcactaaaagaccttattgaccagtcacaaagttctggtagtgggtctggactacctttattggttcagcgaactattgccaaacagattcagatggtccggcaagttggtaaaggccgatatggagaagtatggatgggcaaatggcgtggcgaaaaagtggcggtgaaagtattctttaccactgaagaagccagctggtttcgagaaacagaaatctaccaaactgtgctaatgcgccatgaaaacatacttggtttcatagcggcagacattaaaggtacaggttcctggactcagctctatttgattactgattaccatgaaaatggatctctctatgacttcctgaaatgtgctacactggacaccagagccctgcttaaattggcttattcagctgcctgtggtctgtgccacctgcacacagaaatttatggcacccaaggaaagcccgcaattgctcatcgagacctaaagagcaaaaacatcctcatcaagaaaaatgggagttgctgcattgctgacctgggccttgctgttaaattcaacagtgacacaaatgaagttgatgtgcccttgaataccagggtgggcaccaaacgctacatggctcccgaagtgctggacgaaagcctgaacaaaaaccacttccagccctacatcatggctgacatctacagcttcggcctaatcatttgggagatggctcgtcgttgtatcacaggagggatcgtggaagaataccaattgccatattacaacatggtaccgagtgatccgtcatacgaagatatgcgtgaggttgtgtgtgtcaaacgtttgcggccaattgtgtctaatcggtggaacagtgatgaagtgagtggaactcagtcccctgaagaagtgattcgtaaatgccaccaaatatattctctgctcactgaacatctctttacttttcagtgtctacgagcagttttgaagctaatgtcagaatgctgggcccacaatccagcctccagactcacagcattgagaattaagaagacgcttgccaagatggttgaatcccaagatgtaaaaatctga

SEQ ID NO: 137054 - DNA, 2730 bp, Homo sapiens
  misc_feature (1)...(2730): n = a,t,c or g
atgaaaaggataagagactactatgaacgatcacatgccaacaatttagacaacctagaagaaatggatgaattattagaaacacacaacctgccaggactgaatcacgaagaaacagaaaatcttaacaaacctataactacttctcttagtccattggctggggtctccagcactaaaaagaacactaaaaatgaacttagtattgttcttcctttcacgggaagtattttacccgttgggtttgctacacgccccagaggcttggctagctcaaaccccatccttctacacatggtggcctttctgtttgcaaatgggaccgaagagctccctgttcccctcatgacaccgacacgacaaaaaaaagttattccactaattcccttgatggtcggtttaggagtttctgcctccactattgctctcggtactggaataacaggcatttcaacctctgtcacgaccttccgtagcctgtctaatgacttctctgctagcatcacagacatatcacaaactttatcagtcctccaggccctagttgactcttcagctgcagttgtcctccaaggacaactccgaggccttgacttactcactgctgaaaaaggaggactctgtatattcttaaatgaagagtgttgtttttacctaaatcaatctggcctagtgtatgacaacataaaaaaactcaaggatagagcccaaaaacttgccaaccaagcaagacagaatctggatagtatgcttcatggcactgggatgaaatcagactccgaccagaaaaagtcagaaaatggagtaaccttagcaccagaggataccttgccttttttaaagtgctattgctcagggcactgtccagatgatgctattaataacacatgcataactaatggacattgctttgccatcatagaagaagatgaccagggagaaaccacattagcttcagggtgtatgaaatatgaaggatctgattttcagtgcaaagattctccaaaagcccacgtacgccggacaatagaatgttgtcggaccaatttatgtaaccagtatttgcaacccacactgccccctgttgtcataggtccgttttttgatggcagcattcgatggctggttttgctcatttctatggctgtctgcataattgctgatgatcatctcctccagctgcttttgttacaaacattattgcaagagcatctcaagcagacgtcgttacaatcgtgatttggaacaggatgaagcatttattccagttggagaatcactaaaagaccttattgaccagtcacaaagttctggtagtgggtctggactacctttattggttcagcgaactattgccaaacagattcagatggtccggcaagttggtaaaggccgatatggagaagtatggatgggcaaatggcgtggcgaaaaagtggcggtgaaagtattctttaccactgaagaagccagctggtttcgagaaacagaaatctaccaaactgtgctaatgcgccatgaaaacatacttggtttcatagcggcagacattaaaggtacaggttcctggactcagctctatttgattactgattaccatgaaaatggatctctctatgacttcctgaaatgtgctacactggacaccagagccctgcttaaattggcttattcagctgcctgtggtctgtgccacctgcacacagaaatttatggcacccaaggaaagcccgcaattgctcatcgagacctaaagagcaaaaacatcctcatcaagaaaaatgggagttgctgcattgctgacctgggccttgctgttaaattcaacaagtgacacaaatgaagttgatgtgccctttgaataccagggtgggcaccaaaccgctacatggctcccgaagtgctggacgaaagcctgaacaaaaaccacttccagccctacatcatggctgacatctacagcttcggcctaatcatttgggagatggctcgtcgttgtatcacaggagggattgtggaagagtaccaattgccatattacaacatggtaccgagtgatccgtcatacgaagatatgcgtgaggttgtgtgtgtcaaacgtttgcggccaattgtgtctaatcggtggaacagtgatgaatgtctacgagcagttttgaagctaatgtcagaatgctgggcccacaatccagcctccagactcacagcgttgagaattaagaagatgcttgccaagatggttgaatcccaagatgtaaaaatctgatggttaaaccatcggaggagaaactctagactgcaagaactgtttttacccatggcatgggtggaattagagtggaataaggatgttaacttggttctcaccactctttcttcactacgtgcctcacaggctgctaatattaaacctttcagtactcttattaggatacaagctgggaacttctaaacacttcattctttatatatggacagctttattttaaatgtggtttttgatgcctttttttaagtgggtttttatgaactgcatcaagacttcaatcctgattagtgtctccagtcaagctctgggtactgaattgcctgtttcataaaacggtgctttctgttgaaagccttaaagaagataaatggagcgcanagtagatgggagaaatagactttggccttttacctggagacattgcagttncgttttgtaattctacctttngttaaaacagc

SEQ ID NO: 137055 - DNA, 1056 bp, Homo sapiens
ttttttttttttttttttttttttttttttttttttttcacaggaaaagacctgaagctttaattaaggggttacatccaaccccaaagcgcttttgggggcactgattgctccagcttttgcgtcactgcccgagggaagagggaagaggatccaggcgttaaacatgtttagacccaaaaacagttggagattgggcttaaaatacccaccaagctccaaagaaaagacccaagtccccaaaacattgatttcagggctgccagaaaggaaaagcaccaccagggtgggagagaagctccagtcagcccacaaaatgccattgtcccccggcctcctgttgttgttgttttccggggccacggccaccgctggcccttgcccttggagggtggccccaccggcccgagacagcgagcatatgcaggaagcggcaggaataaggaaaagcagcctcctgactttcctcgcttggtggtttgagtggacctccccaggccagtgccgggcccctcataggaaaggaagctcgggaggtggccaggcggcaggaaggggcacccccccacgcaatccgcgcgccgggacagaatgccctgcaggaacttcttctggaagaccttctcctcctgcaaataaaacctcacccatgaatgctcacgcaagtgtaatgacagacctgaataaaatgtattaagcagcagtgatctttcctctcctccttcccaagtcatttgaaaagtgtttgttatttaaattccaataatgcccaatactgacgtgtcttgagtaatttggaacccaaaagtgaagatctttgataaagattttttttgtggttcgactggactgtgctgagtgcgggcactgggcttttcttctgatgttcattatggtgctgggaagctctgtctttgatttaaaataaaatagctaaaggctacacaattaagagttcagaataacatcttatttcagtttatgaattgatatgaattgtctaatttaaaaaatatttccctcacattaaaagcccatttttaacatcaaaaaaaa

SEQ ID NO: 137056 - DNA, 500 bp, Homo sapiens
ggaattcgcctcccgtcttctgcagactggcagaagaccgaggcccagaagcgacgcgaacagcttgctgctagatgagctggtggccctggtgaacaagcgcgatgcgctcgtcagggacctggacgcgcaggagaagcagtgagtgggcagtggggtcgggtcgaggctgggccacctgccgaggggccgagaagtgtgcggaaagttcaatccaaaggtcgcgggagggccggggcagcctcccactggcctggtgctccccattcccgctggggatccaaatactgggcgacgggggagtgctgctctgccctccacgaaaaaaaataattttgtttcctgtttgtcctgtttgtctgacatccagggccgaagaagaagatgagcatttggagcgaactcttggagcaaaacaaaggcaagatggccaagaaagaggagaaatgtgttcttcagtagccatcagatcagaaagaatctctcccaacattttagag

SEQ ID NO: 137057 - DNA, 667 bp, Homo sapiens
gcggtggaattcgtctgatccagatgctgatagaaccactttaaatcatgcagatcattcatcaaaaatagtccagcatcgattgttatctagacaagaagaacttaaggaaagagcaagagttctgcttgagcaagcaagaagagatgcagccttaaaggcggggaataagcacaataccaacacagccaccccattctgcaacaggcagctaagtgatcagcaagatgaagagcgacgtcggcagctgagagagagagctcgtcagctaatagcagaagctcgatctggagtgaagatgtcagaacttcccccgctatggtgaaatggctgcagaaaagttgaaagaaaggtcaaaggcatctggagaacaaaacagtaagttggtggacttgaagctgaagaagctcctagaagttcagccacaggtggcaaattcaccctccagtgctgcccagaaagctgtaactgagagctcagagcaggacatgaaaagtggcacagaagatctccggactgaacgattacaaaaaacaacagaacgttttagaaatcctgttgtgttcagcaaagattctacagtcagaaaaactcaacttcagtctttcagccaatatattgagaatagaccagagatgaaaaggcagagatcaatacaggaagatac

SEQ ID NO: 137058 - DNA, 1440 bp, Homo sapiens
atgtggacaggccacttggagagagagagagatgctgggccatctgcgagttgttctagccttttcagccaagatcaaacggagcaggcaggagccgtaaccccccagcacagcttgcccaaacggcggctgcagacccagacatccctgcattcttgtgggcctgggaaggcttcccctgccctctcagcctcagaagtgcctgcttctgctgtctggcttctccctgctattggcacctgctccaatcttggaacaaagttggagctgagctcgggtgctgtcacagcccggccagaaattgtaaaccagttgaatgctctgagcagcttagatgaagatcaagatgactgcataaagcaagcaaatatgcgttcagctaaatcagccagttcctctgaagagcttatcaacaaacttaactttttggatgaagcagaaaaggacttggccaccgtgaattcaaatccatttgatgatcctgatgctgcagaattaaatccatttggagatcctgactcagaagaacctatcactgaaacagcttcacctagaaaaacagaagactctttttataataacagctataatccctttaaagaggtgcagactccacagtatttgaacccattcgatgagccagaagcatttgtgaccataaaggattctcctccccagtctacaaaaagaaaaaatataagacctgtggatatgagcaagtacctctatgctgatagttctaaaactgaagaagaagaattggatgaatcaaatcctttttatgaacctaaatcaactcctcctccaaataatttggtaaatcctgttcaagaactagaaactgaaaggcgagtgaaaagaaaggccccggctccaccagtcctctcaccaaaaacaggagtattaaatgaaaacacagtttctgcaggaaaagatctctctacttctcctaagtgcacacatgtgtgcaccctgccaccccgccattgctggtgtaagcatatgcacacagaccctgccaccctgcccctgccagcatgtaggcactgctgccccatccctgctggtgtatgtgcaccccacctcattgccgccaccagtgcaagtgcacatgcacagtccccactgccccatcagtatgggcatgaacctcactgctgccaccccgatgaaatgcttttgccagcaccccacatcagagtgatcttgccagcagactgggaacatctcaggccctcgagcacagcagctaaagcagtattaagaggacagcttgtaacaccaagtgcccacattaaaaagttagaaaggtctcaaattaacaacgttataccacacctagaggaactagggaatcaagaacaaaccaaccgaaagctagcagaagatgacaaatcttcagccaaaatcagagctgaagtctatgaaatcgaggcttga

SEQ ID NO: 137059 - DNA, 2011 bp, Homo sapiens
atggcaaaaccctatctctacaaaaaatatggaaatcagcagggcgtggcagcgattcctgacgtcccagctgcttgggaggctgagccaagccctataccaagtcctgttttggggcgaaagccaaatgctagtcagtctttgcttgtatggtgtaaagaagttacaaagaactaccgaggagtaaaaatcaccaattttactacatcgtggagaaatggtttatctttttgtgcaatattacaccactttagaccagatttaattgactacaagtctctgaatcctcaagatattaaagagaacaacaaaaaggcatacgatggatttgccagcataggaatttcccgattattggaaccttctgatatggtattattagcaattcctgataaactgactgttatgacttatctctatcaaataagggcacatttcagtggccaagaactaaatgtcgttcagatagaggaaaacagcagtaaaagcacatataaagttggaaactatgaaacagatacaaacagttctgttgatcaagaaaaattctatgcagagcttagtgatctgaagcgggagcctgaactacaacagcctatcagcggagcagtagacttcttatcacaggatgactctgtatttgtaaatgatagcggggttggagagtcagaaagtgagcatcaaactcctgatgatcaccttagtccaagcacagcctccccttactgtcgcaggactaaaagtgacacagaaccccagaagtctcagcagagctctggaaggacttcaggatctgatgaccctggaatatgttccaatacagattcaacccaagcacaggttttgttaggcaaaaagagactattgaaagctgagactttagaattgagtgacttatatgttagtgataagaagaaggatatgtctccaccctttatttgtgaggagacagatgaacaaaagcttcaaactctagacatcggtagtaacttggagaaagaaaaattagagaattccagatccttagaatgcagatcagatccagaatctcctatcaaaaaaacaagtttatctcctacttctaaacttggatactcatatagtagagatctagaccttgctaagaaaaaacatgcttccctgaggcagacggagtctgatccagatgctgatagaaccactttaaatcatgcagatcatttcatcaaaaatagtccagcaagatgaagagcgacgtcggcagctgagagagagagctcgtcagctaatagcagaagctcgatctggagtgaagatgtcagaacttcccagctatggtgaaatggctgcagaaaagttgaaagaaaggtcaaaggcatctggagatgaaaatgataatattgagatagatactaacgaggagatccctgaaggctttgttgtaggaggtggagatgaacttactaacttagaaaatgaccttgatactcccgaacaaaacagtaagttggtggacttgaagctgaagaagctcctagaagttcagccacaggtggcaaattcaccctccagtgctgcccagaaagctgtaactgagagctcagagcaggacatgaaaagtggcacagaagatctccggactgaacgattacaaaaaacaacagaacgttttagaaatcctgttgtgttcagcaaagattctacagtcagaaaaactcaacttcagtctttcagccaatatattgagaatagaccagagatgaaaaggcagagatcaatacaggaagatacaaagaaaggaaatgaggagaaggcagcgataactgaaactcagaggaagccatcagaagatgaaaaagggttcaaagacaccagtcagtatgtagtaggagaattggcagcactagagaatgagcaaaagcaaattgacacccgtgccgcgctggtggagaagcgccttcgctatctcatggacacaggacagaatctgatcctaactggatctgctactgcagatttagaccaaaactga

SEQ ID NO: 137060 - DNA, 4231 bp, Homo sapiens
cctatgccaactcatactgatgtcatgttaaaattcaagccattatctaaaaaagttggatctgccgctcttcagttttcattatcttgcatttttctgagggaaggaaaagccacagatgaagacatgcaaaggttggcctagttggatgagtatgaagccaggctgacattggccaatttagatgacttcgaagaagataatgaagatgatgatgagaacagagtgaaccaagaagaaaaggcagctaaaattacagagcttatcaacaaacttaactttttggatgaagcagaaaaggacttggccaccgtgaattcaaatccatttgatgatcctgatgctgcagaattaaatccatttggagatcctgactcagaagaacctatcactgaaacagcttcacctagaaataacagaagactctttttataataacagctataatccctttaaagagggtgcagactccacagtatttgaacccattcgatgagccagaagcatttgtgaccataaaggattctcctccccagtctacaaaaagaaaaaatataagacctgtggatatgagcaagtacctctatgctgatagttctaaaactgaagaagaagaattggatgaatcaaatcctttttatgaacctaaatcaactcctcctccaaataatttggtaaatcctgttcaagaactagaaactgaaaggcgagtgaaaagaaaggccccggctccaccagtcctctcaccaaaaacaggagtattaaatgaaaacacagtttctgcaggaaaagatctctctacttctcctaagccaagccctataccaagtcctgttttggggcgaaagccaaatgctagtcagtctttgcttgtatggtgtaaagaagttacaaagaactaccgaggagtaaaaatcaccaattttactacatcgtggagaaatggtttatctttttgtgcaatattacaccactttagaccagatttaattgactacaagtctctgaatcctcaagatattaaagagaacaacaaaaaggcatacgatggatttgccagcataggaatttcccgattattggaaccttctgatatggtattattagcaattcctgataaactgactgttatgacttatctctatcaaataagggcacatttcagtggccaagaactaaatgtcgttcagatagaggaaaacagcagtaaaagcacatataaagttggaaactatgaaacagatacaaacagttctgttgatcaagaaaaattctatgcagagcttagtgatctgaagcgggagcctgaactacaacagcctatcagcggagcagtagacttcttatcacaggatgactctgtatttgtaaatgatagcggggttggagagtcagaaagtgagcatcaaactcctgatgatcaccttagtccaagcacagcctccccttactgtcgcaggactaaaagtgacacagaaccccagaagtctcagcagagctctggaaggacttcaggatctgatgaccctggaatatgttccaatacagattcaacccaagcacaggttttgttaggcaaaaagagactattgaaagctgagactttagaattgagtgacttatatgttagtgataagaagaaggatatgtctccaccctttatttgtgaggagacagatgaacaaaagcttcaaactctagacatcggtagtaacttggagaaagaaaaattagagaattccagatccttagaatgcagatcagatccagaatctcctatcaaaaaaacaagtttatctcctacttctaaacttggatactcatatagtagagatctagaccttgctaagaaaaaacatgcttccctgaggcagacggagtctgatccagatgctgatagaaccactttaaatcatgcagatcattcatcaaaaatagtccagcatcgattgttatctagacaagaagaacttaaggaaagagcaagagttctgcttgagcaagcaagaagagatgcagccttaaaggcggggaataagcacaataccaacacagccaccccattctgcaacaggcagctaagtgatcagcaagatgaagagcgacgtcggcagctgagagagagagctcgtcagctaatagcagaagctcgatctggagtgaagatgtcagaacttcccagctatggtgaaatggctgcagaaaagttgaaagaaaggtcaaaggcatctggagatgaaaatgataatattgagatagatactaacgaggagatccctgaaggctttgttgtaggaggtggagatgaacttactaacttagaaaatgaccttgatactcccgaacaaaacagtaagttggtggacttgaagctgaagaagctcctagaagttcagccacaggtggcaaattcaccctccagtgctgcccagaaagctgtaactgagagctcagagcaggacatgaaaagtggcacagaagatctccggactgaacgattacaaaaaacaacagaacgttttagaaatcctgttgtgttcagcaaagattctacagtcagaaaaactcaacttcagtctttcagccaatatattgagaatagaccagagatgaaaaggcagagatcaatacaggaagatacaaagaaaggaaatgaggagaaggcagcgataactgaaactcagaggaagccatcagaagatgaagtgcttaataaagggttcaaagactcccagtcagtatgtagtaggagaattggcagcactagagaatgagcaaaagcaaattgacacccgtgccgcgctggtggagaagcgccttcgctatctcatggacacaggaaggaacacagaagaagaagaagctatgatgcaggaatggtttatgttagttaataagaaaaatgccttaataaggagaatgaatcagctctctcttctggaaaaagaacatgatttagaacgacggtatgagctgctgaaccgggaattgagggcaatgctagccattgaagactggcagaagaccgaggcccagaagcgacgcgaacagcttctgctagatgagctggtggccctggtgaacaagcgcgatgcgctcgtcagggacctggacgcgcaggagaagcaggccgaagaagaagatgagcatttggagcgaactctggagcaaaacaaaggcaagatggccaagaaagaggagaaatgtgttcttcagtagccatcagatcagaaagaatctctcccaacattttagagtcttgcttcccaaaccagaaaaagtcagactcattgttgatttaaaacttttaacattttgtttttggctggattgtaactactttaccctctacttttacccaccaccacccttttcctccctcctttcccaaataatatacagactcccaaaatagcttcattttaaggatttttttggtgaggtaaccaatttccttgaaatcctgtgaaatagatttgcacagacaccttgtgagtgattggtattggaggtgttcaagaaactgttcgaaaaagaagaaaaacacttccctcggttattttctctcattttttgatgagaggaaaatttgaaaccattattcttgttgttgttggtaatagcataatgacagtgggaggggtacaaggggataagaaaaatgtcatgatttttttccggtcctgccacatgtaacacttacctctgttaccctaaattttatagttagatcatatcccaatctacttaattaaactgtgttctatttacccagtgggagtttttctgcagtggttgcgtttcactgtaaggataatgggagttcctctcctctgcttttcctcagaggagggtccttttaacatagccagaaacaagccctgtggtttgaaggtgagctgtgaggatgggactaattgatatgccccagtttacaaagacagtcttatcatccgagaatacaccatccttttttctctggaaaattatttcttacatcatgcttgattccctacattttgttgggtctcaaccattggctcacgaaatgctgttaatatttattctgtattgataaaaagtctgtcttgccactacaagtaaatcccccatttaatattttcttctttagcatagcactgtcattttttgtgaaaatggttatgtttatttattacaatactgagtcatatataaattttcaataaaagcagaaaattatacttacctt

SEQ ID NO: 137061 - DNA, 517 bp, Homo sapiens
cgccccgcggcgcctcgacacgagcgacgtcctgcagcagatcatggccatcaccgaccagagcctggacgaggcacaggccagaaagcatgctctgaattgccatcggatgaagcctgctctgttcagcgtgctctgtgagatcaaggaaaagacagtggtaagcatccgtggcattcaagacgaagatccccctgacgcccagctcctgaggctggataacatgctgctggctgagggcgtgtgcaggcccgagaagagaggaagaggaggagcggtggccagggccggcacagcaacaccaggtggctggtccaaatgacaatagcattgagcactctgactacagggccaagctgtcccagatccgacagatttaccactctgagctagagaaatatgaacaggtgatctttctgcatggaagagtttcttgcatgtgattgcgcatttgtcaaagcgaaacacggaacgctaaccacctttctttcgtggcgcagaacagggagtccatgca

SEQ ID NO: 137062 - DNA, 625 bp, Homo sapiens
aaagcatgctctgaattgccatcggatgaagcctgctctgttcagcgtgctctgtgagatcaaggaaaagacagcactccctgatggtgcttcagcattcgtgtggaatggccaagtctcagcccagaggaaactgttcatggtcctgatcctgcaccctgtggtacccacgggccgcctcttgaagggcaatcccatgagccggggtcctggcgtgcttctcgatttaacccacagttctcacatttccctctggctgaagtctgcagcaggccttatggagtgcaccatccaggagaagaatagggatggctgcctgaagattgtctatttggggagctctaagacctcttctatgaacgcaaaaaatacggcttcaagaagaggtgattgggtgtgtgacggatgtggctcacttcttcggtgccccacagctcaaacccctaagggggagcatgcagtcagacaggaacgtggaatgccggctccttccaagtggcagtgccaccgccacccgcaagacagtaatgacgcagaggggaagcaggcatcctacagatgcgtgcgaggaaataggtttactctcaattctggactgttccaccccagctcttacgggccctga

SEQ ID NO: 137063 - DNA, 526 bp, Homo sapiens
  misc_feature (1)...(526): n = a,t,c or g
ctgccgctgctttaatactnntagaggccctaaaaatcacaacgtatgctcaactcactctctacatttctcgtaacttccaaaatctactttcttcctcatacctgatgcatatactttctgctccccggctccttcagctgtactcactctttgttaagtcccacaattaccattgttcctggcccggacctcaatctggcctcccacattattcctgataccacacctgacccccatgactgtatctctctgatccacctgatattcaccccatttccccatatttccttctttcctgttcctcaccctgatcacgcttgatttattgatggcagttccaccaggcctaatcgccacacaccagcaaagtcaggctatgctatagtacaagccactagcccgcctctcagaacctctcatttcctttccattgtggaaatctatcctcaaggaaataacttctcagtgttccatctgctattctactactcctcagggattattcaggctatctcctgcctcc

SEQ ID NO: 137064 - DNA, 3184 bp, Homo sapiens
atgggcacttattaccagaaacaccagacagccagagatctgctggccctggggggcaatcctttcctttctttgcttggtaaagggtgggtccagttgatgaagacggtctggtcctctcttccaggcaaagagaggacggagattgggctggggccaggtatctgggagctgggtctgctctcctgggtggagctttcccaggccagtggtgcagaccaatggggactgaagttggagatcctggtaagacagctccagggatacccaaaggaaaaaaccaagctaatggaggcagccagaaaacaggacacaccgcagaacaaaagatggatcaccaagtggaaaaatgaagcagaggagatcggaggagggctccacagttttacaagtaaagaagataattatactctagttgttgacatgaactgcttggatgttcagggttgtggtgatgacgtgaacaacagacttcttcactctgcaagttacccaacagcaagctgggtggatgaagccatgccaacagcatctggcaggagccagcaccaagcacaccttacacagcttcgacagagctgcacggagaacacatatgcttgctccctctgtctctcatacaaagtaccttatagtgtgagctccagacacacagacactgccatcctgcctacaaagaaaggaatgcagacacagccaacgtcagcattcggggtgggaccacagtggaacgcatacatcctttcacagctgccaaggccttctgggaagtccaatgcctgcccccacatctctcagagccaaacatcttcttctgcactttccacaagttacaattatgtatttacctgtgtgcttactgccctaacctcctacttatggactgatgtttatgtccctccaaagttcacatgcactgctgttaggatcaaagtgaccatccatgatgcacagagcacgtaccagggtaaagttccagctgggacgcaggcatcagcaattgtagaatttgggttctcccttcctcagatccctgactgtccttggtcattcaagaaagattcactgtccctaggccaagagtcaggagcaaaacaggaacaccaagggtatggtctgaggatgttgtcagcagggagcaacgaccaagcaggacactgggagctgctgtcccgtctgcaggcgggactccatgaaggcccctgtctgcccttccagcctttgccacaaaccctcgaacgctggctgcacactggaatcacttggggagcttttaaaagatacggaggcctgggtctgactcccgcccaggacctcagaaagggcctgccccgcgcgaatccccagtcgctgggacttacttggccaccaggtttacagacttcgcagccgctgagagctagagaagagcccggagagcgccatggtccggggacgccggggccgggaagcgccgtggcccgggaggacgctgctcccgcagtagcgcgagggaggggcaggaccggggcggctgcctcgcgggcccggaacgggaactggctgcgactacagccgcagccgcgcccctctgttggcgcgcccaagagcctgccggctgctgggagaggccgccgaagggcgggggcggtcaaggcagggtcccacggtgctgccattcgcccgggtgaaataaacagctttattgctcacgcaaagccttttggtggtctcttcacacggacacgtgtgacatttggtgccgaagacccgggacaggaggactccttcaggagaccagtcccctgtcctcaccctcactctgtgaggagatccacctatgacctcgggtcctcagaccaaacagcccaaggaacatctcaccaatttcaaatcggatcttctcggactgacgctgcccgatcgcctcagaagcctcctggaccatcacagatgctttgggtaactcttacagtggaggcatggccttttaaatcctataaactctccttacaattcccccattttacctgtccaaaaaccggacaagccttacaggttagttcagcatctgtgccttatctaccaaattgttttgcctatccaccccatggtgccaaacccatatactctcttatcctcaatacccttcacaacccattattctgttctggatctcaaacatgctttctttactattcctttgtacccttcatcacagcctctcttcgctttcacttggactgaccctgacacccaccaggctcagcaaattaccttggctgtactgccgcagtgcttcatagatagcccccattacttcagtcaagcccaaatttcttcctcatctgttacctaccttggcataattctcatgaaaacacacataggactgggcgccgtggagcagggggtggtgctcgtcggggaggctcgggccgcacaggagcccatggagtgggtgggaggctcaggcatggtgggctgcaggtcccgagccctgccccgtgggaaggcagctaaggcccggcgagaaatcgagcgcagcgccgttaccattgttcctgtcctggacttcaatccggccttccacattattccggataccacacctgaccaccatgactgtatctctctgatccacttgacattcactccatttccccatatttccttctttcctgttcctcaccttgaacacacttggtttattgatggcagttccaccagacctaactgccactcaccagcaaaggcaggctatgctatagtatcttccacatctatcattgaggctactgctctgccccgctccactacctctcaacaagccaaactcattgcctatactgactctaaatgtgccttccatatcctgcaccaccatgctgttatatgggaagaaagaaatttcctcactatgcaaggggcctccatcattaatgcttttttaataaaaactcttctcaaagacattttacttccaaaagaagctggagtcattcactgcaagggccatcaaaaggcatcagatcctatcactcaggacaatgcttatgctgataaggtagctaaaaagcagctagcgttccaacttctgtccctcacggccgtttttctccttctcatccggccactctcacctacttccccactaaaacttccacttatcaatctcttcccacacaaggcaaatgattcttag

SEQ ID NO: 137065 - DNA, 1482 bp, Homo sapiens
atggaagaaaactttatcagagtgttcttcaccaccacgacaatgctcctgctcattgctctcatcaaacaaggggaactttgtgagagttttgatgggaaatcattagatggcagagacgaaagagttgtaatatgctttgatgctgctgcagggctgcacagagcctgctccatcagaggggaacaacagaatttgggaacacattacttcacatggcagaggctttttgcagaggtgattaaattaggtggattaatgaagccaaaagcaagaaatgccagcagcctctggaaggaaaagacaaagaatggatttttttccctagagactccagaagaaaggcagacctctgacctccataagtatcagttggcatttaggctctttttcatcaaatataaaaacccagcccagttcatggcccatttggcaacaacccttagacactttacagccctagaccctgaaagctctcataacttccaaaatctattttcttcctcacacctgatgcatatactttctgctccccggctccttcggctatactcacgctttgttgagtctcccacagttaccattgttcctggcccggacttcaatccagcctccaacattattcctgataccacacctgacccccatgactgtatctctctgatacacttggcattcactccatttccctatatttccttctttcctgttcctcaccctgatcacacttggtttattgatggcagttccaccaggcctaattgccacacaccagcaaaggcaggctatgctatagtatcttccacatctatcattgaggctactgctctgcccccctccactacctctcggcaagccgaactcattgccttaactcaggccctcactcttgcaaaaggactacgcatcaatatttatactgaccccatatcctgcaccaccatgctgttttatgggctgaaaggtttcctcactatgcaagggtcctccatcattaatgcctctttaattaaaactcttcttcaggccgctttacttccaaaagaagctgaagtcattcactgcaagggccatcaaaaggcatcagatcccatcactcagggcaatgcttatgctgataaggtgccatctttggcccatgcccccacccttactttagcgcctgtgctacagtgcccccttcgggaagtagcaggaactgaagacgataacggaaaagcggttctagaaattccttcaaacatcagaaaatcagcccatgtaccagtacaaacctggaagggatgggacccaacaaaccttttaggagggtggttctctaatttaggaggatttaaaactctggtagggacagtcatcttcatcattgggttcctcctatttctcccctgtgttatcccacggataataaaagccattaaaactcttgttgaaactacagttagccgccagataatccagacgatcctcctgctacaatga

SEQ ID NO: 137066 - DNA, 1809 bp, Homo sapiens
atgcaagttaatctgaaaaaccacaacttttctgaagccactggagagctaaattcacaaggaaaccaattaacctggaatctaaggaaagatctgcatcttcaagaagatggaactggagtacttgcttacctgggaaaaatgccagacctgatgccagccagggacaaaggagacacgttttatctgtggaccgacccaaaactctggcgccggtcatggactagggaaggcagccttcccttggtgtttaatcattgcagggatgccgcctctctgattattcacccaggtttcagaggtgtcagaccacacaaggacgcctgccttagtccttcaacccttagcaacaagtcccgcttttctggaggagggaacatcacggacgccaggctttatgtaactctcacagtggagggcatagttggatactttcacctttggatacctggttttgccatcctaacaaaaccgttatataaactcacaaaaggaaacctagctgaccccatagatcctaaatcctttctccactcctctttccattccttgaagacagctttagagactgcccccaccctagctcttgctgactcatcccaacccttttcattacacacagcagaagtgcagggctgtgcagttggaattcttacacaaggactgggatcgcatcctgtaggctttttgtccaaacaacttgaccttactgttttaggatggccatcatgtctccgtgcagcagctgctgccaccctaatacttttagaggtccttataatcacaaactatgctcaactcactctctacagctctcataatttccaaaatctattttcttcctcacacctgatgcatatactttctgctccccggctccttcagctataccccactctttgttgagtctcccacaattaccgttgttcctggcccagacttcaatctggcctcccacattattctggataccacacctgacccccatgactgtatctctctgatccacctgacattcactccatttccccatatttccttctttcctgttcctcaccctggtcacacttggtttaacgacggcagttccaccaggcctaatcgccattcaccagcaaaggcaggccatgctatagtattttccacatctatcatcgaggctactgctctgcccccctccactacctctcagcaagccgaactcattgccttaatttgggccctcactcttgcaaagggactacatgtcaatatttatattgactctaaatatgccttccatatcctgcatcaccatgctgttatatgggctgaaagaggtttcctcgctatgcgagggtcctccatcattaatgcctctttaataaaaactcttctcaaggccgctttacttccaaaagaagctggagtcattcactgcaagggccatcaaaaggtgtcagatcccatcactcagggcaatgcttatgctgataaggtagctaaagaatcagctagtgtcccaacttctgtccctcgtggccagtttttctccttctcatcagtcactcccacctactctcctactgaaacttccacctatcaatctcttcccacacaaagcaaatggttcttggaccaaggaaaatatctccttccagcctcacaggcctgttttattctgtcgtcatttcataacctcttccatgtaggttacaagccgctagcccacctcttagaatatctcatttcctttctttcatggaaatctatcctcaaggaaatcacttctcagtgatccatctgctattctactactcctcagggatt

SEQ ID NO: 137067 - DNA, 496 bp, Homo sapiens
  misc_feature (1)...(496): n = a,t,c or g
ntcgaaaactagatccctagccangtgcgtggaattccaagaaggacccagaggatgtcaaagaggtggtggtctggaagcggtacagcgacttccgtaagctgcatggagacctggcctacacccaccgcaacctcttccgccgcctcgaggagttccctgctttcccccgggcccaggtgtttggccggtttgaagcctcagtgatcgaggagcggcgaaagggggcagaggacctgcttcgcttcactgtgcacatacctgcgctcaacaacagcccccagctcaaggagttcttccggtggaccccccaccatccagccctgcccaggaggccctggatctcctctttaactgtgagagcaccgaggaggcatctggttcccctgcccgaggccccctcaccgaggctgagcttgccctcttcgaccccttctccaaggaagaaggcgcagcccccagccccacccatgtggctgagctggcaacgatggag

SEQ ID NO: 137068 - DNA, 352 bp, Homo sapiens
gaggccccctcaccgaggctgagcttgccctcttcgaccccttctcccaaagtgctgagattacaggcatgagtcactacgcccggcccatgtctgtctgtcttgatgtgtgamcagcagctgtggtcattaaaccattagtttacccctctagaactggggtctgcaaactcccacctgcagccaaatctggcccacctcctttttaatgtaagggctgtgagagtggtttttactttttttaatgattaaaaaaatcaaaataatattctgtgacaatgacaggtgaaatttatatgtgacaagtgaaaattatatgaaatttaagggtccataaataaaayttgtkggg

SEQ ID NO: 137069 - DNA, 414 bp, Homo sapiens
cctgtcgggcaggcaacgggtcactggggactccctgaagcaagacgtgcacgccgtctcgatagccctggagtgcagcagcgtaagcgcctgccttctcatcccgcagggcctgggtgatgagctctgtggcctggcttaggtaggcaggggtgggccctccttccccatcctcttcctcctcctgccctcctggctcccagggttcctggtccagccttgcagactccacctccatcgttgccagctcagccacatgggtggggctgggggctgcgccttctgcagttagaaagggaggactcggaccagactggcccttcctttcccaggccctctgcccaaccccaagacttcttttgtccatcagggtatcagcctgtccccagtagaggggaccaatgccagagcaat

SEQ ID NO: 137070 - DNA, 627 bp, Homo sapiens
gccgccggtcctgctttggcttcgaggggctgctgggggcaaaagacttgtccggagtctcgccagtggtgtgctccaaactcaccgaggtccccagggtttgtgcaaagccctgggccccagacatgactctccctggaatctccccaccacccgagaaacagaaacgtaagaagaagaaaatgccagagatcttgggtggggaggtgacccgacccttggaggtgtccagggacctacacatcctgccaccccctctgatccccaccccgccccctgatgacccccggctatcccaactgctccctgcagaaaggaggggcctcgaggaattggagctcgcccctgcgaggaccccgccggattctgtgaaagatgcttccgccgcggagcccgcggcccccgagcgggttcttggagatgtcccgggggcctgcacgcccgtcgtacccacccgcatccccgcgatagtcagcctgagccgcggcccagtctcgccgctcgtgcgcttccagctgcccaatgtgctgttcgcctacgcgcatactctcgccctgtatcacggcggtgacgacgcgctgctctctgacttctgtgccacactgctcggcgtttccggagccctgg

SEQ ID NO: 137071 - DNA, 570 bp, Homo sapiens
atgcgcacgcgcagaccgcggccaggccttggagctgcgcccgaaggggcggcgaaggatgacttcctgcggcactacacagtgtcggaccccaggactcaccccaagggctacaccgagtacaaagtaaccgcgcagcctcccgagtacctgggactacaggtgcacgctgccacgccccagcacgagtctctggaaaaagacaacctcgccctgcggaaggagatccagtccctgcaggccgagctggcgtggtggagccggaccctgcacttcatctcaaagaaggacccagaggatgtcaaagaggtggtggtctggaagcggtacagcgacttccgcaagctgcatggagacctggcctacacccaccgcaacctcttccgccgcctcgaggagttccctgctttcccccgggcccaggtgtttgccttacctaaggccaagtgggagaatttccaggcatcagcatctttgatcagctccccagggtcccacagcacctgctgctacacagtgtccagtctggaccatggagtgagcaactcgggctccttcaaaggagcctga

SEQ ID NO: 137072 - DNA, 1930 bp, Homo sapiens
tttcgtggcggaggctgggccggaggggtggggactgctttgaggtggaggccggcgctccgctccgctccagctcggtttcatgtcccgccaggcgaaggatgacttcctgcggcactacacagtgtcggaccccaggactcaccccaagggctacaccgagtacaaagtaaccgcgcagttcatctcaaagaaggacccagaggatgtcaaagaggtggtggtctggaagcggtacagcgaccttccgcaagcctgcatggagaccctggcctacacccaccgcaacctctttccgccgcctcgaggagttccccgcttttcccccgggcccagggtgtttggccggttttgaagcctcagttgattcgagggagcgggcgaaagggggcagaggacctgcttcgcttcactgtgcacatacctgcgctcaacaacagcccccagctcaaggagttcttccggggtggggaggtgacccgaccctttggaggtgtccagggacctacacatcctgccaccccctctgatccccaccccgccccctggatgacccccggctatcccaactgctccctgcagaaaaggaggggcctcgatgaattgggggtggccagtggaaccccccaccaattcagccctgcccaggaggccctggatctcctctttaactgtgagagcaccgaggaggcatctggttcccctgcccgaggccccctcaccgaggctgagcttgccctcttcgaccccttctccaaggaagaaggcgcagcccccagccccacccatgtggctgagctggcaacgatggaggtggagtctgcaaggctggaccaggaaccctgggagccaggagggcaggaggaggaagaggatggggaaggagggcccacccctgcctacctaagccaggccacagagctcatcacccaggccctgcgggatgagaaggcaggcgcttacgctgctgcactccagggctatcgagacggcgtgcacgtctttgcttcagggagtccccagtgacccgttgcctgcccgccagaaaggtgtgaagaagaaggcagctgagtacctgaagcgggcagaggagattctgtgcctgcacctgtctcaactcccaccctaacagggagtgggcccttccctgggactctcgctcctgcactgccagccccttctcctctccccagggcctggccctacctcctggtcttgtaattacaggagccatttctgtaggtaactggaccaagaatgagaaaaataatgaattcttagctccctgattacacctgccaccttggaatccaggactcacacttctgaccctgcctgtctttttggggtttttttgagttggagtctcgctgtgtcgcccagactggagtgcagtggtgggatcacggctcactgcaacctccacctcccaggttcaagcagttctcctgtctcagcctccccagtagctgagattgcaggcacatgccaccacgcccagctaatattttgtattttcaagtaggggacggggggttacaaccatgtttgggcccaggctggtcctcgaactccctgaccctcaagtgatcccacccgccctcagtctccccaaagtgcctgagattacaggcatgagtcacctacgcccggcccatgtctgtctgtcttgatgtgtgagcagcagctgtggtcattaaaccattagtttacccctctagaactggggtctgcaaactcccacctgccagcccaaatctggcccacctcctttttaatgtaagggctgtgagagtggtttttactttttttaatgattaaaaaaatcaaaataatattctgtgacaatgacaggtgaaatttatatgtgacaagtgaaaattatatgaaatttaagagtccataaataaaatttgttggaacacaaaaa

SEQ ID NO: 137073 - DNA, 500 bp, Homo sapiens
  misc_feature (1)...(500): n = a,t,c or g
aatcacacggatgtntggntcgngttcctgcctgccgcccccgtggagacccaggcccctgccatcctggccctggccgccctgctcatccttctgggcctcctgtccacagccctcctggggcacctgctctgcttccacatttatctcatgtggcacaagctcaccacctatgagtacatcgtgcagcaccgcccaccacaggaggccaagggggttcacagggagctcgagtcatgtcctcccaagatgcggcccattcaggagatggagttctacatgcggaccttcagacatatgcgcccagagccccctggccaggccgggccagcagcagtgaatgccaaacactctcgccctgcctccccggatccgaccccaggtaggagggactgtgctgngcctccggtccaggtggagngggatagaaagaagcctctaccctggcgctcgcctctgcttcttttggcgatgtgggtgcccttangctcccccgtgtc

SEQ ID NO: 137074 - DNA, 119 bp, Homo sapiens
tgagataaatgtggaagcagagcaggtgccccaggagggtggggttgacaaagaactccacgaagacatatgtggccaccagcaccaggagcaggacgcccagtaaagcggatgcaaca

SEQ ID NO: 137075 - DNA, 370 bp, Homo sapiens
actgggccaagctgtgcaaggactgcaaggtggctgacggaaagtccgtgacagggaccgatgtggacatcgtcttctccaaagtcaaggggaagtctgctcgggtcatcaactatgaggagttcaagaaggccctggaagagctggcgaccaagagattcaaggggaagagcaaggaggaggccttcgatgccatcttcctgctccaacttctgtccacctggggacagtctgtgcctgtagcctcatgaccccaacccagccccaggcatggctaacccctgactgcttgcctcatatttaagctgctgctctggccaagtgcctaattttaacccagacctcaataaagacaccttatgtaccaaaa

SEQ ID NO: 137076 - DNA, 442 bp, Homo sapiens
tgcatgggcgccatctttgctggccaccttgtggtgcacctgaccgccgtctccatcgatccagcagatgccaacgtgcgggacaagagctatgcggggcccctgcccatcttcaaccgaagccagcacgcacatgtcattgaagacctgcactgcaacttgtgcaacgtggatgtaccccactcaaccaccccgaccggccgggccgcagagcggggaatgagccgggccaatcggcgctgtgccccctctccctgcaggagcgctcgctccaagcactgcagcgcctgcaacaagtgcgtgtgcggtttcgaccaccactgcaagtggctcaacaactgtgtgggcgagcggaactaccgtgttgcatccgctttactgggcgtcctgctcctggtgctggtggccacatatgtcttcgtggagttctttgtcaacccca

SEQ ID NO: 137077 - DNA, 2828 bp, Homo sapiens
  misc_feature (1)...(2828): n = a,t,c or g
ttccattcgttgatgatgcggacagcatcatttccggcccagtctccgtccgggatggggccccgctcccgggcgcgttgccgcccagtcccggggaccgtccctaccgcgagggtctgaggcgcggctgccccggggagggtggaaggccaggcgtggggcccgaacctctggctgactttggcagggcccatctggcacggcctccgcggcgcgcagctgttttcaagtcagcaaacatttactgaggatctactatgtacaagatgaacatctgcaacaagccctccaacaagacggcccctgagaagagtgtgtggacggcaccggcacagcccagcggaccctcccctgagctgcagggccagcgatcccgccggaatgggtggagctggccccctcacccgctccagattgtggcctggctgctgtacctcttctttgctgtgatcggctttgggatccttgttcccctcctgcctcaccactgggtgcccgctggctacgctgtatccttgggaaagcgtagggctggtccctggaatccattcctctctgtctcagctgagacaatacttcctcagtgcatgggcgccatctttgctggccaccttgtggtgcacctgaccgccgtctccatcgatccagcagatgccaacgtgcgggacaagagctatgcggggcccctgcccatcttcaaccgaagccagcacgcacatgtcattgaagacctgcactgcaacttgtgcaacgtggatgtgagcgctcgctccaagcactgcagcgcctgcaacaagtgcgtgtgcggtttcgaccaccactgcaagtggctcaacaactgtgtgggcgagcggaactaccggctctttctacacagtgttgcatccgctttactgggcgtcctgctcctggtgctggtggccacatatgtcttcgtggagttctttgtcaaccccatgcgtctgcgcaccaaccgacactttgaagtcctgaagaatcacacggatgtgtggttcgtgttcctgcctgccgcccccgtggagacccaggcccctgccatcctggccctggccgccctgctcatccttctgggcctcctgtccacagccctcctggggcacctgctctgcttccacatttatctcatgtggcacaagctcaccacctatgagtacatcgtgcagcaccgcccaccacaggaggccaagggggttcacagggagctcgagtcatgtcctcccaagatgcggcccattcaggagatggagttctacatgcggaccttcagacatatgcgcccagagccccctggccaggccgggccagcagcagtgaatgccaatccctcccagtttcttgccacccgtggccaagcggaacctccaccaccctcttccccagacactctcgccctgcctccccggatccgaccccagaaaaagaggaagaggcgcgtgtataaagtgcgaacgtctgagacctcggatccggcgtcggggcctagggcccccagccgccgctccagctcgtcgacggattccgcggacgccagccctgtgcacgccgctggccctgccggcgcctaccactcggcgtcggcagagtccgtggacgagattccagtggcgcagacgcgcctgggcagcgccgctctggccgccccgcggggccggggccgacagcccacgctggcgcggcaggcgcgtgcgcccgccgttttcggtggcatggcagcgagcacagacatggctgggctggaggagagcttccgcaagtttgccatccatggtgaccccaaggccagtgggcaagagatgaatggcaagaactgggccaagctgtgcaaggactgcaaggtggctgacggaaanggtggcatggcagcgagcacagacatggctgggctggaggagagcttccgcaagtttgccatccatggtgaccccaaggccagtgggcaagagatgaatggcaagaactgggccaagctgtgcaaggactgcaaggtggctgacggaaagtccgtgaccagggaccgatgtggacattgtcttctccaaagtcaaggggaaggctgctcgggtcatcgactatgaggagttcaagaaaggccctggaagagctggcgaccaagagattcaaggggaagagcaaggaggaggccttcgatgccatctgccagctggtggctggcaaagagccagccaatgtgggcgtcactaaagcaaaaacagggggtgctgtagaccggctgacggacaccagcaagatacacgggctcccacaagaagcgcttcgatgagagcggcaagggcaaggcgcattgcgggacggcaggacatcttggacgaccagtggctacgtgagcgcctacaagaatgcaaggcacctacgatgccaaaggtgaaagaagtgaggcttgggaagaaccgcccttgccaaagtgcggcttgccccttgccagaggctcaggcctggggtcttaaggggcacgttggagcaagagatcctgggtccccttcccttgcttggaccttgccacccagaagcttcctgcctaagtcccacttgggcttggcccaccagggcttcttgaccccaggcttgctcttgcggcccctttcctcctcctcttccttgctccaacttcttgtccacttggggacagtctgttgccttgtagcctcatgaccccaacccagccccaggcatggctaacccctgactgcttgcctcatatttaaagctgctgctcgtggccaagtgcctaattttaacccaagacctcaataaagacaccttttgtaccaaaaaaaaaaaaaaaaaaa

SEQ ID NO: 137078 - DNA, 442 bp, Homo sapiens
  misc_feature (1)...(442): n = a,t,c or g
cccacgcgtccgtgttcagtgggcccagctgtctcaggataaaaagggggagatgaactcaatgacctctactgcgggacctccaggcagctcttcagctccctgtgcaacaagaaggaacctgctgcaaaggcagcacctgcagcgcctctcaggggaatttaaaaaagatcctgccacgtactcaaagcacctggagcctctggaggaagagagggacaaatgaggtcaagtcagaggaggaagctgagggccccgagtcccttctgctcagatgtccgcatccagagaggagttctgcttctctcaacctgtgtttcttgcaagagtttatctataaattgctgaaaaatgggtaaaaaaannnaaaaaannnnnnnnnnnnnnnnnnnnnnnnnnnnnnnnnnnnnnnnnnnnnnannnnnnnaaaaccccggcgggg

SEQ ID NO: 137079 - DNA, 1581 bp, Homo sapiens
atgccagaaggcaccatctatgaagcaaagaacaaaccctcaccagacacagaatttgctgtgagggcgtccctgggatgggatctgggcgcccggcgcagcgcggctgacaacagccgagcggttccggtgcgctggcacgtggctcgggcctgcccccccggcctggccgcctcccggcgcgttccccggtgcagaaaaggaaagggggctggcctaaaggcaagaagagaaaccccccgagggaccttgctgttccgtgttcctacgacagggtacatgatattcctgaatgagcagagaagtcagctgagggccacacaccccgatctgcctttcacagaaatcatgaagatgctggctgttcagtgggcccagctgtctcaggataaaaagggcagaaagtacgctgggaaagcccttggtgttactccacctccttcagcgctcacaccagtcgccttgattgaagagccaaagcagttggacatccagtctcttccttttcagcccatcctggaccggttaaagattaaagataagaggcagcttgttccctcctacctgggaggcatgcacacggtcaccgagggtcttgctggtaggcaggttctgctccagcaggttcagggtggggcctgggagtctgcatttctgacatgcccatgggccatggctgctgctgctccagggcccacactgactatgctgcagcccagcatctctgccgtgggcttttctcagatggccatggggccacatgtgcagggcagagctagcaaactgagcatctatgtaaacccacgcagacagctttccaccaccaccgccatgggagatgaactcaatgacctctactgcgggacctccaggcagctcttcagctccctgtgcaacaagaaggaacctgctgcaaaggcagcacctgcagcgcctctcagttcgccaggcccgcctgctctgggccacgcaggacacggacgtcagcttctcctggagcgctcgctcactttattccatctctacgagctcctcaagtatcccagagcatccccaggcctgtggccacctcgggtctggatgccgcattctctgacctgtggcacattctgggtgcccatgattatgatgaggttctgtgcccatgtggcctcagggctcttgagaccacccttcaaccaggtctttgctcacctgtctcctgcccagggacgccacccaggtgaaaatgggatcatcgtgctgacctcaagggcagctgttaggattcgatgttcctcatgttcacggtctctaaccgggaatttaaaaaagatcctgccacgtactcaaagcacctggagcctttggaggaagaggagggacaaatgaggtccagtcagaggaggaagctgagggccccgagtcccttctgctcagatgtccgcatccagagaggagttctgcttctctcaacctgtgtttcttgcaagagtttatctataaattgctgaaaaaagggtaatcaagttcagcaactccctggcatctgggatgacctatggttttgaatcctagtcagaaacacctacatagaggaag

SEQ ID NO: 137080 - DNA, 473 bp, Homo sapiens; identical to SEQ ID NO: 126179

SEQ ID NO: 137081 - DNA, 526 bp, Homo sapiens
ctacacagtgctatgccagagccagcgaagtctgctcccgccccgaaaaagggctccaagaaggcggtgactaaggcgcagaagaaagacggcaagaagcgcaagcgcagccgcaaggagagctattccatctatgtgtacaaggttctgaagcaggtccaccctgacaccggcatttcgtccaaggccatgggcatcatgaattcgtttgtgaacgacattttcgagcgcatcgcaggtgaggcttcccgcctggcgcattacaacaagcgctcgaccatcacctccagggagatccagacggccgtgcgcctgctgctgcctggggagttggccaagcacgccgtgtccgagggtactaaggccgtcaccaagtacaccagcgctaagtaaacagtgagttggttgcaaactctcaaccctaacggctcttttaagagccacccatgttctcaaagaaagagctggtgcttgtattcctcctctgctggccactgacaaacccttgtaacttgctactgtgttt

SEQ ID NO: 137082 - DNA, 674 bp, Homo sapiens
cggacgcgtgggtaagcggtaggttgacagaactaccgtcttcctgtttttttcctccaattttccggcagttactcccagtcatgcccgagccctcaaagtccgctcctgccccgaagaaaggctccaagaaggcagtgacaaaggcccaaaagaaggacggcaagaagcgcaagcgcagccgcaaggagagctactccgtgtacgtgtacaaggtgctgaagcaggtccaccccgacaccggtatctcgtccaaggccatgggcatcatgaactccttcgtcaatgacatcttcgagcgcatcgccggcgaggcttcccgcctggcgcattacaacaagcgctcgaccatcacctccagggagatccagacggccgtgcgcctgctgctgccaggggagctggccaagcacgcggtgtcggagggcaccaaggccgtcaccaagtacaccagttccaagtaactttgccaaatttccaagttgatcgtgatgttgatccgggactcggtgtggtgacggcccgccctgagcacgaaagtgcacgctcttgacaacttccttatgtttggagctttctccaccaccacccccgcccattttcttgtaaaatttttaccatgcagatatgtaataactgcaagtaaaggctgaagacaatgtgagctgaacacg

SEQ ID NO: 137083 - DNA, 597 bp, Homo sapiens
cgcgcccctcgagatcgtcgacattagtccgtgcggtggaattctcgatctgctgctcgtctcaggctcgtagttcgccttcaacatgccggaaccagcgaagtccgctcccgcgcccaagaagggctcgaagaaagccgtgactaaggcgcagaagaaggacggcaagaagcgcaagcgcagccgcaaggagagctactccgtatacgtgtacaaggtgctgaagcaggtccaccccgacaccggcatctcctctaaggccatgggaatcatgaactccttcgtcaacgacatcttcgaacgcatcgcgggtgaggcttcccgcctggcgcattacaacaagcgctcgaccatcacctccagggagatccagacggccgtgcgcctgctgctgcccgggggagttgggccaagcacgccgtgtccgagggcaccaaaggccgtcaccaagtaccaccagcgctaagttaaactttgccaaggagggacttttctctgggaatttccctgataatggaccaagaaaagcttcttatcaaaaagaagcaacaattgccttcggttacctcattatctactgcagaaaagaagacgaga

SEQ ID NO: 137084 - DNA, 1005 bp, Homo sapiens
ggaagctgtgcgattggcttacgttttatttttatttagaccaataggactcgattatgcaggatacctattttgattgggcaaaactggcatctgtcgtcatccacggataattaccaatcagcagagaccttcccactacctcggccgcataaactattatataaaaagaggagaccgacttcttgttttggttttgccactattgtttcattatgcccgagctggccaagtctgctcccgccccgaagaagggctccaagaaggcggtgaccaaggcccagaagaaggatggcaagaagcgcaagcgcagccgcaaggagagctactccgtgtacgtgtacaaggtgctgaagcaggtccattcccgacaccggcatctcttccaaggcaatggggatcatgaattccttcgtcacgacattcttcgaggcgcatcgcaggcgaggcttcccgcctggcgcattacaacaagcgctcgaccatcacctccagggagatccagacggccgtgcgcctgctgcttccgggggagctggccaagcacgccggtgtcggaggggaccaatgccggtcaccaagtacaccagttccaagtaactttgccaagggagagacatgaagacagaggagaaatgaatgcataaaataaccgattaatatgattctatacatagaacttaggaagtctcatcttgcctgaaaatgacctgtgtggatcccacccaaatccaacttcatcctggtttgctgcacactggttcatcaaaagaaggttaccgaggggaaggaactaaaggtgtttgcacttcatgttactttttgagtttataaacataaaaaccagaatttactytctgttacagacctagttactgggaattcattacttgccatggactacctttgctaagaaaagtctgaatgagaagatggcaggacgtctgaaaaaaaaagttataattaataaaatctgcgaagaattgtaaaaaaaaaaaaaaaaaa

SEQ ID NO: 137085 - DNA, 428 bp, Homo sapiens
  misc_feature (1)...(428): n = a,t,c or g
tctgagctcggacgtagttcacagcaacgtggctaaaccaagaagttggaatcgttggtaaatacaggacccgctatggggtctccctccagaaaatggtgaagaaaattgaaatcagccagtacgccaagtacatttgctcttttctgtggcaaaacccnaagatgaagagacgagctgtggggatctggtgctgtggttctgcatgaagacagtaaaggtgtcttcatccaggaaccacattgtctggacctacaataccacttcagctgtcacggtaaagtccaccatcagaagactgaagcaattgaaagaccagtagacgctcctctactctttgagacatcactagcctataataaatgggttaatttatgtaaccaaaaaaattaaaaaggtttgtggaaaaactgaaaaaaaaaaaaaaa

SEQ ID NO: 137086 - DNA, 770 bp, Homo sapiens
  misc_feature (1)...(770): n = a,t,c or g
gtcatatgtaattcacatgtcggtcacacgtcagtgaggtggaggaacggtgtgtggaggctccgggcctgctgggttccaggtctatcactggtttctcccttcactctaaacaggccaaacgtaccaagaaagtcgggatcgtacggtaaatacgggaacccgctatgggggccttccctccgggaaaatggtgaagaaagattgaaatcagccagcacgcccaagtacactttgctcttttctgtggcaaaaccaagatgaagagacgagctgtggggatctggcactgtggttcctgcatgaagacagttggctggcggtgcctggaccgtacaataccactttccgctgtcacggtaaagtccgccatcagaagactgaaggagtttgaaagacccagtaggacgctcctctactctttgaggacatcactgggcctataaattaaatgggggtaattttatgtaacaaaatttgccttggctttgttaactttattagacattctgatgtttggcattgtgtaaatactgttgtattgggaaaagcatggccaagatgggttattgttaatttcagtgtctttttttagtagtccaatggtaaaatgcagcatangactataagtcttccaagttagatatgagtgttagctttttataagtcatgctcatgcagtttgactatgagatacaattgagctcactggtaaactntagtttttaaattaccagtacgttatatggttgttatgagggcgaagcttg

SEQ ID NO: 137087 - DNA, 356 bp, Homo sapiens
  misc_feature (1)...(356): n = a,t,c or g
cggttgcccagagcaaggcccatgtagcatccctggagggcctcatccctgaagataaggtcgtgcttctggcaggttctcccttacagaatgaagccaccctgggtcagtgtggggtggaagccctgacaaccctggaagtggttggccgcaggctaggagttcacaatgtctaaaagtcagctgattttgtgttaaaattcagtgtctggctttgcttcaaaaattgggaagatnnnnnnnnnnnnnnnnnnnnnnnnnnnnnnnnnnnnnnnnnnnnnnnnnnnnnnnnnnnnnnnnnnnnnnnnnnnnnnnnnnnnnnnnnnnnnnnnnnnnnnnnnnnnnnnnnnnnnnnn

SEQ ID NO: 137088 - DNA, 439 bp, Homo sapiens
  misc_feature (1)...(439): n = a,t,c or g
catcccggcgttttaaaaccgcgggcagtggattgttattcggctccctataaggggaattggggtccggggccccccccgaggnnnnnnnnnnnnnnnnnnnnnnnnnnnnnnnnnnnnnnnnnnnnnnnnnnnnnnnnnnnnnnnnnnnnnnnnnnnnnnnnnnnnnnnnnnnnnnnnnnnnnnnnnnnnnnnnnnnnnnnnnnnnnnnnnnnnnnnnnnnnnnnnnnatcttcccaatttttgaagcaaagccagacactcctagcctgcggccaaccacttccagggttgtcagggcttccaccccacactgacccagggtggcttcattctgtaagggagaacctgccagaagcacaaccttatcttcagggatgaggccctccagggatgctacatgggccttgcgatgggctgcgctnaacctatgactacg

SEQ ID NO: 137089 - DNA, 843 bp, Homo sapiens
atggtccgctgcgtccgactggtggaagcaggatctgtggtgagatacctcagcacaagcatatgcaggcctgtggtagacgccggaagtagggccctttgtctccaagaatgggcagactctcaacaggtgaaagaaaaacagtactccagcagagatgtccagagagcagccgctctcaacatctaccgtatcccaccgtctagcaggaagcccgctctctgtccaactccgcgggaccgactagagtacgacgaggaccgactagagcacatcgcctacgtgcgcgcccgggagctgcacactcttgaagtgaccggcctggagacggttgcccagagcaaggcccatgtagcatccctggagggcctcatccctgaagataaggttgtgcttctggcaggttctcccttacagaatgaagccaccctgggtcagtgtggggtggaagccctgacaaccctggaagtggttggccgcaggctaggagcctcgcttcaacttcagcctccaaacacactatggtgcgggcacttacttactgcagcagcagagaggaaacattcacggccatctaagtcccaacctgccgatgaagcaacaaagctctggccttacaaggcctcagaaatgggggcagtcaaaacacactctgtttgcaaagccctctgtcttcaggaccgccagccgcccccactgccagagcctaccacttcctcttgggtccctgctgatgggaatggcctgcactgtgcttgtcccggtggccccatcacagcaccagttgtgactgtccttgaatctctgaaggagccttttctgccccaacccaccttggtctga

SEQ ID NO: 137090 - DNA, 1051 bp, Homo sapiens
gtgtgatggtcactattctgtaaatttattgactgaaaacatcaagcagcaatggaatgttcagttcaatatcagttaaggcttccatagcagatttcccctagacaaaaataaattgtttctagtatactttgtttgggtcattcttcaaaacaattaccttgtcctttccactaggtggttgaccagattgacaccctgacctctgacctacagctggaggatgagatgactgacagctccaaaacggacacgctgaatagtagctcaagtggcacaacagcctccagcctagagaagatcaaagtgcaggctaatgcaccgcttattaaacccccagcacacccatctgctatcctcacggtcctgagaaagccaaaccctccaccacctcctccaaggttgacacctgtgaagtgtgaagaccccaaaagggtggttccaactgccaatcctgtaaaaaccaatggcacccttctacgaaatggaggcttaccaggtggacctaacaaaattccaaatggagatatctgctgcatacccaacagtaacttggacaaggctccagtccagcttctgatgcatagacctgaaaaagacagatgtccccagggcagggccttcgaggaacgagttcggtttaatgaaaaagtacagtaccatgggctattgtcctggactgtgatacccggtattaacattaaaaaacaggggaggtccactttacacagtggaacctgttccacccaccggggaaaggtttccttcaccaaggccctcccctccctcctacaccccatctccctcctttcccactagaaaatgggggaatgggaataagccacagtaacagcttcccccctatcagacctgcaactgtgcctcctcccactgcaccaaaaccacagaagacgatcttgaggaagtcaaccactacaaccgtgtgatgtatgccattaaaaaaattgtttttttaattttctatattataaacataaaataagtaatgagcactttctactcaagcaataaaaagcccaaatatattaaa

SEQ ID NO: 137091 - DNA, 450 bp, Homo sapiens
  misc_feature (1)...(450): n = a,t,c or g
cctattatctgtttcctgttctggccacagtatttaaaaaagagaaaaagtcaccagccccacccatacttagctcttcaccttcttagcctacaaacccaaggcacaaaaccaccctggattcatgattacgattaagtaaatcagagcagtgatttagtatgtcattctagtttccaagtaccttgaggtgtgatttgtttcgctggtctttgttgtagcatttgcagactgtatgctgtttgcttcactaggaggatctttcagaatgtcagactttggtctaaatgagggagannnnnnnnnnnnnnnnnnnnnnnnnnnnnnngcatttagaagatatcttgaattcacttgcaaagtaatatcctgtacttagttaaccagaaacttacttggttttcttgttggtatttttcttggtaacactaggactaatttccgaattcc

SEQ ID NO: 137092 - DNA, 804 bp, Homo sapiens
tcaagggcaggccaagatggtgccgtgaactgggtaggagatgccaaggcagttagtgaaaggggaaggagaattcgacacggaagcatgagatggagcatccgacgaggatccatgagcctcgagcacagcagcctccagaagttgcagagacaatgaggatgtgttctcccatgagtcgttcagaagacagagccgcgtctgtgttttgctgtctctcccccgttttcctgctccctgcctcttccctcccttttcccccactctccactcctcggaaggccaaaaagacaagcgaaacctgccgcagacgaagggttttgggattgtagcgtctgcaccttcagaaacagtgctgaagcctttaaatgcagcatctgcgatgtgaggaaaggcacctccaccaggtacttgaagatctgtgttacctgggtagttgtggtcatttgacaagtttttattgagcacacagccatttgcgctcttggtgtacagtggtataaagacagaccaggtccctgttcttacggagcttaaaatactggatctggtccctattcggcaccaatccctgttctgcagtgctgccctctccagggaagcctcgctatgtcctgaggccccttgggggatgaggactgggggcatctttgacggggcccgggtgtggagcagcaagagtctttctggggaagcggcttgctcccaggcagccattgtgggggcctgtttgctctggtcatccatttctcctgggcacatgctggcttcctgtttatgcttcctgttgtgcagcgtggccat

SEQ ID NO: 137093 - DNA, 1501 bp, Homo sapiens
  misc_feature (1)...(1501): n = a,t,c or g
actccccggacggcgtttctcctccgagcggcgccggtttcgngttggggggggcggggtacagccatccatgaccatgggcgacaagaagagcccgaccaggccaaaaagacaagcgaaacctgccgcagacgaagggttttgggattgtagcgtctgcaccttcagaaacagtgctgaagcctttaaatgcagcatctgcgactgtgaggaaaggcacctccaccagaaaacctcggatcaattctcagctggtggcacaacaagtggcacaacagtatgccaccccaccaccccctaaaaaggagaagaaggagaaagttgaaaaagcaggacaaaagaggaaacctgagaaaagaccaaggaaatttagtccttagttgttaccaagaaaaataccaacaagaaaaccaaaccaaagtctgatcattctgaaagatcctcctagttgaagcaaacagcatacagtctgcaaatgctacaacaaagaccagcgaaacaaatcacaccttcaaggccccggctggaaaaacgtgggacagggggcattgcacagcagtttgggcagttaactgtggggcaacgtcaccgtcattatcacagactttaagggaaaagactcgctcctcatcggacatcctcatccacagtgacctcccagtgcagggtcaggaacagcagaaccagaggcagcttcgggggttcagaggagccacagacaagggctccctccccgttcctcccaaccccaaagggcgaccatgtcaagcagtcaatgatgaatctttcctgaaattggcacatgggaattgtggaaaactatggaattcaggggtatggaaatttcaaaaccttccacctgcccatgcttgcttgcatccctgggagaatctttcttgtgggacatcgacctctttagttgattgctgccaggataatttcttgctttgccatgggcattcttggccaccaagggattttcggcaccctgacgattactctggacacttttaatgtattccattgttttatatgattttcctaacaatcatttataattggatgtgctcctgaatctactttttataaaaaaaaaaaaaaaatctgctgtgcacaattttccatgtacattacaactggttttttgtttttgttttgttgccggtggggagggctgggagggggagggaacttttatttattgtgttcacaaactccatcctttcagcatatccttttaagtttagttctttcttccagttatactatgtactatcagttttgatataactatatatatataaatataaaattatatataaagggttatttgaaaccaatccatggcaaacgctggtgcttgatacactgtgaagtgaatacaacattgaacagttacagatctgggacagtcccttctatgaaagtgctgaaatttaattaaaatcagtcttacatgaagtatgttccaatccatgtgggaacttgagtctttaatctc

SEQ ID NO: 137094 - DNA, 678 bp, Homo sapiens
atggcgggctgcagaaacccatgtaaagctgagagccacagaagcaagagcctgctcagcgaagccgagagcctgttcagggaagccgaaagccagcatgaccgagggagcaagaatgcgggccatcgggatgagtcggtggaggtgtggctgagcctcctctccagcagccaaaccagagcagagattgaaaggcaatctcggggaaaacagtggctgcggcacctcctccgggacactgaagggcccaaggagactgtgaggcccgagctggccactcgcgccgccatggacgtggccgaggtcgagttcctggctgagaaggagctggttaccattatccccaacttcagtctggacaagagctacctcattggggtggacaacatcccgaaggcagacgaaatccggaccctggtcaaggatatatgggacactcgtatagccaaactccgagtgtctgctgacagctttgtgaggcaacaggaggcacatgccaagccggataacttgaccttgatggagatcaaccccagcgggactttcctcacacaagcgctcaaccacacgtacaaactcgcacaaacctccagccttcggagagtactcagtctcaggacttctagagaaaggcctggtgcaggcagcttgctgggggatgtgacgctcaggacgtga

SEQ ID NO: 137095 - DNA, 1499 bp, Homo sapiens
atggacgctgccgaggtcgaattcctcgccgagaaggagctggttaccattatccccaacttcagtctggacaagatctacctcatcgggacgtgggaactgaagtacagggagattaggtggctttctcaagggcctcacggaaagccccacgctgacccgggaagcagcatcctgcagaacagctcaggcccctctggggtccgcaccaatgggaagagcaagccgtgggagccctttgtggcagaagagtttgcacatcagttccacgagtcagtgctgcagtccacccagaaggccctgcagaagcataaagggagcgtggctgtgctgtctgcagagcagaaccacaaggttgacacgtccgtccactacaacattcctgagctgcagtcctccagccgcgcccctccaccccagcacaatgggcagcaggagccccccactgcaaggaagggccccccaacccaggagttggaccgggactcggagcaggagcaagaggaggatgatgaagatggagaagatgaggaggaagtccccaagcgcaagtggcaagggatcgaggccgtttttgaagcttaccaggaacacatagaagagaggacacttgaaagaaatcggagttcaactgcagctgataaagcccagctccttgcagccaatcggcaaggccacggccaacccacagaccctgcttcagacaacatcccgaaggcagacgaaatccggaccctggtcaaggatatgtgggacactcgtatagccaaactccgagtgtctgctgacagcttttgtgagacagcaggaggcacatgccaagctcggataacttgactttcgatggagatccacaccagcggtgactttcctcacacaagcgctcaaccacatgtacaaactccgcacgaacctccagcctctggagagtactcagtctcaggacttctagagaaaggcctggtgcaggcggcttgctgggggatgtgagcgctcaggacgtgatgaggtactcgtggttctggagctctagaaacacttctgatgcatgaaaaatgtgtgatggtgcaaggaatggattcaggatgttgttgggagaaacaagttttgttgattagtccctaaaaactttagctccctggggacattctttcatttcccacatctgttttctaggaaaccagccctttttccccccacttttgagaaataaaaaagccttaggtaaataagtcattctccctagcagagccacttgggtctcctgcatggaagccgtcacacttgggcaggtgttcagtgactggtaggtgtagatacagcaggagtggccatgtggtccacggctttttaccccttcttgatcctgatttcttgggctgaatttagactctctcacagaggtggctcacagagaaggatggcagatggtgcagccaacaatgctgaccggtgcttatcctctaagccctgatccacaataaaaatgaacccaactc

SEQ ID NO: 137096 - DNA, 678 bp, Homo sapiens; identical to SEQ ID NO: 137094

SEQ ID NO: 137097 - DNA, 1190 bp, Homo sapiens
gcggccgcggcgtctcctccgggacgctgaggggcccgaggagaccgtgaggctctggcctgcagctcgcgccgccatggacgctgccgaggtcgaattcctcgccgagaaggagctggttaccattatccccaacttcagtctggacaagatctacctcatcgggggggacctggggccttttaaccctggtttacccgtggaagtgcccctgtggctggcgattaacctgaaacaaagacagaaatgtcgcctgctccctccagagtggatggatgtagaaaagttggagaagatgagggatcatgaaccgaaaggaagaaacttttaccccaatgcccaagccctttactacattggaacttaccgaagctcctgttaaatcatgcttcagacaacatcccgaagcaagacgaaatccggaccctggtcaaggatatgtgggacactcgtatagccaaactccgagtgtctgctgacagcttttgtgagacagcaggaggcacatgccaagctcggataacttgactttcgatggagatccacaccagcggtgactttcctcacacaagcgctcaaccacatgtacaaactccgcacgaacctccagcctctggagagtactcagtctcaggacttctagagaaaggcctggtgcaggcggcttgctgggggatgtgagcgctcaggacgtgatgaggtactcgtggttctggagctctagaaacacttctgatgcatgaaaaatgtgtgatggtgcaaggaatggattcaggatgttgttgggagaaacaagttttgttgattagtccctaaaaactttagctccctggggacattctttcatttcccacatctgttttctaggaaaccagccctttttccccccacttttgagaaataaaaaagccttaggtaaataagtcattctccctagcagagccacttgggtctcctgcatggaagccgtcacacttgggcaggtgttcagtgactggtaggtgtagatacagcaggagtggccatgtggtccacggctttttaccccttcttgatcctgatttcttgggctgaatttagactctctcacagaggtggctcacagagaaggatggcagatggtgcagccaacaatgctgaccggtgcttatcctctaagccctgatccacaataaaaatgaacccaactc

SEQ ID NO: 137098 - DNA, 1041 bp, Homo sapiens
tgacaagcagcatggctgcaggttgctcagaggcgccgcggccagcggcgggtttctgatgggtctctggtagggcaggctggcgtcctgccttgcctagagttgccgacttatgccgctgcttgtgcgctggtgaacagtcgctactcatgcctggtggccgggccgcaccaaaggcacatcgcgctgtcgccccgctaccttaacaggaaacgcaccggcattcgagaacagcttgatgcggagctccttcgctattctgagagccttttaggtgtccctattgcatatgataacatcaaagttgtgggagagcttggagatatttatgatgatcaaggacacattcatcttaacattgaagccgattttgttattttctgccctgaaccagggcagaagcttatgggtatagttaataaagtgtcttctagccacattggctgtttagtacatgggtgtttcaatgcctccattcctaaacctgagccagttgtcagctgagcagtggcaaaccatggagataaacatgggtgatgaactagaatttgaagtatttcgtttagactcagatgctgctggagtattctgcattcggggaaaactaaatatcacaagtttacaattcaagcgctctgaagtttctgaagaagttacagaaaatggcactgaggaagctgctaaaaaacctaaaaagaagaaaaagaagaaagacccagagacatatgaagtggacagtggtaccacaaagctagcagatgatgcagatgacactccaatggaagagtcagccctgcagaatactaataatgcgaatggcatctgggaggaggagccaaagaaaaagaagaagaagaaaaagcacccaggaagtttccaggacccaggacccctgtttttcccaaggccagttgacttcccagtggttaccaaagtgaccataaaaagaaaaaaaagaaaagaaaacacagtgaagaggccgaatttaccccacctttgaaatgctcaccaaaaagaaaagggaaaagtaattttctttag

SEQ ID NO: 137099 - DNA, 419 bp, Homo sapiens
ttcccgggtcgacgatttcgtgcagccgcgccctgaccctgctgagcagcgtgtttggtgcgtgtggcctgctcctggtaggcatcgcggtcagcactgactactggctgtacatggaagaaggcacagtgctaccgcagaaccagaccaccgaggtcaagatggccctgcacgccggcctctggcgagtctgcttctttgcaggtcgggagaaaggtcgctgtgtggcctcagaatattttcttgaaccggagatcaatttggtgacggaaaacacggagaatattctgaagacagtgcgcacggccacccccttccccatggtcagcctcttcctcgtgttcacgggcttcgtcatcagcaacatcgggcacatccgcccgcagaggaccattctggattttgttcagagctgccag

SEQ ID NO: 137100 - DNA, 1625 bp, Homo sapiens
tgcagctggagatccgggctcccacagcagatgagatccacgtaactgttggcgaggcccgtaacctaattcctatggaccccaatggtctctctgatccctatgtgaaactgaagctcatcccagaccctcggaacctgacgaaacagaagacccgaacggtgaaagccacgctaaaccctgtgtggaatgagacctttgtgttcaacctgaagccaggggatgtggagcgccggctcagcgtggaggtgtgggactgggaccggacctcccgcaacgacttcatgggggccatgtcctttggcgtctcggagctgctcaaggcgcccgtggatggctggtacaagttactgaaccaggaggagggcgagtattacaatgtgccggtggccgatgctgacaactgcagcctcctccagaagtttgaggcttgtaactaccccctggaattgtatgagcgggtgcggatgggcccctcttcctctcccatcccctccccttcccctagtcccaccgaccccaagcgctgcttcttcggggcgagtccaggacgcctgcacatctccgacttcagcttcctcatggttctaggaaaaggcagttttgggaaggtgatgctggccgagcgcaggggctctgatgagctctacgccatcaagatcttgaaaaaggacgtgatcgtccaggacgacgatgtggactgcacgctggtggagaaacgtgtgctggcgctggggggccggggtcctggcggccggccccacttcctcacccagctccactccaccttccagaccccggaccgcctgtatttcgtgatggagtacgtcaccgggggagacttgatgtaccacattcaacagctgggcaagtttaaggagccccatgcagcgttctacgcggcagaaatcgctatcggcctcttcttccttcacaatcagggcatcatctacagggacctgaagctggacaatgtgatgctggatgctgagggacacatcaagatcactgactttggcatgtgtaaggagaacgtcttccccgggacgacaacccgcaccttctgcgggaccccggactacatagccccggagatcattgcctaccagccctatgggaagtctgtcgattggtggtcctttggagttctgctgtatgagatgttggcaggacagcctcccttcgatggggaggacgaggaggagctgtttcaggccatcatggaacaaactgtcacctaccccaagtcgctttcccgggaagccgtggccatctgcaaggggttcctgaccaagcacccaggggaagcgcctggggcttcagggccttgatgggggaacctaaccatccgtgcacatgggttttttccgctgggatttgactgggagcggctggaacgattggagatccccgcctccttttcaagaccccgcccgtgtggccgcagcggcgagaactttgacaagttcttcacgcgggcggcgccagcgctgacccctccagaccgcctagtcctggccagcatcgaccaggccgatttccagggcttcacctacgtgaaccccgacttcgtgcacccggatgcccgcagccccaccagcccagtgcctgtgcccgtcatgtaa

SEQ ID NO: 137101 - DNA, 1924 bp, Homo sapiens
atgttgcgggctccacggcaggcgactcgcgatcaccacttcgcacatatcgacattgtccaggttacctgcttccgctacctgcgccgctccgctctagctcccgctccagcgatgccgtcgcctgtccgcgtggaccgcggttctttcccccctgtggccggggggaaccacaccaggaggagaggtggcacaccccaggaaggagtaaccagggaggcattggcattcttcgatgtggtggccaccactggggcagagatgatgtggtccaacttcttcctgcaagaggagaaccggcggcggggggccgcgggccggcggcgggcgcacgggcagggcaggtcggggctgacgcccgagcgcgaggggaaggtgaagctggcgctgctgctggccgcctgggcgccacgctggcggtgctgtccgtgggcaccgagttctgggtggactcaacacctacaaggccaacggcagcgccgtgtgcgaagcggccccacctggggctgtggaaggcgtgcaccaagcggctgtggcaggcggacgtgcccgtggacagggacacctgcggccccgcggagctgcccggaggcctcggagagaaattctgaacacccagctctgatctgtacccttccgcagccccatatgctcaagagaagggcacgcagagcccctggcagcatggcaccaccgctgccgcgtcctcctcaagctgcgtctgtgcctgttttcccgccagactgggagccccttgagagcagggcaagatcaaaatcacctctccactcccagcaccgcccagcacaagagacaggaaggcacagccgaccaagaacaagcacaaggaaaagacaacaaaagcacagcacggaaaaggcaactcacacaccggaacgggcacccaaaccacagacaagggaaaacaacccgaaaggacgagcacaaggcagccctgcaccccgagaccacaacccagcaagcagacaccaaaaaacaagcaacgacaaaagaagcacacacgacacacacaagacaagaaaagacagccagacaagaagaaagaagacaagaaacaacgagaagcagcaaccggaccggacggaccccagatcattgcctaccagcccatgggaagtctgtcgattggtggtcctttggagttctgctgtatgagatttggcaggacagcctccctcgatggggaggacgaggaggagctgtttcaggccatcatggaacaaacgtcacctaccccaagtcgctttcccgggaagccgtggccatctgcaagggtgtggccgcagcggcgagaactttgacaagtcttcacgcgggcggcgccagcgctgacccctccagaccgcctagtcctgccagcatcgaccaggccgatttccagggcttcacctacgtgaaccccgattcgtgcacccggatgcccgcagccccaccagcccagtgcctgtgcccgcatcctctcccacccggccacagctgctggagaataaatttggatgctgatgctgaagtgtttggatattttcttgccccgcagggcgcccctgcctctgaggatgagtcactgcagcagccgcgccctgaccctgctggcagcgtgtttggtgcgtgtggcctgctcctggtaggcatcgcggtcagactgactactggctgtacatggaagaaggcacagtgctaccgcagaaccgaccaccgaggtcaagatggccctgcacgccggcctctggcgagtctgctctttgcagacagtgcgcacggccacccccttccccatggtcagcctcttcctcggttcacggccttcgtcatcagcaacatcggccacatccgcccgcagaggccattctggcttttgtctctggcatcttcttcatactatcggtggctgtgcaatcgttga

SEQ ID NO: 137102 - DNA, 2345 bp, Homo sapiens
tgcgccgccgcccggggaccggcatgaggaccgccgcggggggacgtctgcggcccgcgtcggcgctggggacaaagaagccatgcagtgacacccgctaagacttgttggtagccatgtcggagccccacagggtccagttcacctctctcccaggttccctgaatcctgcgtttttgaagaagtcccggaaggaggaggctggggcaggagaacagcatcaggactgtgagccggctgcagcagcctgttcggatttacactcacccctctttgaactcagatcacaaacgctgccccagagttccttcctaccccagagctggtgaagaatatccgagggaaggtaaaaagccttcagccctggagataagaagaaagatctgtcagatcctttcaattgacgaagaaaaggaaaggcataaaagtagaggcccttgcccgaaaatttgaagaaaaatacggttggaaagaaacgtagaaaagaccgaatacaggacttgatcgatatggggtatggttatgatgaatccgactccttcatcgataactctgaggcgtatgatgagcttgttccctgcttctttgactacgaagtatggaggattttacattaactcgggaaccctgcagtttagacaagcatcagagtctgaagatgacttcattaaagaaaagaagaaaaaatctccaaagaagcggaagttgaaggaaggtggtgagaagataaagaagaagaaaaaagatgacacttatgacaaggagaagaaatcgaaaaagtccaagttttccaaagccggcttcacagccctcaatgccagtaaggagaagaagaagaagaaatattctggggctttaagcgttaaagagatgctaaagaaatttcagaaagagaaagaggctcagaaaaaaagggaggaggagcataagcctgttgcggtcccatcagcggaagctcagggcctgcgggaactggagggtgcctctgaccccttgctctcactctttggctctacttctgacaacgacttgctccaggcggccactgccatggactcgctgacggatttggacttggagcatctgctcagtgagtctccagaaggaagtcccttccgagatatggatgatggaagtgattcccttggggtgggattggaccaggaattcaggcagccctcttctctccccgaaggcctgccagcacccctggagaagcgcgttaaggagctggctcaggctgccagagctgctgagggggagagcagacagaagttcttcacccaggatattaatggaatcctattagacatagaggcgcagactcgggagctgagcagtcaggtccgctctggggtgtatgcctatcttgcgtcattcctgccctgcagcaaggatgccctgctcaagcgtgctcggaaacttcacctctatgaacaggggggccgtctgaaggagcctctccagaagctcaaggaagccattggcagggcgatgccagagcagatggccaagtaccaggacgaatgccaggcacacacgcaggcaaaggttgccaagatgctggaagaggagaaagacaaggagcagagggaccggatttgttcggatgaggaagaagatgaagaaaaaggggggaggaggataatgggacctcggaagaagttccaatggaatgatgagatcagggagctactgtgccaggtggtgaagatcaaactggagagccaggacctgggagaggaacaacaaagctcagggcttgggaggactgtgtgaagggctttctggatgcggaagtcaagcccctctggcccagaggctggatgcaggccagaactctgtttaaggagagcagacgaggccatgggcacctgacttcaatcctggccaagaagaaagttatggccccttctaaaatcaaggtgaaggaatcgtctacgaagcctgataaaaaggtttctgtcccatcaggacagattggtggccccattgctttgccctcagatcaccaaacaggaggcctgagtattggggcctcgagcagggagctcccatcacaggcatcgggcggccttgctaaccctcctcctgtcaacctggaggactcattggatgaagacttgatccgcaatccagcctcctcggtggaagccgtgtccaaggaattggctgcattgaatagcagagcagctgggaactctgaattcacactgcctgcaccctcaaaagcacctgcagaaaaagttggaggcgttttatgtacagaagaaaaaaggaactttgcgaagcctagtccttctgctccaccaccagctagctctctgcagtcacccctcaatttt

SEQ ID NO: 137103 - DNA, 492 bp, Homo sapiens
gcctatcgtaatttcacatcagcaagtgatgtatggagctatggaatcgttatgtgggaagtgatgtcgtacggggagaggccctattgggatatgtccaatcaagatacctaacactgccttgttggatccagcctcccctgaattctctgctgtggtatcagtgggcgattggctccaggccattaaaatggaccggtataaggataacttcacagctgctggttataccacactagaggctgtggtgcacgtgaaccaggaggacctggcaagaattggtatcacagccatcacacaccagaataagattttgagcagtgtccaggcaatgcgaacccaaatgcagcagatgcacggcagaatggttcccgtctgagccagtactgaataaactcaaaactcttgaaattagtttacctcatccatgcactttaattgaagaactgcactttttttacttcgtcttcgccctctgaaattaaagaaatg

SEQ ID NO: 137104 - DNA, 732 bp, Homo sapiens
tcattcccagtgccttcccggatcattggagatggggctaactccacagtccttctggtctctgtctcgggcagtgtggtgctggtggtaattctcattgcagcttttgtcatcagccggaggtaagcactgaagccactcactgtgcagcccccgaccttcccagtgtttatgatggtttttttctcttccacacaaagctaaggcttttgattgcgtcataaacttggcatctgcatcccaagtttcctccttgttgctttgatcttcccacacccctaccaaagctgctagctgtaccctggtggcaggctgagaggtccggaaggacccagctaattgtaggaaacaaagctgaagagcaagccagtgggagatttctagatgctttaagctgccaggtgttacgtttatccctctcttaagcctggactcatcccatcgtctgcccagaggctccagaggagtagtcattgatatgtgccccacatctgggccttctttgtctttgatgtgtaagaatctgcctcttccctgatcggcatccccatataccatcaactgtttcacaagatggggaggcttggaaagtcgaagggactgggccaactggtgtccttcataccctctgtgccccagtgccccaacagctccaggagggagaggtgcaagtgccaggacaaagctttttacaatgacttctgcctcttggcccagatatctgtcactggg

SEQ ID NO: 137105 - DNA, 411 bp, Homo sapiens
atgatcagtcactggacagtttcttgtccttgtcgatcttccactcccactcttgcaaaattggatattacaaggctctctccacggatgccacctgtgccaagtgcccaccccacagctactctgtctgggaaggagccacctcgtgcacctgtgaccgaggctttttcagagctgacaacgatgctgcctctatgccctgcacccccatatatggctagtggagactataccggacggcagacccagagaacgtttctatcaccacagaaagttctattggacaatactgtagtagacgttccaacagagaagacagtaggagtttctcaaagaacctcttgttcagatgatccacagagtaactctccccactcgcacgctgcccccagctttatcggattctcttga

SEQ ID NO: 137106 - DNA, 827 bp, Homo sapiens
gcggccgctgggaggtggaggagcctctccagccccggccgcagctcatcgtgagccaaccgcgccacctgccggccagatgcgggagtgtgcggccccggaggaagggcgagcggacaaagaccgcaacccgcaatccgcaaccccgcagagaggtggtgcgtgcgtttgggcgagcttttcagccaccgccaagtctcgtgcactagggctactcctaccgtggggctgcggacagcgctcaagaggtcctggagtctgtcgtgactctcgcctgctggatttcaaaagatggaatcggaaagcgtttcaaggagaaactcctaacaaaccttccgggggttgcctgagtggctgctctcggaaaagcggatcctaaataaagcgggagggttatagggcgacgtcgaggagaggacaggtctcgagtcactgctacagtttcaggtcactggcgtcgcagcagatcgtgttttctcccgtggctcgagacgtgcgctggtttctcatgcaaactcagagccgagctaatgacatgagcaacttttacttttacacaagatgagcacgcgtgccgaggcgctgggcggcggctgtgtgagttggtggcccagacgaacagcttgtgcgagactctgggcatttcggtttctagatacaagatttgcttaaatgtcacagtccaaagaagtggatttcagtcattgtagctactgattgcacacaagtaaaaagggaaaaaatatgtactcgggggatatatgtatgtgtgtgtgcgtgcataaattatttaaaataactgcactaaatccctttaagaaatgcaa

SEQ ID NO: 137107 - DNA, 927 bp, Homo sapiens
atggcaagtggagctggtcccaacctcggggattttgggaggttctgtgggaagtgttttggcagcctgagcattctctgtcaacagttcaaattcatgggaaaaggcatgaagccaaaagtgcttgcaggtgaattatttgtccctttcaagtgcatcttacttaccctgatgacgtgtccaccatctgctcccctgaacttgatttcaaatgtcaacgagacatctgtgaacttggaatggagtagccctcagaatacaggtggccgccaggacatttcctataatgtggtatgcaagaaatgtggagctggtgaccccagcaagtgccgaccctgtggaagtggggtccactacaccccacagcagaatggcttgaagaccaccaaagtctccatcactgacctcctagctcataccaattacacctttgaaatctgggctgtgaatggagtgtccaaatataaccctaacccagaccaatcagtttctgtcactgtgaccaccaaccaagcagcaccatcatccattgctttggtccaggctaaagaagtcacaagatacagtgtggcactggcttggctggaaccagatcggcccaatggggtaatcctggaatatgaagtcaagtattatgagaaggatcagaatgagcgaagctatcgtatagttcggacagctgccaggaacacagatatcaaaggcctgaaccctctcacttcctatgttttccacgtgcgagccaggacagcagctggctatggagacttcagtgagcccttggaggttacaaccaacacaggtaacaaggaccacccagactcagtcacttctgaggctatttttataatacagctgaatcccattacagtgaaatctaaggagttgtctgtaatttttggttcagcagacattttgctgcaatga

SEQ ID NO: 137108 - DNA, 1117 bp, Homo sapiens
atgaggtggttactaaaatgggagagaaagtacacactatacagttcaggggtcctcaaacataagaatcttctggaaagcttgttaggacagtttcttgggcctcctgctcagaggtttgattcagcaggtggtgtgcggcccaaaaatgatggcagatttacagtcattcagctggtgggcatgcttcgtggcattgggtctgggatgaagtatttatctgatatgagctatgtgcatcgtgatctggccgcacggaacatcctggtgaacagcaacttggtctgcaaagtgtctgattttggcatgtcccgagtgcttgaggatgatccggaagcagcttacaccaccaggggtggcaagattcctatccggtggactgcgccagaagcaattgcctatcgtaaattcacatcagcaaagtgatgtatggagctatggaatcgttatgtgggaaagtgatgtcgtacggggagaggccctattgggatatgtccaatcaagatgtgattaaagccattgaggaaggctatcggttaccccctccaatggactgccccattgcgctccaccagctgatgctagactgctggcagaaggagaggagcgacaggcctaaatttgggcagattgtcaacatgttggacaaactcatccgcaaccccaacagcttgaagaggacagggacggagagctccagacctaacactgccttgttggatccaagctcccctgaattctctgctgtggtatcagtgggcgattggctccaggccattaaaatggaccggtataaggataacttcacagctgctggttataccacactagaggctgtggtgcacgtgaaccaggagtaagtactcaacgatgtaacacgaaaggggacctggcaagaattggtatcacagccatcacgcaccagaataagattttgagcaggtgtccaggcaatgcgaacccaaatgcagcagaatgcacggcagaatggttccccgtctgagcacagtactgaataaactcaaaactcttgaaattagtttacctcatccatgcactttaattgaagaactgcacttttttaacttcgtcttcgccctctgaaattaaagaaatt

SEQ ID NO: 137109 - DNA, 3342 bp, Homo sapiens
tttcgtgacctgaaactgtagcagtgactcgagacctgtcctctcctcgacgtcgccctataaccctcccgctgtatttaggagccgcttttccgagagcagccactcaggcaacccccggaagggttgttaggagtttctccttgaaacgctttccgattccatcttttgaatccagcaggcgagagtcacgacagactccaggacctcttgagcgctgtccgcagccccacgaagcggcaggagcagcgttggcaccggcgaaccatggctgggattttctatttcgccctattttcgtgtctcttcgggatttgcgacgctgtcacaggttccagggtataccccgcgaatgaagttaccttattggattccagatctgttcagggagaacttgggtggatagcaagccctctggaaggagggtgggaggaagtgagtatcatggatgaaaaaaatacaccaatccgaacctaccaagtgtgcaatgtgatggaacccagccagaataactggctacgaactgattggatcacccgagaaggggctcagagggtgtatattgagattaaattcaccttgagggactgcaatagtcttccgggcgtcatggggacttgcaaggagacgtttaacctgtactactatgaatcagacaacgacaaagagcgtttcatcagagagaaccagtttgtcaaaattgacaccattgctgctgatgagagcttcacccaagtggacattggtgacagaatcatgaagctgaacaccgagatccgggatgtagggccattaagcaaaaaggggttttacctggcttttcaggatgtgggggcctgcatcgccctggtatcagtccgtgtgttctataaaaagtgtccactcacagtccgcaatctggcccagtttcctgacaccatcacaggggctgatacgtcttccctggtggaagttcgaggctcctgtgtcaacaactcagaagagaaagatgtgccaaaaatgtactgtggggcagatggtgaatggctggtacccattggcaactgcctatgcaacgctgggcatgaggagcggagcggagaatgccaagcttgcaaaattggatattacaaggctctctccacggatgccacctgtgccaagtgcccaccccacagctactctgtctgggaaggagccacctcgtgcacctgtgaccgaggctttttcagagctgacaacgatgctgcctctatgccctgcacccgtccaccatctgctcccctgaacttgatttcaaatgtcaacgagacatctgtgaacttggaatggagtagccctcagaatacaggtggccgccaggacatttcctataatgtggtatgcaagaaatgtggagctggtgaccccagcaagtgccgaccctgtggaagtggggtccactacaccccacagcagaatggcttgaagaccaccaaagtctccatcactgacctcctagctcataccaattacacctttgaaatctgggctgtgaatggagtgtccaaatataaccctaacccagaccaatcagtttctgtcactgtgaccaccaaccaagcagcaccatcatccattgctttggtccaggctaaagaagtcacaagatacagtgtggcactggcttggctggaaccagatcggcccaatggggtaatcctggaatatgaagtcaagtattatgagaaggatcagaatgagcgaagctatcgtatagttcggacagctgccaggaacacagatatcaaaggcctgaaccctctcacttcctatgttttccacgtgcgagccaggacagcagctggctatggagacttcagtgagcccttggaggttacaaccaacacagtgccttcccggatcattggagatggggctaactccacagtccttctggtctctgtctcgggcagtgtggtgctggtggtaattctcattgcagcttttgtcatcagccggagacggagtaaatacagtaaagccaaacaagaagcggatgaagagaaacatttgaatcaaggtgtaagaacatatgtggacccctttacgtacgaagatcccaaccaagcagtgcgagagtttgccaaagaaattgacgcatcctgcattaagattgaaaaagttataggagttggtgaatttggtgaggtatgcagtgggcgtctcaaagtgcctggcaagagagagatctgtgtggctatcaagactctgaaagctggttatacagacaaacagaggagagacttcctgagtgaggccagcatcatgggacagtttgaccatccgaacatcattcacttggaaggcgtggtcactaaatgtaaaccagtaatgatcataacagagtacatggagaatggctccttggatgcattcctcaggaaaaatgatggcagatttacagtcattcagctggtgggcatgcttcgtggcattgggtctgggatgaagtatttatctgatatgagctatgtgcatcgtgatctggccgcacggaacatcctggtgaacagcaacttggtctgcaaagtgtctgattttggcatgtcccgagtgcttgaggatgatccggaagcagcttacaccaccaggggtggcaagattcctatccggtggactgcgccagaagcaattgcctatcgtaaattcacatcagcaagtgatgtatggagctatggaatcgttatgtgggaagtgatgtcgtacggggagaggccctattgggatatgtccaatcaagatgtgattaaagccattgaggaaggctatcggttaccccctccaatggactgccccattgcgctccaccagctgatgctagactgctggcagaaggagaggagcgacaggcctaaatttgggcagattgtcaacatgttggacaaactcatccgcaaccccaacagctatgaagaggacagggacggagagctccagacctaacactgccttgttggatccaagctcccctgaattctctgctgtggtatcagtgggcgattggctccaggccattaaaatggaccggtataaggataacttcacagctgctggttataccacactagaggctgtggtgcacgtgaaccaggaggacctggcaagaattggtatcacagccatcacgcaccagaataagattttgagcagtgtccaggcaatgcgaacccaaatgcagcagatgcacggcagaatggttcccgtctgagccagtactgaataaactcaaaactcttgaaattagtttacctcatccatgcactttaattgaagaactgcactttttttacttcgtcttcgccctctgaaattaaagaaatg

SEQ ID NO: 137110 - DNA, 450 bp, Homo sapiens; identical to SEQ ID NO: 133154
  misc_feature (1)...(450): n = a,t,c or g

SEQ ID NO: 137111 - DNA, 1762 bp, Homo sapiens
  misc_feature (1)...(1762): n = a,t,c or g
agggggatttgagaccatagtccatgtgcaggaattcgcgcccagcaacaagacagagctggcctggagtccgcggctggccgcgtgagtaggtgattgtctgacaagcagaggcatgagctgggtccaggccaccctactggcccgaggcctctgtagggcctggggaggcacctgcggggccgccctgcacaggaacctccatctctcaggtccctcgccggnctccctcggggcctccactgcagcgcagctgcccatagctctgaacaagtccctggttcccagcccaccggaaccccggcaagagggcccaccaaggctcttggtgccctttgagggacctgttttggggcagggcgctgggttgggggaacggggacaagggcgagctttcctgcagacggttgcagaaatttgcggacgactagcgtgcgtaaacgggggccacattggatttattttacttggccctgcgcaaaatgcgggaagtatggtgtcgagcggggaacctggctgtgtacaaccagctgctcaacatcttccccaaggaggtcttccggcctcgcaacatcatccagcgcatcttcgtccactaccctcggcagcaggagtgtgggattgctgtcctggagcagatggagaaccacggtgtgatgcccaacaaggagacggagttcctgctgattcaaatctttggacgcaaaagctaccccatgctcaagttggtgcgcctgaagctgtggttccctcgattcatgaacgtcaaccccttcccagtgccccgggacctgccccaggaccctgtggagctggccatgtttggcctgcggcacatggagcctgaccttagtgccagggtcaccatctaccaggttcctttgcccaaagactcaacaggtgcaagcaagatcccccccaagccccacatcgtagggcacagggcatgtatgtctccacaccaggaatccaagaagtcccgatcaagcaaggccgcccttggcccgccacaatccaagcccggcctgtcttttgttgagggccccttctccctgtggctccgcaacaaagtgtgtgtattaccaacatcctcagagctgaacttgctgcccccggaagaagaagggaagtggaagagaacgccggaggagtgggaacctctactacccgatggcagctggacctggagtatgtgaggagtggcttgggacaactacgagtttgacatcaatgaagtggaggaaggccctgtcttcgccatgtgcatggcgggtgctcatgaccagggcgacgatggcttaagtggattccaggggcctgcaggagaccaaccccaaaccttggcccaaaatcccccgtggtctttccgccttcgccgggtccaacccggggagcttccagacatccttctgcagggctggaggagcccgcccctgcccgaggaccaccaaggaagaagacgacaacctgcaagcgacagcagcagggcccagagctagtctgagccggcgcgagggcacgggctgtggcccgaggaggcggtggactgaaggcatgagatgccctttgagtgtacagcaaatcaatgttttcctgcttggggctctcttccctcatctctagcagtatggcatcccctccccaggatctcgggcttccagcggttggccgggggggccccccccggaatttccaggcccctttggttcccggaattcaaataaaaacggggcgggagcgctgttggttgtgcgcaaaaaaa

SEQ ID NO: 137112 - DNA, 2520 bp, Homo sapiens
atgaaggatccatatggctttggagacagtcgagattcaaggcgtgatcgatccccaattcgaggaagtccaaggagagagcccagggatggcagaaatggccgggatgcccgggacagcagagacattcgagacccccgagacttgcgggaccacagacatagtagagatttgcgggatcacagagacagcaggagtgtgcgcgacgttcgggacgtgagggatcttagagactttcgtgatctaagagactctagggattttcgagatcagcgagaccccatgtacgacagatacagagacatgagagactcccgagatcctatgtacaggagagaaggctcttatgaccgatacctacgaatggatgactattgcaggagaaaggatgactcttattttgaccgttacagagatagctttgatggacggggccctccaggcccagaaagtcagtctcgtgcaaaagagcgtttgaaacgtgaggaacggcgtagagaagagctttatcgtcaatattttgaggaaatccagagacgctttgatgccgaaaggcccgttgattgttctgtgattgtggtcaacaaacagacaaaagactatgctgagtctgtggggcggaaggtgcgagacctgggcatggtagtggacttgatcttccttaacacagaagtgtcactgtcacaagccttggaggatgttagcaggggaggttctccttttgctattgtcatcacccagcaacaccagattcaccgctcctgcacagtcaacatcatgtttggaaccccgcaaggacagaaactggtgagtgactgcacagagttcactgaaacggaatgccttccttgcggtgaaagcgaattcctagacacctggaacagagagacacactgccaccagcacaaatactgcgaccccaacctagggcttcgggtccagcagaagggcacctcagaaacagacaccatctgcacctgtgaagaaggctggcactgtacgagtgaggcctgtgagagctgtgtcctgcaccgctcatgctcgcccggctttggggtcaagcagattggtaatcgtcacctccacaaagagcgactcgctgtataccgttggcatgctagctttatctgttcgggcaatacgatgcccattgtacttgttgactggtctgatattcgtgagcaaaaacgacttatggtattgcgagcttcagtcgcactacacggtcgttctgttactctttatgagaaagcgttcccgctttcagagcaatgttcaaagaaagctcatgaccaatttctagccgaccttgcgagcattctaccgagtaacaccacaccgctcattgtcagtgatgctggctttaaagtgccatggtataaatccgttgagaagctgggttggtactggttaagtcgagtaagaggaaaagtacaatatgcagacctaggagcggaaaactggaaacctatcagcaacttacatgatatgtcatctagtcactcaaagactttaggctataagaggctgactaaaagcaatccaatctcatgccaaattctattgtataaatctcgctctaaaggccgaaaaaatcagcgctcgacacggactcattgtcaccacccgtcacctaaaatctactcagcgtcggcaaaggagccatgggttctagcaactaacttacctgttgaaattcgaacacccaaacaacttgttaatatctattcgaagcgaatgcagattgaagaaaccttccgagacttgaaaagtcctgcctacggactaggcctacgccatagccgaacgagcagctcagagcgttttgatatcatgctgctaatcgccctgatgcttcaactaacatgttggcttgcgggcgttcatgctcagaaacaaggttgggacaagcacttccaggctaacacagtcagaaatcgaaacctcaaaatttattcacacatggttacgctttggggaaattatgaggggatctctcagtaccaagtgcctcaattcgatcaatcaacgattaaaaatattgagtctgcaaaaggacttgatgtgtgggacagctggccgctgcaaaacgctgacggaacagtagctgaatacaacggctatcacgttgtgtttgctcttgcgggaagcccgaaagacgctgatgacacatcaatctacatgttttatcaaaaggtcggcgacaactcaatcgacagctggaaaaacgcgggccgtgtctttaaagacagcgataagttcgacgccaacgatccgatcctgaaagatcagacgcaagaatggtccggttctgcaacctttacatctgacggaaaaatccgtttattctacactgactattccggtaaacattacggcaaacaaagcctgacaacagcgcaggtaaatgtgtcaaaatctgatgacacactcaaaatcaacggagtggaagatcacaaaacgatttttgacggacgactatataggatccccgggacttacgagccctatgaaatttaa

SEQ ID NO: 137113 - DNA, 1762 bp, Homo sapiens
atcatcgtggtggaattcgtcagcagaggcctcgctcgggcgcccagtggtcctgccgtcttttctcaccttgctatggctcgactgcctctgcggggcgtccggtggggctgcttgctgaccgctgtccatccagaaccacccactgcatgcagagaaaaacagtacctaataaacagtcagtgctgttctttgtgccagccaggacagaaactggtgagtgactgcacagagttcactgaaacggaatgccttccttgcggagaaagcgaattcctagacacctggaacagagagacacactgccaccagcacaaatactgcgaccccaacctagggcttcgggtccagcagaagggcacctcagaaacagacaccatctgcacctgtgaagaaggctggcactgtacgagtgaggcctgtgagagctgtgtcctgcaccgctcatgctcgcccggctttggggtcaagcagattgctacaggggtttctgataccatctgcgagccctgcccagtcggcttcttctccaatgtgtcatctgctttcgaaaaatgtcacccttggacaagctgtgagaccaaagaccttggttgtgcaacaggcaggcacaaacaagactgatgttgtctgtggtccccaggatcggctgagagccctgggtggtgatccccatcatcttcgggatcctgtttgccatcctcttgggtgctggtctttatcaaaaaggtggccaagaagccaaccaataaggccccccaccccaaggcagggaaccccaggagatcaattttcccgacgatcttcctggggttccaacactgctgctccagttgcagggaggatttttacatggggtggccaaccggttcacccaggaggatgggcaaagagagtcgcatttcagttgcagggagagacagtgaaggctgcacccaaacccaggagtgtggccacgtgggccaaacaggcagttggccagagagccctggtgctgctgctgctgtggcgtgagggtgaggggctggcactgaactgggcatagctccccgcttctgcctgcaccgctgcaagtttgagacaggagacctggcactggatgcagaaacagttcaccttgaagaacctctcacttcacccctggagccacatccagtctcccaacttgtattaaagacagaggcagaagtttggttggtggtggtgttggggtaatgggtttagtaatatccaccagaccttccgatccagcagtttggtgcccagagaggcatcatggtggcttccctgcgcccaggaagccatatacacagatgcccattgcagcattgtttgtgatagtgaacaactggaagctgcttaactgtccatcagcaggagactggctaaataaaattagaatatatttatacaacagaatctcaaaaacactgttgagtaaggaaaaaaaggcatgctgctgaatgatgggtatggaactttttaaaaaaagtacatgcttttatgtatgtatattgcctatggatatatgtataaatacaatatgcatcatatattgatataacaagggttctggaagggtacacagaaaacccacagctcgaagagtggtgacgtctggggtggggaagaagggtctgggggagggttggttaaagggagatttggctttcccataatgcttcatcatttttcccaaaaggagagtgaattcacataatgcttatgtaattaaaaaatcatcaaacatgtaaaaagaaaa

SEQ ID NO: 137114 - DNA, 731 bp, Homo sapiens
  misc_feature (1)...(731): n = a,t,c or g
ctattaaataaaatcaagtttattcaaggaatgaccaggagttttcatcacctttcttcctacctcttctctcttccctccaccagatctggcatttaagggcacgatgggagcgggagacaggaggggcatccggtcctggaggctggactttaagtgctccacgcagcagcggcctcccatagtgcacaatggtggaaggaggcagttcgtatgtccccagggcggcatcccaatgccagaccttcctcccatggctctgttcaccctttacaagccagctacttgcagaaaagtggggcactgtgttccatccaacctgcaggcaactggtgcaaacggaggggtgtgtggctcagcttagcagcctagagctcaggaaccaggacagatcctgaaacaggagctgaaagggccagaactggcacctttgggatctcacaaaaatggaaagagccgctttttcacaatatagaggaccgtagcaagaaacagggctagcgcaaggaagatgagaagcttgtccgtcagctcccggcgattgtattttgtgataagcttccggcccagctggatggtgcccgacatggacttaannatctcatttgcatccaggatcngttcgtgagaagtgactagagactgcatggcctnctcgctctgctgatccccatgaggctctcagtgatggtaactgatgtctgggccangctcctcttttgtgttttcct

SEQ ID NO: 137115 - DNA, 585 bp, Homo sapiens
atggcggctccccaagacgtccacgtccggatctgtaaccaagagattgtcaaatttgacctggaggtgaaggcgcttattcaggatatccgtgattgttcaggacccttaagtgctcttactgaactgaatactaaagtaaaagagaaatttcaacagttgcgtcacagaatacaggacctggagcagttggctaaagagcaagacaaagaatcagagaaacaacttctactccaggaagtggagaatcacaaaaagcagatgctcaggaaaaccaccaaagagagcctggcccagacatccagtaccatcactgagagcctcatggggatcagcaggatgatggcccagcaggtccagcagagcgaggaggccatgcagtctctagtcacttcttcacgaacgatcctggatgcaaatgaagaatttaagtccatgtcgggcaccatccagctgggccggaagcttatcacaaaatacaatcgccgggagctgacggacaagcttctcatcttccttgcgctacgcctgtttcttgctacggtcctctatattgtgaaaaagcggctctttccatttttgtga

SEQ ID NO: 137116 - DNA, 2607 bp, Homo sapiens
atgaatgccatcagtgttcatgcaccggatctgttgccgcagccagtggtagatccagatatacgcaaccgctgttgggatgacaaaaaggtcgatgcgcaccacgccatcattccgaccgcacggagttctgcgatcaacctgacggagaacgaagcgaaggtctataacctgattgcccgtcagtatctgatgcaattctgcccggatgcggtgttccgcaagtgtgttatcgaactggacattgccaaaggcaaatttgtcgctaaagcgcgttttcttgctgaagcaggctggcgcacgctgttaggcagcaaagagcgcgatgaagaaaacgacggcacgccactgcctgtggtggcgaaaggcgatgagttgctgtgtgaaaaaggtgaagtggtagagcggcaaacccagccgccgcgccattttaccgatgcaacactgctttcggcgatgaccgggatcgcgcgctttgtgcaggataaagatctgaaaaagatcctccgtgcgaccgatggtctggggacagaggcaacgcgtgccgggattattgaactgttgttcaagcgtggtttcctgaccaaaaaagggcgctatatccactccaccgacgccggaaaagcgctattccattcgctgccggagatggcgacgcgaccggacatgaccgcgcactgggaatcggtgctgacgcaaatcagcgaaaagcagtgtcgctatcaggactttatgcagccgctggtggggacgctatatcagcttattgatcaagccaaacgtacgccggtgcggcagtttcgcggcattgtggctccgggcagtggtggcagtgctgataagaaaaaggctgcaccgcgtaaacgtagtgcgaaaaaaagtccgccagcagatgaagtcggaagcggggcgatagcgcgttaccacagtcctgcctgttttcgtccaaacagaggagtttccggtagcagcttaactgtgcggctgcttgagggggtctgctgttgtccagtccgccgctgtgaggtagaaagtctaggtgttgtcgggggtggtctagttgcatctctcaagattccctgcatccagtgtggcagcttactgtgttacaacattgaaagggtggaagtggcagctgagtgcctagtactcttctcagctttcctgccaggaagtgttgtatccatctgcgagtgcatagtgtttgcgcctcgcaacccgttgggtgtttggcggtctggataccggattgcggctgggacggttctggtgtgcgctcgtgggtgcaacctgggggtttcgccaggatacaaatatgaccagacgggaaacgcctccacagtcaagtgcgacgtttttcgcctgcttcgcggccaaaaatcggaaccaggccaaaagcaggccaaaagcactctagaacaaaccagcgaataccccagtaacagaggtattccgataatccgccaaaggcttggaggagagatccagatgaccatgcatcaagggtgtctggctggtgttaatcaagttccctggtggctgttgaagccaagtgccttctcagcaagcgttcatactagaaagaaaccctacaagtgtgaagaatgtggcaaagcatttatatggtcctcaacactaactagacataagaggatgcacactggagagaaaccctacaaatgtgaagaatgtggcaaagcttttagccagtcctcaacccttactacacataagataattcatactggagagaaacgctacaaatgcttagaatgtggcaaagcttttaagcaactctcaactcttactacacataaaataattcatgttggagagaaactctacaaatgtgaagaatgcggcaaaggttttaatcgatcttcaaatcttactacacataagataattcatactggagagaaaccttacaagtgtgaagaatgtggcaaagcatttatctggtcctcaacccttactaaacataagagaattcatgctagagagaaaccctacaaatgtgaagaatgtggcaaggcatttatatggtcctcaaccctaactagacataagaggatgcacactggagagaaaccctacaaatgtgaagaatgtggcaaatcttttagccaatcctcaacccttactacacataagataattcatactggagagaaaccctacaaatgtgaagaatgtggcaaagcctttaactggtcctcaactcttactaaacataagataattcatactgaagagaaaccctacaaatgtgaaaaatgtggcaaagcctttaagcagtcttcaatccttactaaccataagagaattcatactggagagaaaccctataaatgtgaagaatgtggcaaatcttttaaccggtcttcaacttttactaaacataaggtaattcatactggagtaaaaccctacaaatgtgaagaatgtggcaaagcatttttctggtcctcaaccctaactaaacataagagaattcatactggagagcaaccctacaaatgggaaaaatttggcaaagcctttaatcggtcctcgcacctcaccacagataagataactcattggagagaaatcttacaagtatga

SEQ ID NO: 137117 - DNA, 924 bp, Homo sapiens
atgaaagggttaaaacgagaagacgggattggccagcgcataggagaaccggcgtcggaatgcagtaatacgacgcaacaaactacacagttagcgcaaaataataaaacggtggaaagaattgcgatacaacggcaagtggggaaaaagacgggacggtgcttagcgtcgtgcgctcgcgtatacatatgggggtgggggtgggggtggggtgcccagttcgctatcggaatcaggatgaccatgagctacaaattacacacgggaacaagattctatgtggaattgtgtgcgataagggcgcacaaccgcaaccacgcactcagtcacgcagcgcacggacgaacggcagcggcgtgcggatactgcactcactttggcggattatcggaatacctctgttactggggtattcgctggtttgttctagagtgcttttggcctgcttttggcctggttccgatttttggccgcgaagcaggcgaaaaacctatggcaccgttccccagtcgtgctactctttttacgtcgcacttgactgtggaggcgtttcccgtctggtcatatttgtatcctggcgaaacccccaggttgcacccacgagcgcacaccagaaccgtcccagccgcaatccggtatccagaccgccaaacacccaacgggttgcgaggcgcaaacactatgcactcgcagatggatacactgaacggagatggacgatcgcaccttgcagggcagagagctcgttccctccgaactgcccgtccgcagcgccaataccggattcatacgacaagtgactttccggattgtctgtcaatacgctcaggctgttgctcaggatttggtaatgtgtcgtggataatggcggagattttgataagttgggaggcatctcaccctcttccccgctcatgcttctaa

SEQ ID NO: 137118 - DNA, 1689 bp, Homo sapiens
atgtgcgcggcaaaggacaaacagagacagacagacaagaaacacgaaacacacaaagacgagacaccacaacgaaacgggaaagacccgagcacgcacatgtatggacacacgcagaaaaaaacaacaacaccgagagcacgagcagaagacacgcaaacaaacagaaaacgcaaaccagagagcaccaccagcatccagcggggcaacgtacgcagaacagaccgaccagcgccagaacaaagcggcaacgggcgcaaagcgagcagaggcacgacacgaaagcaaacgcaacagacagcgagaaggccgcacgcagcgcgcgcgaaaaccgtccgagtcagcggcacaccgcgaacacacaggcacgagagagagggaccaggccggacgcgacacgacaccaacgcagcgaacaggcaggcgcccgcggaagccaggcacgacggccgagcacgccacgcgcggcgacagaccacagacgagaccaacgggcgggaggggcgagagaggaagcggacgaccgaggagcgagaagaagcgacacgaaggcggaagagcgagaagaagcgaagagggagcagaccgagccacacaggggcaggaccggggcacgaaagctggagcgagcacgagcgagcaggcaaggggacgcgacgcgaggccacgcgagagcgggcacaacgacgaaagacggacgacgacgacagcggatggaaggagagcgaagacacgggaagcgaaggcggggagagcagagcgcgcgaacacgtgagacgtcgagaggacaggaacaggagagccgagggaggagacggggaagagcggacggccagcgaaggaacgcacgcggagcgagggcgaaaaaacgcggagcggcgagagaaggccgtacgggaggagggggacgggtgcgcaagagacgaaccggagcggagcgcaaagaaggaagaggagcggcagacaagagagcagcagggagcaggcgaagcagcgggggaggaggcggagagagggggagggaagatgcgagcgggcacgcgagagggccgcgtgggaaggagagaggcaggaagagttgcacccacgagcgcacaccagaaccgtcccagacgcaatccggtatccagagcgccaaacacccaacgggttgcgaggcgcaaacactatgcactcgcagatggatacactgtacggagatggacgaacggacctgcagggcagagagctcttttccccgaaatgtccgttcggagcgccaataacggattattacgcagtgtgcaggatgacagaattcgagtcgaaaggatggataacatttattttgaatacagccatgctttccaggcagttacagagttttatgcaaaagatacagttgacatcaaaggttctcaaattatttctggcattgttaacttagagaagcctgtgatttgctctttggctgccatcataaaatacctcaaagaattcaacttggaaaagatgctctccaaacctgagatatatgcaaacaaccaagaagcacgtgaaaatatgctcaacatcattaagcatcagcctctgtctgaagtatggaagacatttagcctgcaggctcatgcctatgcagtaccagagggaatgtggagggcgcttgccatgcaccagcagccctattctcacctgtgtgattatatctaa

SEQ ID NO: 137119 - DNA, 849 bp, Homo sapiens
atgccaggcggtgttgatgatggagatgattatgagggtggtgtgatggtgatgatcgtgatggtgatggcgacggagatcatgatagggggacacagccacagccctccaacggctggtggagctgacgaccagcaggtgaccccggtgaggagccttcgggaccagtaccacctcatccggaagctggctccggctcctacggccgcgtgctccttgcccagcctcaccaggggtcaagtgcgacgtaaaaagagtagcacgactgggggcggtgccataggtttttcgcctgcttcgcggccaaaaatcggaaccaggcaaaagcaggccaaaagcactctagaacaaaccagcgaataccccagtacagagccacatcagcttatacgccgccgggataataaacagcgacagcaaggtgcggtgatcatgccgccaatcatcggcgcggcaatccggctcatacctctgaaccagcccccgttccccacagaatcggcagcagaccggcgaaatcaccgccaccgtcatcgctttcgggcgcacgcgcaggaccgcgccggatataacgcctcatccagcttctgctcgctgaatgtttgtggattattaacgacggcacggcctctatggcgtgaccatcaccagccaaattcggcggcgaccccggcgagggcgataaagccagtgcccgtcccacggaaagatgaaagcccatccaccacagcaaccagatgccgcccacagcgcaaacggtacgctgctgataatcagcaacgcttcgcccacccgacgaacgccagatacaacagcacgaagataatcatcaacgtcatcggcacctga

SEQ ID NO: 137120 - DNA, 3795 bp, Homo sapiens
  misc_feature (1)...(3795): n = a,t,c or g
atggtttacaaaatgcgttatcggtctcagcacccctatagcatcaaggaaaagcagatgaagagtgaagtgttgtccgttaaagagaaaattggttatggcatgggagacgccgccagccacattattttcgataacgtaatgttatatatgatgttcttttataccgatatttttggcattcctgccggttttgtcggaaccatgtttttggtcgctcgtgcactggatgcgatttccgatccttgcatggggttgttggccgatcgaacgcgctctcgctggggtaaatttcgtccgtgggtactgtttggcgcactgccattcgggatcgtctgtgtactggcctatagcacgccagatctcagtatgaacggcaaaatgatctatgcagcaattacttacaccctacttaccttactttataccgtcgtcaatatcccttactgcgcattgggtggtgtaatcaccaatgacccgactcagcgtatctcgctgcaatcctggcgttttgtgctggcgaccgcgggaggcatgctttctactgttctgatgatgccactggttaatttaattggcggtgataataaaccactcggtttccagggcgatttaagcccgatgttctctacacctgaagagatcgcccgacctggaccgtacgaaaacgacgttcacgtagtgggcgcatcctcactggctgccggtcataaaacgctgatcccggaactggtacgaagcgctgaacaacacatggggacgcgaagatatctgcgtggtcgacgggtggcagtcattccgccgacaggattacgccttcctgcaagagcgcggcagtggcggcgatttatggtccagcacactcgcccaggccatgacgctggtggaaaggcgtcaccgcgtcatcaggcactaagtacgcagctgcttgatgccattatgccgtactgcggtaacaccctgcgactgggcgttaccggcacccccggcgcggggaaaagtacctttcttgaggcctttggcatgttgttgattcgagagggattaaaggtcgcggttattgcggtcgatcccagcagcccggtcactggcggtagcattctcggggataaaacccgcatgaatgacctggcgcgtgccgaagcggcgtttattcgcccggtaccatcctccggtcatctgggcggtgccagtcagcgagcgcgggaattaatgctgttatgcgaagcagcgggttatgacgtagtgattgtcgaaacggttggcgtcgggcagtcggaaacagaagtcgcccgcatggtggactgttttatctcgttgcaaattgccggtggcggcgatgatctgcagggcattaaaaaagggctgatggaagtggctgatctgatcgttatcaacaaagacgatggcgataaccataccaatgtcgccattgcccggcatatgtcgagagtgccctgcatattctgcgacgaccgcctatgcatcgtgttcctagaaaccctaaggtcaacctgcttcctggaaccgctatggccaatctgctgtcctaggaccgcaatggccacgctgggtcctaggaaccgctatggctttgatccattggctgtttcctcggggacccggtcttgttccttgggggttcctcgggcacaccgcttcgcccttgcgggttctcgggacccaggctatacgcacaagcgcgttcttgccatattccaagcctttaacgcgttcccggaaccaccggccaacacgccggaagatccggcaggtctctctctactgccatcaggccacacgtctgctcgagagcctggcctctgtctcccaatcaactcgctttgccctattgttcagtctctctggccctcatcactgcgctctacccaaccgctcacaccccttcccagctgcccctcccaggcccatcaccctggcagcgtggctccgtgcggtgcagcctggtacccggcggggcacacgcacaggaagctgcctggcgtgttctcgcagcgcccgaggtcacacggcggcggcacgcggtggcactcgtccacatctgtaggcacagaccaggcggctgggactggggcagacagccccgggagaagcgacgcaaggaggcaggggtcagcagggaagcgggcagcgggaccaagcttgggccagagccaggatggggacccggccaggaccagccggcagcaggggcacagtgcagcagcaggcaatcgtggcagggcagggtttggtcagcgccacagggcagaaaggcagcagctttggggaccaagctcacgggaaggtggggtaggggctagagaagaacaggagcagtttggggataggggctctggtgtggcagggttggaatcggggtcgcggtcaggagattggttgccgcagtttgcaggacagtggccgcggctgcgggaggcagtcagtcagcgcagggctcacgcagcgcacggacgaacggcagcggcgtgcggatactgcactcactttggcggattatcggaatacctctgttactggggtattcgctggtttgttctagagtgcttttggcctgcttttggcctggttccgatttttggccgcgaagcaggcgaaaaacctatggcaccgtcccccagtcgtgctactctttttacgtcgcacttgactgtggaggcgtttcccgtctggtcatatttgtatcctggcgaaacccccaggttgcacccacgagcgcacaccagaaccgtcccagccgcaatccggtatccagaccgccaaacacccaacgggttgcgaggcgcaaacactatgcactcgcagatggatacactgaacggagatggacgaacgcaccttgcagggcagagagctcgttccccccgaactgtccgtccggagcgccaataccggattcatacgacaagtgaccttcccggaatgtctcgtcaataccgctcaggctgctgcctaggattctgtcaggtgttgttgcccgatgacaacggtaaattgcagccgttaacacatccgcaaggaatgacgccgtgggacgatgccatcgcgcagtggagttttgataaaggcctgcctgcgggcgcgggcaccgacacgttacccggtgtaccgtaccangattttgccgctaaaaagcggcgagaaaacctacgggctggtgaaatcttaacgctcgatctggcaagcgaaggatcaccccacgcccgccaggccagcgagatccgtcagcatgtgctgaacactacccgactggtgaataatctactggatatggcgcgaattcagtccggcggctttaatttgaagaaagagtggttaacgctggaagaagtagtcggcagcgcgctgcaaatgctggaaccgggtttatcgtcgcccatcaatctttctctgccagaaccgctgaccttaatccacgttgacgggccactctttgaacgggtgctgattaatctgctggagaacgcggtgaaatatgcgggtgcgcaggccgaaattggtatcgatgcccacgttgagggcgaaaatctacaactggatgtctgggataacggccccggtcttccgccaggccaggagcagacgatatttgataagtttgctcgcgggaataaagagtcggcagtaccgggggtagggcttggactggcaatttgtcgggcgatagtggatgtacacgggggcactattaccgcgtcaaccgaccggaaggtggtgcctgttttcgtgttacacttcccccagcaaatggccctgaacttgaaaatttcctga

SEQ ID NO: 137121 - DNA, 1214 bp, Homo sapiens
cggcgtccccaacatggcggctccccaagacgtccacgtccggatctgtaaccaagagattgtcaaatttgacctggaggtgaaggcgcttattcaggatatccgtgattgttcaggacccttaagtgctcttactgaactgaatactaaagtaaaagagaaatttcaacagttgcgtcacagaatacagccagttctctatcaaagggcatttatttggactgcttccacatttttttttaagctaacttattccctgacagacttttcttcaactcagcatgacttcaactctccaactacacctgttaccttcagtgacctgggagcagttggctaaagagcaagacaaagaatcagagaaccaacttctactccaggaagtggagaatcacaaaaagcagatgctcagcaatcaggcctcatggaggaaagctaatctcacctgcaaaattgcaatcgacaatctagagaaagcagaacttcttcagggaggagatctcttaaggcaaaggaaaaccacaaaagagagcctggcccagacatccagtaccatcactgagagcctcatggggatcagcaggatgatggcccagcaggtccagcagagcgaggaggccatgcagtctctagtcacttcttcacgaacgatcctggatgcaaatgaagaatttaagtccatgtcgggcaccatccagctgggccggaagcttatcacaaaatacaatcgcccgggagctgacggacaagcttctcatcttccttgcgctacgcctgtttcttgctacggtcctctatattgtgaaaaagcggctctttccatttttgtgagatcccaaaggtgccagttctggccctttcagctcctgtttcaggatctgtcctggttcctgagctctaggctgctaagctgagccacacacccctccgtttgcaccagttgcctgcaggttggatggaacacagtgccccacttttctgcaagtagctggcttgtaaagggtgaacagagccatgggaggaaggtctggcattgggatgccgccctggggacatacgaaccgcctccaggaccggatgcccctcctgtctcccgctcccatcgtgcccttaaaggccagatgtggtggagggaagagagaagaggtaggaagaaaggtgatgaaaactcctggtcattccttgaataaacttgattttatttaatagaaaaa

SEQ ID NO: 137122 - DNA, 1458 bp, Homo sapiens
gtgtgcccagtaatatgggatgctgccttgtgtgggactgctggtggtgcttgtgaccatgctgaaggtgctacagctcggatggctaatgatggtgggggctgctgcgacaacctgtggtggcagctgctggcctgctgatggattgcgtatgatcccgtattggcgctgcgaacgggcagttcggggggaacgagctctctgccctgcaaggtgcgttcgtccatctccgttcagtgtatccatctgcgagtgcatagtgtttgcgcctcgcaacccgttgggtgtttggcggtctggataccggattgcggctgggacggttctggtgtgcgctcgtgggtgcaacctgggggtttcgccaggatacaaatatgaccagacgggaaacgcctccacagtcaagtgcgacgtaaaaagagtagcacgactggggggcggtgccataggtttttcgcctgcttcgcggccaaaaatcggaaccaggccaaaagcaggccaaaagcactctagaacaaaccagcgaataccccagtaacagaggtattccgataatccgccaaagtgagtgcagtatccgcacgccgctgccgttcgtccgtgcgctgcgtgactgagtgcgtggttgcggttgtgcgcccttatcgctccactcaggctgctcgtgactggctgaagctgaaaatggcggggctggagcgtgaagaatttatgatgctgtatctgaaccagcagaaccagttgattgcccacgaaaccctgtttgccggttctattagcagtaccgaggtacatccccgtgaggtggtcaaacgcgccctgtatttcaatgcagcagcagtgatactggcgcataaccacccctccggcgacactactcccagccaggcagataagactataacgcagcgtctggtgcaggcgcttcagctcgttgatatccgtgtccctgaccatctgattgttggtggcaggcaaatctattcgttcgcagaacacggtatgaaaattatcagtaaacgcagggcaatgacgatataccgccagcatcctgagtcccgaatctttcgctactgcaccggcaaataccagtggcacggtagcgtctgtcattacaccggcagggacgttccggatatcgccggagtcctcgcggtatacgccgaacgccgccaggaccgcaatgggccctatacctgcctgatgagcatcaccctgaactgacaatagtggagaactgtaatgagcaaccctaccaggggcctgcagcgggagattacactgcgcctgggagcccgtctggtgcaggaaggcaaccgactgcattatctggctgaccgggccagcatcaccggcaagttcagtgacatcgaatgccggaagctggatgaaacattcccgcactttatcctccagatggcatcgatgctgaccaccggtgaactcagcccccaccat

SEQ ID NO: 137123 - DNA, 2234 bp, Homo sapiens
atgccccttactgtcagaagccccatctaccacgaagcataccagatcctgaggcagcagcctgaggcgtattacgagacaatccgggaggtcacttgtcgtatgaatccggtattggcgctccggacggccagttcggggggaacgagctctctgccctgcaaggtttttcgcctgcttcgcggccaaaaatcggaaccaggccaaaagcaggccaaaagcactctagaacaaaccagcgaataccccagtaacagaggtattccgataatccgccaaatcctagtaatcgccttgcaagctagccagctggacgtcacatgtggtaccccttggtgtcagagatgtctgcagaaaatctgcctgctgaacaatagcttgcaaacgcagcgtggcactcggtgccggtgccggcataaaggagtcagcgagcagggcgttggacaaacagagagccaaatcatgagtgaactcccattcacaattgcttcaaagagaataaaatatctaggaatccaacttacaaaggatgtgaaggacctcttcaaggagaactacaaaccactgctcaacgaaataaaagaggatacaaacaaatggaagaacattccatgctcatgggtaggaagaatcaatattgtgaaaatggccatactgcccaaggtaaattacagattcaatgccatccccatcaagctaccaatgcctttcttcacacaattggaaaaaactactttaaagttcatatggaaccaaaaaacagctcgcatcgccaagtcaatcctaagccaaaagaacaaagctggaggcatcacactacctgacttcaaactatactacaaggctacagtaaccaaaacagcatggtactggtaccaaaacagagatatagatcaatggaacagaacagagccctcagaaataatgccgcatatctacaactatctgatctttgacaaatctgagaaaaacaagcaatggggaaaggattccctatttaataaatggtgctgggaaaactggcttgccatatgtagaaagctgaaactggatcccttccttacaccttatacaaaaatcaattcaagatggattaaagacttaaacgttagacctaaaaccataaaaaccctagaagaaaacttaggcattaccattcaggacataggcatgggcaaggacttcatgtctaaaacaccaaaagcaatggcaacagaagccaaaattgacaaatgggatctaattaaagagcttctgcacagcaaaagaaactaccatcagagtgaacagggcacctacagcatgggagaaaaatttttacaatctacccatctgacaaaggctaatatccagaatctacaagaacttaaacatatttacaagaaaaaatcaacaccccatcaaacgataagggcgcacaaccgcaaccacgcactcagtcacgcagcgcacggacgaacggcagcggcgtgcggatactgcactcactttggcggattatcggaatacctctgttactggggtattcgctggtttgttctagagtgcttttggcctgcttttggcctggttccgatttttgggcgccgaagcaggcgaaaaacctatggcaccgtcccccagtcgtgctaactctttttacgtcgcacttgactgtggaggcgtttcccgtctggtcatatttgtatcctggcgaaacccccaggttgcacccacgagcgcacaccagaaccgtcccagccgcaatccggtatccagaccgccaaacacccaacgggttgcgaggcgcaaacactatgcacctcgcagatggatacactggacggggatggaccgcggaccttgcagggaaaaaggcgttcccccggactgcccgtccgaaggccaatacgggatatacagcagtaacttccggatgttcttataagctaggcattgttaggatctggaatccctctggatcacaacagaggtgtagaggctggaacacaacccctgaaccatgggcacttcctacaccggcatcaccaagtgccgattatcccccacattgggacaagcgtcccccttcgcttgcggcatacatccttgatttcccggaaacccgtgacccggatatacccagggaattaaccattggatcccggacatattcctccccctttacgagcgacacgacggatgggcaggcatatgccttcaatacgacatccaacaggctggttaaggcgtaa

SEQ ID NO: 137124 - DNA, 1046 bp, Homo sapiens
ctgttgggccctgcattgcctggctttgctggtgaaattgagaagaaaatatgctgcaagttgtggcttacaggtgaaagagttgttaaagccaaatgaaatgaacagttgattgtagtggatttgggttgaaaaatgagacttgcgaattcccctgtaaaaactggatgttaaaacccaggattcacttgcgatcctcgagaaaaaaccggtactgtcatcctcacgaaaccttggattcaggcaactgctgtgcgctgtatccgtatcagaacaacatgagatgccgatgaatggcctcctcaacttgttcacggatgctccgccgagtctatccacgcacagcattaccagaatcctgaggcagcagcctgaggcgtattgacgaaacaatcccggaaggtccacttgtcgtatgaatccggtattgggcacttgcgggacgggcagttccggggggaacgagctctctgccctgcaaggtgcgttcgtcgcatctccgttcagtgtatccatctgcgagtgcatagtgtttgcgcctcgcaacccgttgggtgtttggcggtctggataccgggtttgcggctgggacggttctggtgtgcgctcgtgggtgcaaccctgggggtttcgccaggatacaaatatgaccagacgggaaacgcctccacagtcaagtgcgacgtaaaaagagtagcacgactggggggcggtgccataggtttttcgcctgcttcgcggccaaaaatcggaaccaggccaaaagcaggccaaaagcactctagaacaaaccagcgaataccccagtaacagaggtattccgataatccgccaaagtgagtgcagtatccgcacgccgctgccgttcgtccgtgcgctgcgtgactgagtgcgtggttgcggttgtgcgcccttatcgtctgttgatagcttcttttgctgtactgaagctctttaatcagatcgcatttatcaatttttgcttttgttgcaatcgctttcggtgtcttcatcatgaaatctttgcccgtgccattgtcctgcat

SEQ ID NO: 137125 - DNA, 2968 bp, Homo sapiens
agtccccaacatggcggctccccaagacgtccacgtccggatctgtaaccaagagattgtcaaatttgacctgggaggtgaaggcgcccattcaggatatccgtgacctgttcaggacccttaagtcgctcttactgaactgaatcctaaagtaaaagagaaatttcaacagttgcgtcacagacctacaggacctgggagcagttggctaaagagcaagacaaagaatcagagaaacaacttctactccagggaagtggagaatcacaaaaaggcagatgcttcagcaattcaggccttcatgggagggaaagcttaattcttcacctggcaaaatttgcaattcggacaatctagagaaagcagaacttcttcagggaggagatctcttaaggcaaaggaaaaccaccaaagagaggcctggcccagacatccagtaccatcactggagagcctcatggggattcaggcaggatgatggcccagcaggtccagcagagcgaggaggccatgcagtctctagtcacttcttcacgaacgatcctggatgcaaatgaagaatttaagtccatgtcgggcacccatccagctgggccggaagcttatcacaaaatacaatcgccgggagctgacggacaagcttctcatcttccttgcgctagccctgtttcttgctacggtccctctatattgtgaaaaagcggctctttcccatttttgtgagattcccaaaggtgccagttctggcccctttcaactccctgttttcaggaatctgtccctggttccctgaagctcctaggctgcctaaagctgaagcccacacacccctccgttttgcaccccagttgccctgcaggttgggatgggaacaccagtgccccccacttttcctgcaaagtagctggcttgtaaagggtgaacagagcccatgggaggaaggtcctggcattgggatgccgcccctggggacatacgaaccgcctccttcccaccattgtgcactatgggaggccgctgctgcgtggagcaccttaaagtccgagcctcccaggacccggatgcccctcctgtctcccgctcccatcgtgcccttaaatgccagatctggtggagggaagagagaagagcgataagggcgcacaaccgcaaccacgcactcagtcacgcagcgcacggacgaacggcagcggcgtgcggatactgcactcactttggcggattatcggaatacctctgttactggggtattcgctggtttgttctagagtgcttttggcctgcttttggcctggttccgatttttggccgcgaagcaggcgaaaaacctatggcaccgccccccagtcgtgctactctttttacgtcgcacttgactgtggaggcgtttcccgtctggtcatatttgtatcctggcgaaacccccaggttgcacccacgagcgcacaccagaaccgtcccagccgcaatccggtatccagaccgccaaacacccaacgggttgcgaggcgcaaacactatgcactcgcagatggatacactgaacggagatggacggacgcaccttgcagggcagagagctcgttccccccgaactgcccgttgtagcgccaataccggattcatatcgtggatgcttccgtttgtgggccgtgaagtcccagcggtgtgagggaaaagaacgagggccactcagcgcgtgcgcccgcgcgtgcggggcgctgctgttcgtcggctgcgtcggcgtgtcgtgaggctgtgtcggcgactggtggggggtgaggcgtcgcgtcgccgcgtgcgtgtcgtgtggccgtgtggcatgtgacgacaggcaatactgcttatattgcttgactgcgcctgggttaacagtaggagctgatgaacgtatagagatatgaatgccataccggatgctaaggcgatatagagtgctacgacggagcgagccgtagatatgcgcgacagaggctggatttggcccgacgtagccagaaagacggcgactatgacgcgtagggagccaggggagccggggatgtgaaattgcggatttggtggttgtgggtgccttgcacttgactaacttgactttacttgccatcgtataagctgcctgatttttcagtgggcggttgtccatttgtatcagatcatccatacgaagaagcatacccgttgtccatttgtatcagatcatccatacgaagaagcatacccgttgtcgatttgtatcacaacatccatacgaagatccatacccgttgtccatttgtaacagaacatcgatgcgtagatgctcacgcgtagcgaattgatggacgcgggagccggtgtaaaagtgtacaaccacccgtacagggtagcatggtttaacaccgggatgcacacctcgaattttgcccgatagcggtagcggagttgaaacgtttgcttgatttgaagtacccagagagtttgggccgtgagggatgactactagagggcgtgtgactgtgtcagacaaagaactgcttagaatgtggagctgggcgtaaccggttggtttgggacattggtggccggcgtaccgaaggcggggacacctgtcagagtgttgaccggagtagaagcccgcctgcttacagccgcctgctttcagtctaactactactgccatcgtatagcgccgatttacacccacgctcgtgcacccgtgtatcgcaaccgtaacacgcaagtacgggacgcctttaactaggggccggagtgccgtaagaaaggggcagctacatatacgccggaatacccggtcttgcgggaaatgatatacggcctgggtgctttttgggggcaccgaaacgcccgtgtgtgacgtggatcttaacatgttgatagagacatccatgaaaaaggttgggcgtggccccggggaccaggcgacactgactagtgcggcgccccgcttgtccatgaatgtatgcat

SEQ ID NO: 137126 - DNA, 1300 bp, Homo sapiens
  misc_feature (1)...(1300): n = a,t,c or g
atcgtgggcaggaggtggtttctggtttgttggggcgtgtgtatgtgtatttggggggactgaagggtacgtgggggcgaagcagaacttgccatggcagcagcggaggaggaggtctggggcccccaatgttccaaatcgcgagcggggcggggcgggccgccngaaaacccccttcgaatgtaatatatgtttggagactgctcgggaagctgtggtcagtgtgtgtggccacctgtactgttggccatgtcttcatcagtggctggagacacgggccagaacggcaagagtgtccaagtatgtaaagctgggatcagcagagagaaggttgttccgcctttatgggcgagggagccaagaagcccccaggatcccagaattaaaaactccacccccgccccccagggggcagaggaccagctccagagagcagagggggattcccagccatttggtgatacggggggcttccacttcttcatttggtgttggtgcttttcccttttggctttttcaccaccgtctttcaatgcccatgagccttttcgccggggtacaggtgtggatctggggacagggtcacccaagcctccaacttggcaaggaattccctcttcctggtttctcggcaatcttcttccttttttggctgctcagtaattgagctaatgtctgctttcctgcccacctccagccagagaagaatcaagtattgagggtcccctgctgacccttccgtgactcctgggacccccttgaacccctctaatttctgttgggtaaaggcccaagccctgggacatttgtccaaggaaggccctgggggaggaaggagtgaaagtctgtgccatagatgggagagccttctgcctcagaggctcacctcagtaacgttgttttaattttctgcccctggggaaggaggatggattgagagaatgtctttctcctctcctaaatcatttgctttccctgatttcttgatttgatctttcaaaggtgggcaaaagttcccctctgactccttccccccctccccatcttactgatttaatttaatttttcacttccccagagtyctaatatggattttggactcttaaagtgcttccgccccctcactacctcctttaattccaaattcaataaaaaaggtgaaatataaaaaaaaaacaaaaaatattaagtgggaatcttctttaccccaaaaaatatttngggggggcgcctttttaaaaaatcctttggggggcccaattttcccccggcggaaaagatatattttttctttaaaagg

SEQ ID NO: 137127 - DNA, 1140 bp, Homo sapiens
atgcagcggcggcggcggcggcggctgctgctgctgccgccgcggaggcagacagaccgggcgctgccaccgccgccctcccccggctccatgccgccgccgctgccgcctcctcctctccggcgaggggcggggggctccggcccggggatgggctgtatccaaagcatcacctgcaaggcgcggatccggcgcgagaacatcgtggtgtacgatgtgtgcgccaccatcgaccagtgccccacgcgcatcgaggagacctcgcccatcgtcctgcgctacaagaccccctacttcaaagcctccgcccgcgtggtcatgccccccatcccccgccacgagacctgggtggtgggctggattcaggcgtgcaatcagatggagttcttcaacacctacagcgacctgggcattgacagggcgggtgtagggaggctccttgcgaaggcattttctcgtggtttgcttctgacttcccagaaacgcgaggagaaaggtgcggggcgggaagaacgcgacaaggagggttcgagaggcggaggtggggatggctggcgagtgcctggcgagtttcagggcgccaaaccggagcgggcttggaagagcaggtcccgggcatccgagcgggagttggtagttctgtccttgccctcgcgactgttgaagtttcgaacccttgtcccccgggccagggagcccggaggcgtttccgtctggaaccacaagccggacacagttgcctctctgtttccgcgccccctggaccagttctggtggggagctggaaggcaccgagtgcgtcccggccaagaagggcggatagccttgtgcgagcagcgttcggctggcgcggcgcggggtgtttcttatgctaaaggaaaggatggatctcttgtctgtctagggtccttactttttaaaactttcctaattgcggcactggaagggattcccctggcgcccaccgccgaattctatcggcgagctgggagctctccaactttcagcagcgccggttggtgcgcgccgggcttggctgctgcggtgaagaccaaggatcgccgcggctcctcaaccgccaggggccgcaggctacgggcggtcgcgtccgggacttttatatttaccaaattttcataa

SEQ ID NO: 137128 - DNA, 1716 bp, Homo sapiens
atggcgggggccgtgccgggcgccatcatggacgaggactactacgggagcgcggccgagtggggcgacgaggctgacggcggccagcaggaggatgattctggagaaggagaggatgatgcggaggttcagcaagaatgcctgcataaattttccacccgggattatatcatggaaccctccatcttcaacactctgaagaggtattttcaggcaggagggtctccagagaatgttatccagctcttatctgaaaactacaccgctgtggcccagactgtgaacctgctggccgagtggctcattcagacaggtgttgagccagtgcaggttcaggaaactgtggaaaatcacttgaagagtttgctgatcaaacattttgacccccgcaaagcagattctatttttactgaagaaggagagaccccagcgtggctggaacagatgattgcacataccacgtggcgggaccttttttataaactggctgaagcccatccagactgtttgatgctgaacttcaccgttaagcttatttctgacgcagggtaccagggggagatcaccagtgtgtccacagcatgccagcagctagaagtgttctcgagagtgctccggacctctctagctacaattttagatggaggagaagaaaaccttgaaaaaaatctccctgagtttgccaagatggtgtgccacggggagcacacgtacctgtttgcccaggccatgatgtccgtgctggcccaggaggagcaggggggctccgctgtgcgcaggatcgcccaggaagtgcagcgctttgcccaggagaaggcctgccaggctctcggggccatgctgtccaaaggagccctgaaccctgctgacatcaccgtcctgttcaagatgttcacaagcatggaccctcctccggttgaacttatccgcgttccagccttcctggacctgttcatgcagtcactctttaaaccaggggctcggatcaaccaggaccacaagcacaaatacatccacatcttggcgtacgcagcaagcgtggttgagacctggaagaagaacaagcgagtgagcatcaataaagatgagctgaagtcaacgtcaaaagctgtcgaaaccgttcacaatttgtgttgcaacgagaacaaaggggcctctgaactagtggcagaattgagcacactttatcagtgtattaggtttccagtggtagcaatgggtgtgctgaagtgggtggattggactgtatcagaaccaaggtactttcagctgcagactgaccatacccctgtccacctggcgttgctggatgagatcagcacctgccaccagctcctgcacccccaggtcctgcagctgcttgttaagctttttgagactgagcactcccagctggacgtgatggagcagcttgagttgaagaagacactgctggacaggatggttcacctgctgagtcgaggttatgtacttcctgttgtcagttacatccgaaagtgtctggagaagctggacactgacatttcactcattcgctattttgtcactgaggtgctggacgtcattgctcctccttatacctctgacttcgtgcaacttttcctccccatcctggagaatgacagcatcgcaggtaccatcaaaacggaaggcgagcatgaccctgtgacggagtttatagctcactgcaaatctaacttcatcatggtgaactaa

SEQ ID NO: 137129 - DNA, 1629 bp, Homo sapiens
gccggttagaagctctgctccccggcggggacactcagtcgcgtcggcaccgcggagcgggctgcgtcaggtggctggccggcgcggcgcggcgctcccctgctctctggctccgggctgcggcgcggcggctggagcgagcccctgtcccggcgcggggcggcggcgggcggccggcgggcgctgccttgcgtgtgagtgcacctcactcacatgtgctggagaatctggtaaaagcaccattgtgaagcagatgaggatcctgcatgttaatgggtttaatggagagggcggcgaagaggacccgcaggctgcaaggagcaacagcgatggtgagaaggcaaccaaagtgcaggacatcaaaaacaacctgaaagaggcgattgaaaccattgtggccgccatgagcaacctggtgccccccgtggagctggccaaccccgagaaccagttcagagtggactacattctgagtgtgatgaacgtgcctgactttgacttccctcccgaattctatgagcatgccaaggctctgtgggaggatgaaggagtgcgtgcctgctacgaacgctccaacgagtaccagctgattgactgtgcccagtacttcctggacaagatcgacgtgatcaagcaggctgactatgtgccgagcgatcaggacctgcttcgctgccgtgtcctgacttctggaatctttgagaccaagttccaggtggacaaagtcaacttccacatgtttgacgtgggtggccagcgcgatgaacgccgcaagtggatccagtgcttcaacgatgtgactgccatcatcttcgtggtggccagcagcagctacaacatggtcatccgggaggacaaccagaccaaccgcctgcaggaggctctgaacctcttcaagagcatctggaacaacagatggctgcgcaccatctctgtgatcctgttcctcaacaagcaagatctgctcgctgagaaagtccttgctgggaaatcgaagattgaggactactttccagaatttgctcgctacactactcctgaggatgctactcccgagcccggagaggacccacgcgtgacccgggccaagtacttcattcgagatgagtttctgaggatcagcactgccagtggagatgggcgtcactactgctaccctcatttcacctgcgctgtggacactgagaacatccgccgtgtgttcaacgactgccgtgacatcattcagcgcatgcaccttcgtcagtacgagctgctctaagaagggaacccccaaatttaattaaagccttaagcacaattaattaaaagtgaaacgtaattgtacaagcagttaatcacccaccatagggcatgattaacaaagcaacctttcccttcccccgagtgattttgcgaaacccccttttcccttcagcttgcttagatgttccaaatttagaaagcttaaggcggcctacagaaaaagaaaaaaaggccacaaaagttccctctcactttcagtaaaaataaataaaacagcagcagcaaacaaataaaatgaaataaaagaaacaaatgaaataaatattgtgttgtgcagcattaaaaaaaatcaaaataaaaattaaatgtgagcaaaaaaaaaaa

SEQ ID NO: 137130 - DNA, 898 bp, Homo sapiens
aaccctcaaaatcagatagtaatttcaaacaacattaatttcagatgatcccttttatttagaggccctgcatctgttttgatcaagtcacatagccttacaccaacttatcaaaaaaaaaaaaaaaaaaactacccaaaatatagttgtatttttaaaataacaaataaatatatagtcagtttggagagacctggagtacccgatgttgtctaccaactgtcacgatcacttctctgcaaaacgctgctgctgccattggagtccttatggttcctcttgctgaggctgtcagttcttcaatctcagcatttaatttatgtattacccattccattgcttctcggcctttactagcatttgaggatatcgtacttgccatcagtccttcaaggtaactgctgaggctaactcctttcacggtaattatggcttcttgtgtcaaaacagttttttctggatcctgaggatgtggtttgtatataagtctctcatctactgaaaccatgtttgtaaatgaaatattagtagatttaagttccattgttttctctacaggatcaactacagaatgttcttgcacatatgttttcgttcttgctgcaccaataagagacttcacaatggaaggcagtccccactctgtgctgagaagtctgtggctgtgcaactttccagagggatctatatgtctgtccaacacatcaactccaaccacacttgggttcatagggtttgggtatttctgcattgcagctgttgtaacagtttcccacgggtggtcaaagacgtgctccgaagtccagatcttcatggtgccggcaccctgagagatgtccgggtagcgccaggggacaacgaggcacagaggctacacctgcccctgccccgcccccag

SEQ ID NO: 137131 - DNA, 820 bp, Homo sapiens
gcaagtttacctctacgttgaacagaaggagctagcagctttggctgtggaacacgggccatgggaagggttttgtggggagcactaggaaggaagggctgagcagaaacagggcctctcacttctcctgggcaaagcgctgcacttcctgggcgatcctgcgcacagcggagcccccctgctcctcctgggccagcacggacatcatggcctgggcaaacaggtacgtgtgctccccgtggcacaccatcttctgcaagattgcagggagagagggggcagggtttactactgtagcacagacgggcggacgagagccaagcctccaccgtgctcgggcccgggagtgagcatcctggaaggtgccctcagaaatggagattctgttcagggaaggagcatctcatgcttgaaagccaagacccaaagcagcctccttataatctgaggttcataaagaaagaacatacggcaaactcagggagatttttttcaaggttttcttctcctccatctaaaattgtagctagagaggtccggagcactctcgagaacacttctagctgctggcatgctgtggacacactggtgatctccccctggtaccctgcgtcagaaataagctaggacgcaaaacaagaagtcagaggggaggcatgcagtgaccgcacctccacgggaagctggcttgtcagtgttcatggtgaggtggagtaagtgtgcgctggtcgtgggtctcaggccttcactccgccctcaccctgctatcacctaggtgtgtgccctgggctgaccacctcgaattccacgacactggact

SEQ ID NO: 137132 - DNA, 1584 bp, Homo sapiens
tatagattgccgtagaacgccttcggaatcgccggggagatccacgcgtgcgccgccgccgccgccgccatgggctgcctcgggaacagtttgaccgaggaccagcgcaacgaggatttttgcgcagcgtgaggccaacaaaaagatcgagaagcagctgcacaagagacaagtctgtctaccgagccacgcaccgcctgctgctgctgggagctggataatctggtaaaagcaccattgtgaagcagatgaggatcctgcatgttaatgtgtttaatggagacagtgagaaggcaaccaaagtgcaggacatcaaaaacaacctgaaagaggcgattgaaaccattgtggccgccatgagcaacctggtgccccccgtggagctggccaaccccgagaaccagttcagagtggactacattctgagtgtgatgaacgtgcctgactttgacttccctcccgaattctatgagcatgccaaggctctgtgggaggatgaaggagtgcgtgcctgctacgaacgctccaacgagtaccagctgattgactgtgcccagtacttcctggacaagatcgacgtgatcaagcaggctgactatgtgccgagcgatcaggacctgcttcgcttgccgtgtcctgactttctggaatcttttgagaccaagttccaggtgggacaaaagtcaacttccacattgtttgacgtggggtgggccagcgcgatgaacgccgcaagtggatccagtgcttcaacgatgtgactgccatcatcttcgtggtggccagcagcagctacaacatggtcatccgggaggacaaccagaccaaccgcctgcaggaggctctgaacctcttcaagagcatctggaacaacagatggctgcgcaccatctctgtgatcctgttcctcaacaagcaagatctgctcgctgagaaagtccttgctgggaaatcgaagattgaggactactttccagaatttgctcgctacactactccctgaggatgctactcccgagcccggagaggacccacgcgtgacccgggccaagtacttcattcgagatgagtttctgaggatcagcactgccagtggagatgggcgtcactactgctaccctcatttcacctgcgctgtggacactgagaacatccgccgtgtgttcaacgactgccgtgacatcattcagcgcatgcaccttcgtcagtacgagctgctctaagaagggaacccccaaatttaattaaagccttaagcacaattaattaaaagtgaaacgtaattgtacaagcagttaatcacccaccatagggcatgattaacaaagcaacctttcccttcccccgagtgattttgcgaaacccccttttcccttcagcttgcttagatgttccaaatttagaaagcttaaggcggcctacagaaaaaggaaaaaaggccacaaaagttccctctcactttcagtaaaaataaataaaacagcagcagcaaacaaataaaatgaaataaaagaaacaaatgaaataaatattgtgttgtgcagcattaaaaaaaatcaaaataaaaattaaatgtgagcaaag

SEQ ID NO: 137133 - DNA, 1238 bp, Homo sapiens
ggcacgaggtggcgggggccgtgccgggcgccatcatggacgaggactactacgggagcgcggccgagtggggcgacgaggctgacggcggccagcaggaggatgattctggagaaggagaggatgatgcggaggttcagcaagaatgcctgcataaattttccacccgggattatatcatggaaccctccatcttcaacactctgaagaggtattttcaggcaggagggtctccagagaatgttatccagctcttatctgaaaactacaccgctgtggcccaggactgtgaacctgctggccgagatggctcattcagacgggggttgaaccagtgcaggttcaagatactgtggaatatcacttgaagagtttgctgatcaaacattttgacccccgcatagcagattctatgtttactgaagaaggagagaccccagcgtggctggaaacagatgattgcacataccacgtggcgggaccttttttataaactggctgaagcccatccagactgtttgatgctgaacttcactgttaagcttatttctgacgcagggtaccagggggagatcaccagtgtgtccacagcatgccagcagctagaagtgttctcgagagtgctccggacctctctagctacaattttagatggaggagaagaaaaccttgaaaaaaatctccctgagtttgccaagatggtgtgccacggggagcacacgtacctgtttgcccaggccatgatgtccgtgctggcccaggaggagcaggggggctccgctgtgcgcaggatcgaccaggaagtgcagcgctttgcccaggagaaaactgttttgacacaagaagccataattaccgtgaaaggagttagcctcagcagttaccttgaaggactgatggcaagtacgatatcctcaaatgctagtaaaaccattgtggccgccatgagcaacctggtgccccccgtggagctggccaaccccgagaaccagttcagagtggactacatcctgagtgtgatgaacgtgcctgactttgacttccctcccgaattctatgagcatgccaaggctctgtgggaggatgaaggagtgcgtgcctgctacgaacgctccaacgagtaccagctgattgactgtgcccagtatatatttgtgcttgaaatgcaggtgccctgctgtgaagaagcccagagtcatccaggacaacatggaggggtgcaagtggggaggaactga

SEQ ID NO: 137134 - DNA, 1675 bp, Homo sapiens
gcgggcgtgctgccgccgctgccgccgccgccgcagcccggccgcgccccgccgccgccgccgccgcgcatgggctgcctcgggaacagtaagaccgaggaccagcgcaacgaggagaaggcgcagcgtgaggccaacaaaaagatcgagaagcagctgcagaaggacaagcaggtctaccgggccacgcaccgcctgctgctgctgggtgctggagaatctggtaaaagcaccattgtgaagcagatgaggatcctgcatgttaatgggtttaatggagagggcggcgaagaggacccgcacgcatgcaaggagcaacagcgatggctcggcacaaggcaaccaaagtgcaggacatcaaaaacaacctgaaagaggcgattgaaaccattgtgttttgccatgagcaacctggtgcccccccgtgggagctggccaaccccgagaaccaagttcaagagtggactacattcttgaagtgtgattgaaccgtgcctgactttgacttccctcccgaattctatgaggcatgccaaggcttctgtggggagggatgaagcgagtgcgtgcctgcttacggaacgcttccaacgagttaccagcttgatttgactgtgcccagtacttcctgggacaagattcgacgtgatcaagcaggctgacttatgtgccgagcgatcagggacctggctttcgctgccgtgttcctgacttctgggaatctttgagaccaagtttccagggtgggacaaagtcaacttccacatgttgtgacgtggggtgggccagcgcgatgaaacgccggcaaagtgggatccagttgtttcaacgatgttgacttgccatcatctttcgttggttggccagcagcaagctacaacatggtcatccggggaggacaaccagaccaaccgcctgcaggaggcttttgaaactctttcaagagcatctgggaacaacagatggctgcgcaccaatctctgtgatcctgttcctcaacaagcaagatcttctccgctgagaaaggtctttgctggggaaaatcgaagattgaggactactttcccagaatttgctcgctacactactcctgaggatgctactcccgagcccggagaggacccacgcgtgacccgggccaagtacttcattcgagatgagtttctgaggatcagcactgccagtggagatgggcgtcactactgctaccctcatttcacctgcgctgtggacactgagaacatccgccgtgtgttcaacgactgccgtgacatcattcagcgcatgcaccttcgtcagtacgagctgctctaagaagggaacccccaaatttaattaaagccttaagcacaattaattaaaagtgaaacgtaattgtacaagcagttaatcacccaccatagggcatgattaacaaagcaacctttcccttcccccgagtgattttgcgaaacccccttttcccttcagcttgcttagatgttccaaatttagaaagcttaaggcggcctacagaaaaaggaaaaaaggccacaaaagttccctctcactttcagtaaaaataaataaaacagcagcagcaaacaaataaaatgaaataaaagaaacaaatgaaataaatattgtgttgtgcagcattaaaaaaaatcaaaataaaaattaaatgtgagcaaag

SEQ ID NO: 137135 - DNA, 458 bp, Homo sapiens
  misc_feature (1)...(458): n = a,t,c or g
cattaaagacatcacgaccgcccgcccggnccggaattaccgggtcgaccgacgcgtccggggtcaccatgaagttcaatcccttcgttttctcggaccgcagaaaaaaccgcaaacgtcacgtgaatgccccctcacacgtgcgcaggaagatcatgtcatccccgctctccaaggagctgcggcagaagtacaatgtccgctccatgcccatccgcaaggacgacgaggtccaggtagttcgaggacactacaaaggtcagcaaattggcaaggtagtccacgtgtacagaaagaaatatgttatctacatcgagcgggtgcagcgtgagaaggccaacggcacaaggatcggaaaaaaattcttgaacgcaaagccaagtctcgacaagttggaaaagagaaaggcaaatataaagaagaacttattgggaaaatgcaggaatatatagaacctg

SEQ ID NO: 137136 - DNA, 579 bp, Homo sapiens
gaatacgtcgcctacagccacacgggccgcatcatccctgcaatctggttccgctacgacctcagccccatcacggtcaagtacacagagagacggcagccgctgtacagattcatcaccacgtattttccagaagggaatgcccctttccataatcagggcaacccggtttttgattatgtctggaacacggtgcgtcgtcgctttggcggtcgtctgcatgcgagaaatgacggtattaaaccattcatccagtcggtacgtcaggggtactggggatattatttacccgatcaggatcatggcccagagcacagcgaatttgtggatttctttgccacctataaagcgacgttgcccgcgattggtcgtttgatgaaagtgtgccgtgcgcgcgttgtaccgctgtttccgatttatgatggcaagacgcatcgtctgacgattcaggtggttatcaccaggctaaaactggacaaggatcggaaaaaaattcttgaacgcaaagccaagtctcgacaagttggaaaagagaaaggcaaatataaagaagaacttattgagaaaatgcaggaataa

SEQ ID NO: 137137 - DNA, 813 bp, Homo sapiens
  misc_feature (1)...(813): n = a,t,c or g
tttttttttttttttttgatagtaagtggaatttatttataagacaatgcaaatactatgtggaattaggaagcatttcccatttttattcataaaatttattacttaaaaattgcaaaaattaaattttacaagaggcacagggtaaccaaaaccaggaaattgaaatgttccaaaccattccgaaaagttcgaaagaaacacaccctagccttcaaaaatctccgggttaaaccgtggttgcacaaccaggttctatttattcctgcattttctcaataagttcttctgtatattatgccttgctcttttccaccttgtcgagacttggctttgcgttcaaagaatttttttccgatccttgtcccagttttaagccctggtgaataaccaccttgccttgggtgaaatgccccacgtggaacagtttgtccgttgggctttctcacggctgcaccccgctcggatgtagggtggacatattttctttctggtacacctgggactaccttggccaatttgctgacctttgtagtgtccatcgaactacctgggacctcgtcgtccttggcggatggtgcatggagcggacattgtacttctgccgcagctccttggagagcgggggatgacatgatcttcctgcgcacgtgtgagggggcattgaagtgacgtttgcggtttttactgcggtccgaggtaacgaagggattgaacttcatggtgaccctctcgtgatccgcccgcctcggccttccaaagtgctgnnnntacgagcgtgagccgccgcgccctcctacctctacttttttc

SEQ ID NO: 137138 - DNA, 1201 bp, Homo sapiens
caagacagacccgagatccccgactgcgcgccgtgttccacgtaccccggggggccggtcatgaaaatggcggtatctggggccgacagcgatgccgaggggaaactagaagatggccattgaaacaactctttgagctctccagttcaagcggacgtgtacttcccacgactgatagttccattttgtgggcacattaaaggtggcatgagaccaggcaagaaggtgggagtgatgggcatcgttgacctcaacccaaagagctttgcaatcaacttgacctgtggggactcagaagaccctcctgccgatggggcaatcgaactcaaagctgtgttcacagatcggcagctactcagaaattcttgtatatctggggagaggggtgaagaacaagtcagcaatcccttactttccattcattccacgaccatgccattcagggtggaaattctttgtgagcacccactgtttccgaagtgtttgtggatggacaccaactttttgatttttaccatccgcattcaaaccgttatcttgcaatttgacaccataaagataaattggagacctccagatcaccaagcttgggcttgatttaaaccacctctatttcaaataaggatcacgtgccacaactatctggactgttggtctggaagaagtgtcctagcaagatctggagacttaaaaagaaaacaaaaacaaatggcaagtttcacttaagggtggtctgcccttaagaagaaagctgttgggacaaagacaccgagccattatacccagaataaaataatacatttatgctggattttattcagaccaaactaaaatggatttgtgatgatttgtgatttggtagcaaattattcatcttttcaaagcaaggcaatgcttagaaacagaagtgctaaagacacttaaaaagccaacaacaacggtacagtgaaatcaatgcatttctgccactaaagtggaattgtgtagccacaaccaatattttagtcagggtatttacatagaatgtaggttgttcaaggtttgactttttttttgttttttgtttttgtttttgtttttgttttgcacagcataatgttaattcagattgttgaagctttcttgtagttatttatttatactcaatgtatgtattaaagaatgaacaatgtctcaaaaaaaaaaaaaaagggcggccgct

SEQ ID NO: 137139 - DNA, 486 bp, Homo sapiens
  misc_feature (1)...(486): n = a,t,c or g
caaggttttataaagccccccctaaaggaagaaaactttactctcccaccccccggtaaatttgggccccccaagggatccttaaatagcccccccccnnnnnnnnnnngtgaagtcctggggggggcatattattattagtttattatttataccgtgctctgttccaaaaaggatgtaaggaggcagcatggcttgagtacccccttacttgatgagttaaggagttcacatccatctagagacacttgtctgagagactgtattagaagactacgggatggtttaggggagggaagagtgctaagaaaagcagtggcatcttgtccaacctcatcttctctctcctcatttgcaaatcatatctcaggagtaagccaaaaactggtgggagggttgcagcaggaaaaaattagcagtaaagcagnagancgggggcgtgcgtatgccatcatttccgggccggtnccgcanggcgatcaattn

SEQ ID NO: 137140 - DNA, 1479 bp, Homo sapiens
  misc_feature (1)...(1479): n = a,t,c or g
gttcaggagggcatgatatggagagttgggcattggctgtggtccctgaatacagaagtatttttcttgtggtgcctggaactggcatcccctttgtggagcttagggcaagccccgcctctgcaaggagacttggtttgtgggacacacttggtttcagggaaggggaaagaggtcaccaagggcagaggtgtccaggccggagccaggggccccactgttgggatgctggctgcagtggggcgccccaagcccacggcccctctgtcttctctttcgactttgcagctgtacttggtttgctcctctacccgcaggagctgacatggacccaaatcctcgggccgccctggagcgccagcagctccgccttcgggagcggcaaaaattcttctaggacattttacagccacagacagagtttgtctttcctctgtcccatctgcatctcgagtcgcagagaccccccataggtagtatctcatccatggaaatgaatgtggacacactggagcaagtagaactttattgaccttggggacccggatgcaacaaaaggtggccttgccttgcgaaagatcctccaccaaccccccagtcgtctggggtgggacaaccatttggaggagctgagcctgccggtgcctatatcaggacaggaccacatctaggacctcctcctcctcctcctcccgactcctccaccaacctgcatagcccaaatccaagtgatgatggagcagatacgcccttggcacagtcggatgaagaggaggaaaggggtgatggaggggcagagccttggagcctgcagctagcagtgggccccttgcctacagacctgaccccgctggctattctcccacatngagaccaccaggccccagcccagagcctntcggggagaagacccagactctttacttgccagtagggcacccagaggtgggaatggatggtgggattgtggtaccctttcctaagaattaaccctctccctgctttactgcctaattttttcctgctgcaacccctcccaccagtttttggcttactccctgagatatgatttgcaaatgaggagagagaagatgaggttggacaagaatgccactgctttttcttagcactctttcccttcccctaaaaccatccgcgtagtcttctaaatacagtctctccagacaagtgtctctagaatggatgtgaaatcccttaactcatcaagtaaggtggtactcaagccatgntggcctccttacatcccttttgggaacagagcacgggtataaataaataacttattaataatatgccnnnnnnnnnnnnnggggggcgcccttttaaaagaaccaattttaaccccccggggcgggcaagaaaaaattttttttagggggccccaaaaataaattcaggggcccgcttttaaaaaccttgggaagggaaaaacccgggggttccccaatttaatcccct
